United States Patent Application Publication US 2019/0348154 A1 - sequence listing, part 19

SEQ ID NO: 72594 - DNA, 1113 bp, Citrobacter koseri
atgaagaaaaaaaacacaacgtgtacggtaacgtttatctgcgccgttttttcagtacaatcagcatatattcctaaccctaaacccttagttatctcatcccatgatgagttaatcggggcgataagcccggcttttgcgatgaatttagaaaaaatcaatgagttaaccgcgcaagatatggcgggtgtcaatgcgacaatccttgaacagctcaattccgacgtccaactgatcaatcagttagggtattacatcgttagcggcggcggaaaacgtatccgcccgatgattgccgtactcgctgcgcgcgccgttggttatcaggaaaatgcgcacgtcacgatcgctgccttaatcgagtttatccacaccgccaccctgctacacgacgatgttgtggatgaatccgatatgcgtcgtgggaaggcaacggcgaatgcggcatttggcaacgccgccagcgtcctggtcggtgattttatctacacccgcgcgttccagatgatgaccagccttggctcgctgaaagtgctggaagtaatgtcagaagcggtgaacgtcatcgccgaaggcgaagtgctgcaactgatgaacgtcaacgacccggacatcaccgaagaaaattacatgcgcgtgatttacagcaaaacggcgcgcctgtttgaagctgcggcgcagtgttccggtattcttgcaggctgcactcctgagcaggaaaaagggttgcaggattatggtcgttatctcggtacggcctttcagctgattgacgatttactcgattacagcgctgatggcgagcagttaggtaaaaatgtcggcgatgacctcaacgaaggaaaaccaacgctgccgctgctgcacgctatgcgtaacggtacgccagagcaggcacaaatgatccgtaccgccattgaacaaggcaatggtcgccaccttctggaacccgttctggaagccatgaccgcctgcggttcactggaatggacgcgtcagcgtgcagaagacgaggccgataaagccatcgccgccctacagattctgcctgatacgccgtggcgcgaagccctgatcggtctggcgcacatcgccgtacaacgcgatcgttaa

SEQ ID NO: 72595 - DNA, 273 bp, Citrobacter koseri
atggaaaataaactcattgactggcatcccgcagacatcattgccggattacgtaaaaaagggacatctatggcggcggaatcacgcaagaatggattaagttcctcgacgctggcaaacgccctgacccgaccgtggccgaaaggagagctcatcattgcgaaggcgctgggtacagaaccctgggtgatctggccatcgcgctatcatgacccagaaacccatgagttcattgacagaacacgtctgatgcgggctcgaaaagggaaataa

SEQ ID NO: 72596 - DNA, 1260 bp, Citrobacter koseri
atggataaatttcgtgtacaggggccgacaacgctccagggcgaagtcacaatttcaggcgctaaaaatgccgcattgccgatccttttcgcggcgctgctggcagaagagccggtagagatccagaacgttccaaagctgaaagacatcgatacgacgatgaaactgctcagccagcttggaacgaaagtggaacgtaacggttctgtctggatcgacgccagccaggtcaacatcttctgcgcgccttatgaactggtaaaaaccatgcgcgcgtcgatttgggcgctggggccactggttgcgcgttttggtcaggggcaggtttctctgccaggcggctgcgccatcggcgcgcgtccggtcgatctgcacatcaccggcctggaacaactgggcgctgagatcaagctggaagaaggctatgtgaaggcgtctgttaatggtcgtctgaaaggcgcgcatatcgtgatggacaaagtcagcgtcggtgcgacggtgaccatcatgtctgcggcaacgctggccgaagggaccaccgtgattgaaaacgccgcgcgtgagccggagatcgtcgataccgcgaacttcctggtgacgttgggagcgaagatcagcggtcagggcaccgatcgtattaccattgagggcgttgagcgtctgggcggcggcgtataccgtgttctgcccgatcgcattgaaaccggcaccttcctggtcgcggcggcgatttccggcggtaaaatcgtctgccgtaacgcgcagccggatacgctggatgccgtactggctaaactgcgtgacgccggagcggatattgaaaccggtgaagactggatcagcctggacatgcatggccagcgtccgaaagctgtgaatgtgcgtaccgcgccacacccggctttcccgacagatatgcaggcgcagtttacgctgctgaaccttgtcgcggaagggacgggtttcatcacggaaaccattttcgaaaaccgctttatgcatgtgcctgaactgatccgtatgggtgcgcacgcggaaatcgagagcaacaccgtgatttgccacggcgttgaaaaactctccggggcgcaggtgatggcgaccgacttgcgtgcgtctgcgagcctggtgctggcgggatgcattgcagaaggtacgacgctggttgatcgtatttatcacatcgatcgtggctatgagcgcattgaagacaaactgcgcgcgctgggcgcgaatattgagcgtgtgaaaggcgagtaa

SEQ ID NO: 72597 - DNA, 294 bp, Citrobacter koseri
atgttgggctgttttccctatttgacgaatgaagagcccatggaaaatcatgaaattcagagcgtgctgatgagcgcactctccctccaggaagtccacgtctctggcgatggcagtcactttcaggttatcgccgtgggtgagatgtttgacggcatgagccgggtcaagaagcagcagtctgtttacggcccgttgatggagtttattgcggataaccgtatccatgccgtatcgatcaaagcgtataccccagcggaatgggaacgcgatcgcaaacttaacggtttttga

SEQ ID NO: 72598 - DNA, 294 bp, Citrobacter koseri
atgacgcagtcacttagctggacgcgcgaaggtgacacgctggcattagcgggagagctggaccaggacgtgctgaaccctctgtgggatgcgcgcgttgatgcgatgaaaggcgtaacctgcatcgatctgagccaggtctcccgggtggatagcggtggtctggcgttactggtgcatcttgtcgatcaggcgaagcgacagggcaacagcgtttcgctgcaaggggtaaacgagaaggtttacacgctggcgaagctctataatttgcctgctgacgtgcttccacgttaa

SEQ ID NO: 72599 - DNA, 636 bp, Citrobacter koseri
atgtttaagcgattaatgatggtagcgctgctggtcattgcaccgttgagcgcggcaaccgcggcggaccagactaacccgtataaattgatgaatgaggcggcgcagaaaaccttcgatcgtctgaaaaacgaacagccgaaaatccgtgccaacccggattacctgcgcgacgtcgttgaccaggaactgctgccgtatgtgcaggtgaaatacgcgggcgcgctggtactgggtcgttactaccgggaggcgacgccggcgcagcgtgacgcctatttcgcggcgtttcgtgaatacctgaaacaggcttatggtcaggcgctggcgatgtaccacggccagacttaccagattgcgccggaacaaccgctgggcaatgcgaccatcgtgccgatccgcgtgacgatcatcgatccgaatggccgtcctccggttcgactggatttccagtggcgtaaaaacacccagaccggtaactggcaggcttatgacatgatcgcggaaggcgtcagcatgatcaccacaaaacagaatgagtggagcgatctgctgcgtaccaaaggcatcgacggcctgaccgcgcagttgcagtcaatttctcgtcagaaaatttcgctggaagagaaaaaataa

SEQ ID NO: 72600 - DNA, 552 bp, Citrobacter koseri
atgcaaacgaaaaaaagtgaaatttgggtagggatcttcttgctggttgcgttgctggcggcgctgtttgtttgcctgaaagcggccaatgtcacctcaatgcgcacggagccgacctacacgatttatgcgaccttcgacaatattggcggcctgaaagcgcgctctccggtgcgcatcggcggggtggttgtcggccgggttgcggatatctcgctggatccgaaaacctacctgccgcgcgtcacgctggatattgaagagcgctataaccacattcctgataccagttcgctgagtatccgcacctctggcctgctgggggagcaatatctggcgttaaacgttgggtttgaagatcctgaactgggaacgtctatcctcaaagatggcgacactattcaggacaccaagtccgcgatggtgcttgaagacatgattggtcagttcctttacaacagtaaaggggacgacaataagaattctggcgatgcgccagcgccaactgaaggcaataatgaagcgacaccgcctgcgggcgcaacaaattaa

SEQ ID NO: 72601 - DNA, 783 bp, Citrobacter koseri
atgctgttaaatgcgctggcatcgcttggacaccgggggatcaaaaccctcagaacgttcgggcgtgccgggttaatgttattcaatgcggtgattggtaagccggaatttcgcaagcatgcgccgctgctggtgcgtcagctctataatgtgggcgttctgtcgatgctcattattatcgtctctggcgtttttatcggcatggtgctcgggttgcagggctatctggttctgacgacctacagcgcggaaaccagcctgggtatgctggtggcgctttcattgctgcgtgaactggggccggttgtcgcggcgttgctgtttgccgggcgcgcagggtctgcgctgactgcggaaattggtcttatgcgagcgactgagcagctctccagtatggaaatgatggccgtcgatccgctgcgccgggtgatctctccgcgcctgtgggcgggggtgatttcgctgccgctgctgacgattatcttcgtggctgttggcatctggggaggatcgctggttggcgttagctggaaggggatcgatgccggtttcttctggtcggcgatgcaggatgccgtcgactggcgtctggatctcgtgaactgtttgattaagagcgtggtgttcgccatcacggtaacgtggattgcgctgttcaatgggtatgacgcgattccgacctctgccgggattagccgcgcaaccacgcgcaccgttgtgcactcgtctttggccgttctgggtctggattttgtgttgaccgcactgatgtttgggaattga

SEQ ID NO: 72602 - DNA, 813 bp, Citrobacter koseri
atgggtcagtctgtggcgaatttagtcgatatgcgcgacgtcagcttttcgcgtggcgatcgctgcattttcgataatatttccctgaccgtgccacgcgggaagatcacggcgatcatggggccatcggggatcggtaaaaccacgctgttacgactgattggcggacaaatcccgccggatagcggggaaatactgtttgatggcgaaaacgtacctgctatgtctcgctcgcggttgtacacggtacgaaaacggatgagcatgctgtttcagtcgggagcgctgttcaccgacatgaacgtgtttgataacgtagcctacccgctgcgggagcacacgaatttacccgcgccgctgttgaaaagcacggtgatgatgaaactggaagccgttggtctgcgcggcgcggcaaagctcatgccctctgaactgtccggggggatggcgcggcgtgcggcattagcccgtgctattgcgctggaacctgacctcattatgttcgatgagccgtttgtgggtcaggacccgattacgatgggcgtactggtgaagctgatttcagaactgaacagcacgctgggcgtaacctgcgttgtcgtgtcccacgatgtgccggaggtgctgagcatcgccgatcacgcctggattatggcggacaaaaaaatcgtggcgcacggtagcgcgaaggaactgcaagaaaatgccgacccgcgcgtccgccagttcctggacggtattgctgacgggccggttccgttccgctatccggcgggcgattatcactccgatttactcgaaacagggagttaa

SEQ ID NO: 72603 - DNA, 978 bp, Citrobacter koseri
atgcttttagctacggcgctgttaattattggtttacttctggtggtctacagcgccgatcgtctggtgtttgccgcatcgattttgtgtcgggcagtggggattcctccgctcattatcgggatgacagtcgtcagtatcggaacatcattaccggagataattgtctcggttgccgcgtcgcttcacgggcaactggacttagccgtaggcaccgcgctcggctccaacatcatcaatatcttgctgattctgggcctggcggcgctgtttcacccttttaccgtgcattctgatgttttgcgtcgcgaattgccgctaatgttatttgtcagtgtgctggcgggttccgtcctgcacgatggcgagctgagccgtagcgacggaatctttcttctgctgctggccgtgctatggctgctgttcattgttaagatcgcgcgcctggcggagcggcagggaaatgacagcctcacccgggagcaggtggcggagttgccgcgcgaaggcggcttacccgtcgcgtttttgtggctgggtatcgcgctgattattatgccgatggcgacgcggatggtggttgataacgccaccgtactggcgaactacttcgctatgagcgaactgactatcggcctgacggtgattgcgattggcaccagcctgccagaactggcgacggcgatcgcgggcatccgcaaaggtgaaaatgatatcgccattggcaacattatcggcgccaatatttccaatatcgccatcgttctggggctgcctgcattgattacgccaggcgacgtcaacccgctggcgtttgggcgtgactatagcgtgatgctgttagtgagcattgttttggcattgctgtgctggcggcgtccgcgccagattggtcggggcgcaggcgtgctgctgaccggcggttttatcgtatggctggcgatgctgtactggctatcgccgcttcttattggataa

SEQ ID NO: 72604 - DNA, 987 bp, Citrobacter koseri
atgtcgcacttagcgttacaaccgggttttgactttcagaaagcaggcaaagacgtcctggagattgaacgtgaaggcctggcggagcttgatcaatacatcgaccagaacttcacgctcgcctgtgaaaaaatcttctcatgcacaggcaaagtcgttgtcatggggatggggaaatcaggtcatatcgggcggaaaatggccgccacctttgccagcaccggcacttccgccttttttgttcacccgggcgaggccgcgcatggcgatctcggcatggtcacctcgcaggatgtggtgatcgcgatttccaactctggcgaatccaatgagattgccgcattaatcccggttctcaaacgcttgcaggtgccgctgatttgtatcaccgggcggtcagaaagcagcatggcgcgtgcggcggatgtgcatctgtgtgttaaagtgccgaaagaagcctgcccgttgggtctggcgccgaccagcagcactacggctacgttggtcatgggcgatgcgctcgcggtcgcgttattaaaagcccgcggctttaccgccgaagattttgcgttgtcgcatccgggcggcgcacttggccgtaaacttctgctgcgcgttaacgatatcatgcacaccggcgatgaaatcccgcatgtgaataaaaacgccagcctgcgtgatgccctgctggaaattacgcgtaaaaatctcggcatgaccgtcatttgtgatgacacaatgaagattgacggcatctttaccgatggcgacttgcgtcgtgttttcgatatgggtgtggatgttcgccagttagggattgccgacgtcatgacgccagggggaattcgcgttcgccccggtattctcgccgttaacgccctgaacttaatgcagtcccgtcatatcacctccgttttggttgctgatggcgaccagttactgggtgtgttacatatgcatgatttactgcgtgcaggcgtagtgtag

SEQ ID NO: 72605 - DNA, 567 bp, Citrobacter koseri
atgagtaaagcaggtgcgtcgcttgcgacctgttatggccccgtcagtacacaggttatcgcccaggcggaaaacatccgtctgctcatcctcgatgtggatggcgtgctgtctgatggtctgatttatatgggcaacaacggtgaagagctgaaggcctttaacgtccgtgatggctacggcattcgctgtgcgctcacttccgggattgaggtcgctattattaccggacgaaaggctaaacttgtagaagatcgctgtgccaccctggggatcacgcatctctatcaggggcagtcggacaaacttatcgcgtttggcgacctgctcgataagctgggcgttgcgcctgaaaatgtggcttacgtcggtgacgatctgatcgactggccggtgatggaaaaagtgggtctgagcgttgcggtcgctgatgcgcatccgctcctgatcccccgcgccgactatgtgacgcatatcgccggtggacgcggtgcggtgcgggaagtgtgcgatctactcttgctggcgcagggtaagcttgatgaggccaaagggcaatcgatatga

SEQ ID NO: 72606 - DNA, 576 bp, Citrobacter koseri
atgagtaaaaccagacgttgggttatcattctactgtcgttggccgtactggtgttgatcggaattaatctggcggataaagacgatcctgctcaggttgtggtgaacaccagcgatccgacttataagagcgagcataccgatacggtcgtctatagcccggaaggcgcgttgaactatcgtcttattgcgcagcacgttgaatattattcagaacaggcgctttcgtggtttacccaaccggtattaaccacctttgataaagataaagtcccgacatggtcgattaaagcggataaggcgaaattgaccgaagaccggatgctctatctgtatggtcacgttgaagtcaatgcgctggcgcctgacgctcaactacgcagaatcacgacggataacgcgacgatcaacctggtgacgcaggatgtcacctctgaagatctggtcacgttatacggaacaacatttaactccagcggactgaaaatgcgcggcaacttacgcagcaagaacgccgagctgattgaaaaggttagaacctcctatgaaattcaaaacaaacaaactcagccttaa

SEQ ID NO: 72607 - DNA, 555 bp, Citrobacter koseri
atgaaattcaaaacaaacaaactcagccttaatcttgtgcttgccagcacacttctggccgccagtcttccggcgttcgcggtcaccggcgataccgaacaaccgattcatattgaatcggaccagcagtcactggatatgcagggtaacgtggtgacgtttaccggaaatgtcgtcgtgactcagggcaccatcaaaatcaatgccgacaaagtggtcgtcacccgtccgggcggcgagcaaggcaaagaggtgatcgacggcttcggcaacccggcgacgttttatcagatgcaggacaacggcaagccggtaaaaggccatgcccaaaaaatgcattatgagctggcgaaagatttcgtcgtcctgaccggtaacgcctacctggagcagctcgacagcaacatcaccggcgataagatcacttacctggtgaaagagcagaaaatgcaggcgttcagcgaaaaaggcaaacgtgtaacgacggttctggtgccgtcgcaattgcaggacaaaaacaaagaccaggccccggcacagaagaagggtaactaa

SEQ ID NO: 72608 - DNA, 726 bp, Citrobacter koseri
atggcaacattaactgcaaagaatcttgcgaaagcctataaaggccgtcgcgtggtggaagatgtcagcctgaccgtgaattccggggagatcgtcggtctgctcgggccgaacggcgcaggtaaaaccactaccttctacatggtggtgggcattgtgccgcgcgacgctggcaacattattattgacgatgaggacatcagcctgctgccgctgcatgcccgcgcgcgtcgcggtattggctatttaccgcaggaagcctccattttccgccgtctgagcgtgtttgataacctgatggcggtgctgcaaattcgtgacgatctcacgaccgaacagcgtgaagaccgcgccaatgaactgatggaagagttccacatcgagcatctgcgcgacagcctcggacaagcgttgtccggcggtgagcgccgccgtgtggagattgcccgcgcgctggccgcaaatccgaaatttatcctgctggatgaaccgtttgcaggcgttgacccgatttccgtcatcgacatcaaacgcattatcgagcacctgcgcgacagcggtctcggcgttctgattaccgaccacaacgttcgtgagacgctggcggtgtgtgaacgcgcgtatattgtcagccaggggcatctgatcgcacacggcacaccgacagaaatcctgcaagacgagcacgttaagcgcgtataccttggggaagacttcagactctga

SEQ ID NO: 72609 - DNA, 1434 bp, Citrobacter koseri
atgaagcaaggtttgcaactcaggctcagccaacaactggcgatgacgccccagctacaacaggccatccgtctgttgcagttgtctacgctggaacttcagcaggaacttcagcaagcgctggagagtaatccgctgcttgagcaaaccgatcttcacgatgaaatcgacacgcgcgaaacccaggacaacgaagccctggataccgcagacgcgctcgaacagaaagagatgcccgaagagctgccgcttgacgccagctgggatgagatttacaccgcaggtacgccgtccggcaccagcggcgactacatcgacgacgagctgccggtgtaccagggcgaaaccacgcagtccctccaggactacctgatgtggcaagtcgggctgactccgttctcggataccgatcgcgcgattgccacctcaattgtcgatgccgttgatgataccggctatctcaccatttcgctggatgacattctcgaaagcatcggcgatgaagagatcggcctcgatgaaatagaagcggtactcaaacgcgttcagcgcttcgatcccatcggcgtggcggcgaaagatctccgtgactgcctgctgatccagctctcacagttcgataaatccacgccctggctggaagacgcccggttgatcatcagcgatcacctcgatctgctggccaatcatgacttccgcaccctgatgcgcgttacgcggctgaaagaagaggtgctgaaagaggcagtcaatcttatccagtcgctcgatcccagaccgggtcagtctatccagaccggcgaacctgaatatgtgatcccggatgtgctggtgcgtaagcacaacggttactggatggtggagctgaacggcgacagcattccccgtctacagatcaatcaacattatgccgccctgtgcaacggcgcgcgtaatgatgccgacagccagttcattcgcagcaaccttcaggatgcgaagtggctgatcaaaagtctggaaagccgcaacgacaccctgttacgcgtgagccgctgtattgttgagcagcagcaggccttcttcgagcaaggcgaagagtttatgaaaccgatggtgctggcggacatcgcccaggccgtcgagatgcacgaatcgacgatttcccgtgtgaccacgcagaagtatctgcacagtccacgcggcatttttgaactgaagtatttcttttccagccatgtgaataccgaaggcggaggcgaagcctcttccacggcgatacgtgcgctggtgaagaaattaattgctgcggagaaccccgcgaagccgctgagcgacagcaagttaacctctatgttgtcggatcagggtatcatggtggcgcgccgcaccgttgcgaagtaccgagagtctttatccattccgccgtccaatcagcgcaaacagctggtttga

SEQ ID NO: 72610 - DNA, 288 bp, Citrobacter koseri
atgcagctcaacatcactggaaataacgtcgaaattactgaagccctgcgcgactttgtctcaaccaaattcgccaaacttgagcagtattttgacaggattaatcaggtctacgttgttttgaaagtggagaaggttacacacatctcggatgcgacactgcatgtaaacggtggcgaaattcacgccagcgcggaaggtcaggatatgtatgccgccattgacggtttgatcgataaactggcaaggcagctaacgaaacacaaagataaactgaaacaacactaa

SEQ ID NO: 72611 - DNA, 492 bp, Citrobacter koseri
atgacaaataacgatacgactctacaactgagcagcgtacttaaccaggaatgtacgcgcagcggcgttcactgccagagcaaaaaacgtgcgctggagattatcagtgaactggcggcaaaacagctcagcctgcctccgcaggtggtatttgaagcaatcctgacgcgtgagaaaatgggcagtaccggcattggcaatggtatcgccatcccgcacggcaagctggaagaagatacgctgcgcgccgtcggcgtgttcgtccaactcgaaacgcctatcgctttcgatgccattgataatcaaccggtcgatctgcttttcgccctgctggtgcccgcagatcagaccaaaacgcatctgcatacactgtcgctggtcgctaaacgtctggcggataaaaccatctgccgccgcctgcgcgccgcgcagagtgacgaagagctgtatcaaattatcactgacaccgaaggtggaaaggatgaggcataa

SEQ ID NO: 72612 - DNA, 855 bp, Citrobacter koseri
atggtactgatgatcgtcagcggtcgttcagggtcagggaaatctgtcgccctgcgtgcgctggaagatatgggtttttactgcgtggacaacctccccgtggtgctgttgcccgatctggctcgtacgctggccgatcgccagatttctgcggccgtcagcattgacgtgcgtaacatgcctgagtcccctgaaattttcgagcaggcgatgaacaacctgcccgatgcgttttcaccacagcttctgttccttgatgccgatcgcaacacgctgattcgccgttacagcgatacgcgccgtctgcatccgctttccagcaaaaatctctccctggagagcgccatcgaccaggaaagcgatctgctggaaccgctgcgttcccgcgccgatctgattgtcgatacctctgaaatgtccgtgcatgaactggcggaaatgctgcgtacccgtctgctgggcaagcgcgaacgcgagctgacaatggtgttcgagtccttcggcttcaagcacggtattccaattgatgccgattatgtttttgacgtgcgcttcctgcctaacccgcactgggacccgaaactgcgtccaatgaccggcctcgataaaccggttgcggcattcctcgacaggcacacagaagtacacaattttatctaccagactcgcagctatcttgagttatggttacccatgctggagacaaacaaccgtagctatctcaccgtagccatcggctgtaccggcgggaaacaccgttcggtgtatattgcagaacagctggcagactacttccgttcacgcggtaagaacgtgcagtcacgccatagaacgctggaaaaacgcaaaacatga

SEQ ID NO: 72613 - DNA, 273 bp, Citrobacter koseri
atgaccgtgaagcagactgtagaagtcacaaacaagctgggtatgcatgcccggcctgcgatgaaactgtttgaattaatgcagggttttgaggccgaagtgctgttacgcaatgatgaaggaaccgaagccgaagccaatagcgtcatcgccctgctgatgctggactctgctaaaggtcgccagatagaaattgaagccaccggcccgcaggaggtcgaagcgctggcggcggtgatcgcgctgttcaattcaggattcgacgaagattag

SEQ ID NO: 72614 - DNA, 672 bp, Citrobacter koseri
atgatacttttatctgaacaaaatcccctgggcaccggacgccatcgtaaatgttatgcgcatccgggcgatgcccaacgctgcattaagatcatttacaatgccgaccgcagcggcaagaaagagatccgccgtgagctgaaatactacgcgcatctgtcacgttacctgcaagactggagcggcatcccgcgctatcacggtacggtagagaccgattgtggtacgggttacgtctacgatgtgataaccgatttcgatggcaaaccgtccgtcacgctgactgaatttgtggcgcagtgccgcaataacgaagatgccgccgtcctgcgccagttgctgaaaacgctcaagcgttatatctacgataaccgcatcgtcaccatgaccctgaagccgcaaaatattctgtgtcaccgcattagcgaatccgaagcgatcccggtgatctgcgacaacatcggcgagagtacgctgatcccgctggcaagctggtcagcctggttttgccatcgcaaacaggaaagacagtgggaacggttgatcgcccaaccgggtctggtggcggcgctgaagatgaaccgccaggaagaagacaaaagcgcgctgccgctcccctctcttgaggccgcgcgtcagcgcaatcttaatacagatggttacgcgtcataa

SEQ ID NO: 72615 - DNA, 729 bp, Citrobacter koseri
atgagtaaagggcgtttcactccgctggcgtccctgcgccgtttgctcctgcgcatccttgtggtgctggcggctttttggggcggcggcatcgcgctgttcagtgtcgttccggtgcctttttccgcagtgatggtggaacggcagattagcgcgtggctgcaaggcgatttcggctatgttgcgcattccgactgggctggcatggatgagatctcgccgtggatggggctggcggtgattgcggcggaagaccagaaattcccggaacactggggctttgatgtttcggccattgagaaggcgctggcgcacaacgagcgcaatgaaaaccgaattcgtggggcgtccacgctttctcagcaaacggcgaagaatctctttttatgggatggccgcagttggctgcgtaaagggctggaggccgggctcaccgtcgggctggaaaccatctggagtaaaaaacgcattctgaccgtctacctgaatattgcggagtttggcgatggcgtgtttggcgtggaagcggcgtcgcagcgctattttaataaacctgccagccggttaagtatgtcagaagccgcgctattggcggcggtgctgccgaaccctttacgctttaaagcgaacgcgccttcaggctacgtgcgtagccgtcaggcgtggattttgcgtcagatgcgccagttgggcggcgaatcgtttatgacgcgtaaccatctgtattaa

SEQ ID NO: 72616 - DNA, 654 bp, Citrobacter koseri
atgaaaaaaattggcgtagtgctcagtggatgtggcgtatacgacggcgccgagattcatgaagccgttctgacccttctggcgattgcccgcagcggcgcgcaggccatctgctttgcgccggataaacagcaggctgatgtgattaatcacctgacgggcgaagcgatggcggagacgcgaaatgttctgatcgaagccgcgcgcattacgcggggggaaattcgtccactcgcccaggcggtctccagcgatctggacgcgctgattgttccgggtggatttggcgcggcgaaaaacctgagtaattttgccagccagggcagcgagtgccgggtagatagcgacctggccgcgctggcaatcgccatgcaccagtcgggtaagccgttagggtttatgtgcattgccccggcaatgctgccccggatttttggtttcccgcttcgtctgacgattggcaccgatatcgatacggcggaagtgctggaagatatgggggccgagcatgtgccatgtccggttgacgatattgtggtggatgaagataacaaaattgtcaccacgcctgcttacatgctggcgcaggatattgcacaggcggcgaccggcattgaaaaactggtgtctcgcgtactggttctggctgaatga

SEQ ID NO: 72617 - DNA, 2337 bp, Citrobacter koseri
atgaagcaaattcgtatgctggcgcaatactatgtcgacctgatgatgaagctgggtctggtgcgcttttcgatgctgttggcattagcgctggtggtgctggcgatagtggtgcagatggcggtcaccatggtgttgcatggtcaggtcgaaagtattgatgtcatccgctccatcttttttggcctgttaatcacgccctgggccgtctatttcttgtcggtggtggtggagcaactggaggagtccaggcagcgcctgtcacggctggtacaaaagttggaagagatgcgcgagcgcgatctcaaactcacggtacaactgaaagacaatattgctcagcttaatcaggaaattgccgatcgcgaaaaagcggaggctgagcgccagtcgaccttcgaacagctaaaagtggaaatcaaggagcgtgaagagacgcagattcagcttgaacagcaatcctctttcttacgctctttcctcgatgcgtcgccggatttggttttttatcgcaatgaagataaagagttttccggctgtaaccgcgcgatggaactgctgaccggcaagagtgaaaaacagctcgtccatttaaaaccggctgacgtctattcccccgaagcggcggaaaaagtgattgagaccgacgaaaaagtcttccgccataatgtctcgttgacctatgaacagtggctcgattacccggacgggcgcaaagcgtgctttgaaattcgcaaggtgccctattacgaccgcgttggtaaacgtcatggcctgatgggctttgggcgcgatattacggaacgtaagcgttatcaggacgcgcttgaacgcgccagccgcgacaagaccacgtttatctctacgatcagccacgagctgcgtacgccgctgaacggcattgtcggcttaagccgcattctgctggataccgaccttaccagcgagcaggaaaaatacctgaaaaccatccatgtctctgcggtcacgttggggaatattttcaacgatatcattgatatggataagatggagcggcgtaaagtccagttggataaccagccggtagatttcaccagtttcatggcggatctggagaatctctccggcctgcaggcgcagcaaaaagggctacgctttgtgctcgatccgacgttgccgctgccgcataaggtgatcaccgacggcacgcgtttgcgccaaattctgtggaacctgatcagcaacgccgtgaagtttacccaacaagggcaggtgacggtgcgcgtacgctatgacgaaggcgatgtgctgcattttgacgtggaagattccggcatcggtattccgcaggatgagcaggataaaatcttcgccatgtattatcaggtgaaagacagtcatggcggtaaacccgcgacggggaccgggattggcctggcggtatcgcgccgtctggcaaaaaatatgggcggcgacatcaccgtttccagccagccgggtaaaggttccgtctttacgttaaccgtacatgcgcccgccgtggcggaagaggtcgaggacacgctggaagagaatgacatgccgctgcctgcactgcatgtgctgctggtcgaggacattgagctgaacgtcattgtggcgcgttcagtgctggaaaaattgggcaacagcgttgacgtggcgatgaccgggaaagccgcgctggaaatgttcaccccgggtgaatacgatctgctgctgctggatattcaactgccggatatgacgggtctggatatctccagagaacttacccgccgctatgcgcgggaagaattaccgccgctggtcgcactcactgctaacgtcctgaaagacaagaaagagtatctggacgcgggaatggacgatgtgttgagcaagccgctgtcggttccggcgttaaccgccatgattaaaaaatactgggatacccgtaacgaagaggagagcactgtgacatctgaagagagcagcaaatcgcaagcgttgttagatatcccgatgttagagcagtatatcgaactggtcggcccgaaattaattacggatggactggcggtgttcgagaaaatgatgccgggttacttaagcattctggagtccaacctgacggcgcgagataccaaaggcgttgttgaagaaggccacaaaattaaaggcgcggcgggctccgtcgggttgcgtcatctacagcaactgggtcagcaaattcagtcgccggatcttcctgcctgggaagataacgtgggtgaatgggttgaagagatgaagcaggagtggcagcacgacgtcgcggtgctgaaagcctgggtggcaaacgcggaaaaaaaatga

SEQ ID NO: 72618 - DNA, 930 bp, Citrobacter koseri
atgcagttacagaaattagtcaatatgtttggtggggatctttctcgtcgttatgggcaaaaagttcataaactgacgttgcacggcggatttagctgtccaaaccgcgatggcaccatcggacgtggcgggtgtactttctgtaatgtcgcctctttcgccgatgaggcgcagcagtatcgctccattgccgaacaactggcgcatcaggcgcatctggtcaatcgcgccaaacgttatctggcctatttccaggcgtacaccagtacctttgccgaagtgcaggtgctgcgttctatgtatcagcaggcggtaagccaggccagcattgtcgggctgtgcgtcggtacgcgccccgactgtgtgccggatgcggtgctcgatctgctctgcgaatataaagaccagggctatgaagtgtggctggaactgggattgcaaaccgcgcatgacaaaacgctgcgccgtattaatcgcggccatgattttgcctgttatcagcgaaccacccaactggcgcgcgagcgcgggctgaaagtgtgctcgcatctgattgtgggtttacccggcgaagggcagacggaatgcctgcaaacgctggagcgcgtggtggaaacgggcgtggatggcattaagctgcacccgctgcatattgtaaaaggcagcattatggcgaaagcctgggaggcggggcgcctgaacggcattgcgctggaggcgtatacgctgacggcgggggagatgatccgccatacgccgccggaggttatttatcatcgcatttccgccagcgcccgtcgtccgacgttgctcgcccccctatggtgtgagaatcgctggacgggcatggtggagctggaccgctatcttaacgaacatggcgcgcaaggctccgcgcttggcactccgtggattcagccggggagctaa

SEQ ID NO: 72619 - DNA, 4554 bp, Citrobacter koseri
atgatacgcaacccccgtcgccacgctctttctgtgcccgtgcgcaatcggtatcggatgggagtcccgcagagcctggggaggttcactgatatgttgtacgataaatcccttgagagggataactgtggtttcggcctgatcgcccacatagaaggcgaacctagccacaaggtagtgcgtaccgccatacacgcactggcccgtatgcagcaccgtggcgcgatcctcgctgacggtaaaaccggcgacggttgcggtttgctgctgcaaaaacccgatcgcttttttcgcatcgttgcagaagagcgcggctggcgtttagccaaaaactacgctgtcggcatgctcttcctgaataaggaccctgagctggcggcggcatcacgtcgtatcgtcgaagaagaattacagcgggaaaccctgtcgattgtgggctggcgcgatgtgccgaccaacgaaggtgtcctcggtgaaatcgccctctcctccctgccacgtattgagcaaatttttgttaacgcgcctgcgggctggcgtccccgggatatggaacgccgcctgtttatcgcccgccgccgcattgagaaacgccttcaggacgataaagacttctacgtttgtagcctgtcgaacctggtgaacatctataaaggtctgtgtatgccggcggatctgccgcgcttctacctggatctggcggatttgcgtctggaatcggccatttgcctgttccaccagcgcttctccaccaataccgtgccgcgctggccgctggcgcagccgttccgctacctggcgcacaacggcgaaatcaacaccattaccggcaaccgtcagtgggcgcgcgcccgtacttataaattccagacgccgctgatcccggatttacaatccgccgcgccgttcgtcaacgagaccggttccgactccagctcgctggataacatgctggaactgctgctggcaggcgggatggacatcgtgcgcgccatgcgcctgctggtgccgcccgcatggcagaacaacccggatatggacccggacctgcgcgccttctttgactttaactccatgcacatggagccgtgggatggcccggcgggcatcgtgatgtccgacggtcgcttcgctgcctgtaacctcgaccgtaacggtctgcgtccggcgcgctacgtcatcaccaaagataaactgatcacctgcgcctctgaggtgggaatctgggactaccagcctgacgaagtcgtggaaaagggccgcgtcggccccggtgaactgatggtgatcgacacccgtggcgggcgcatcctgcactctgcggaaaccgatgacgatctgaaaagccgccatccgtataaagagtggatggagaagaacgtccgccgcctggtgccgtttgaagatctggccgacgatcaggtcggaaaccgcgagctggacgacgacatgctcgccagctatcagaaacagtttaactacagcgccgaagagctggattccgtcatccgcgtactgggcgaaaacggccaggaagcggtcggttcaatgggtgatgacacccccttcgccgtgctttccagccagccgcgcattatttacgactacttccgccagcagtttgcgcaggtgaccaacccgccaatcgacccgctgcgtgaagcgcacgtcatgtcactggccaccagcattggccgcgagatgaacgtcttttgcgaagcggaaggacaggcgcaccgtctgagctttaaatcgccaattctgctgtactccgatttcaaacagctcaccaccatgaaagaggagcactaccgcgccgatacgctggatatcaccttcgatgtgacggaaacctcgctcgaagaaacggtgaaagcgctgtgcgataaggctgaacagatggtgcgtaacggcaccgtcttgctggtgctctctgaccgtaacatcgccaaaaaccgtttaccggttccggcgccgatggctgtcggggcggtacagactcgtctggtggataagagcctgcgctgcgatgccaacatcatcgtagaaaccgcaagcgcgcgtgacccgcaccactttgccgtgctgctgggctttggcgccacggcgatctatccgtatctcgcctatgagacgctgggccatctgatcgacacccaggccatcgccaaagactaccgtaccgtgatgctgaactaccgtaacggcatcaataaaggtctgtacaagatcatgtccaaaatgggcatttcgaccatcgcctcataccgctgctccaaactgtttgaagcggtcggtctgcatgacgacgtggtgagccactgcttccagggtgtagtcagccgcattggcggcgccggttttgccgacttccagcaggatctgctgaacctctcgaaacgtgcctggctggcgcgtaaaccgctggatcagggcggcctgctgaaatacgtgcacggcggcgaataccacgcctataacccggatgtggtgcgcaccctgcaacaggcggtgcagagcggcgagtaccgcgattaccaggcgtatgccgcgcttgttaacgaacgtccggcggcaacgctgcgcgatctgctggcgctcaatcctggcgataacgccatcagcatcaacgatgttgaaccggcaaacgagctgtttaaacgcttcgataccgccgcgatgtccatcggcgcgctgagcccggaagcgcacgaagcgctggcggaagcgatgaacagcatcggcggtaactccaactccggcgaaggcggcgaagacccggcgcgctacggcaccaacaaagtgtcgcgcatcaaacaggtcgcttccggccgcttcggcgtaacgccagcgtatctggtcaatgctgacgtcattcagattaaagtcgctcagggcgcgaagccgggcgaaggcggccagttgccgggcgataaagtgaccccgtacatcgccaaactgcgctattccgtaccgggcgtgacgctgatttctccgccgccgcaccacgatatctactctatcgaggatctggcgcagctgattttcgacctgaaacaggtcaacccgaaagcgatgatctccgtgaagctggtttctgaaccgggcgtcggcaccatcgctaccggcgtggcgaaagcctatgcggatctgatcactatcgccggatatgacggcggcaccggcgccagcccgctctcctccgtgaaatatgcgggctgcccgtgggagctgggcctggtggaaacccagcaggcgctggtggctaacggtctgcgtcacaagatccgtttgcaggtggacggcggcctgaaaaccggcctcgacatcatcaaagcggcgattctcggcgcggaaagctttggcttcggcaccggcccgatggtggcgctgggctgtaaatacctgcgtatttgccacctgaacaactgcgcgacaggcgtggcgactcaggatgacaaactgcgtaagaaccactaccacggcctgccgttcaaagtgaccaactactttgagtttatcgcccgcgaaacccgcgagctgatggcgcagcttggcgtgaagcgtctggtggatctgattggccgtaccgacctgctgaaagagctggaagggtttaccgctaagcagcagaagctggaactgtcccgactgctggaaaccgctgagcctcatccgggtaaagcgcggtactgcaccgagcataacccgccgtttgataacggcgtgctgaacgcgcaactgctgcaacaggcgaagccgtttgtcgatgagcgccagagcaaaaccttctggttcgacattcgcaacaccgaccgctccgtgggcgcgtcgctctctggctatatcgctcagacgcatggcgatcaggggctggcctctgacccgatcaaggcgcacttcagcggcaccgcaggtcagagcttcggcgtctggaacgcgggcggtgtggagctgtatttgacgggcgatgccaacgactacgtcggtaaaggcatggcgggcggtctgctggcggtgcgtcctccggtgggttcagcgtttcgcagtcatgaggccagcatcatcggcaatacctgtctgtacggcgcgaccggcggtcgtctgtatgcggcgggccgcgcgggcgaacgtttcgcagtacgtaactccggggccatcaccgtggtagaaggcattggcgacaacggctgtgaatacatgacgggcggtattgtctgtgtactgggcaaaacgggcgttaacttcggtgctggcatgacgggcggcttcgcctacgtgctggatgaagacggcgagttccgcaaacgcgtgaacccggagctggtggaagtgctgaacgtcgatgacctggccatccacgaagaacatctgcgcggtctgattaccgagcatgtgcagcataccggttcccagcgcggtgaagagatcctggctaactggtcagtattctcaaccaaattcgcgctggttaagccgaagtccagtgatgtgaaagcactgttgggtcaccgtagtcgtagcgcagctgagctgcgtgtgcaggcgcagtaa

SEQ ID NO: 72620 - DNA, 1419 bp, Citrobacter koseri
atgagtcagaacgtataccaatttatcgacctgcaacgtgttgatccaccgaagaaggcgctgaagatccgcaaaatcgagtttgttgaaatttacgaaccgttttccgaaggccaggccaaagcgcaggcggatcgctgcctctcctgcggcaacccgtactgcgagtggaagtgtccggtacataactacatcccgaactggctgaagctggcgaacgaaggacgtattttcgaagcggcggagttgtctcaccagaccaacacgctgccggaagtgtgcggccgcgtctgcccgcaggatcgtttgtgcgagggctcctgtacgctcaacgacgagttcggcgcagtgactatcggcaacatcgagcgttatatcaacgataaagcgttcgaaatgggctggcgcccggacatgactggcgtgcgtcagaccgacaaacgcgtggcgattatcggcgcgggcccggcagggctggcctgtgccgacgtactcacccgtaacggcgtgaaggcggtggtctttgaccgtcacccggaaatcggcggtttgctgacgttcggtatcccggctttcaagctggaaaaagaggtgatgacccgccgtcgtgagatcttcaccggcatgggcattgagttcaaactgaataccgaagtgggtcgcgacgtgcagctggacgacttgctggcagagtacgatgcggtgttcctcggcgttggcacctatcaatcaatgcgcggcgggctggaaaacgaagatgccgacggcgtgttcgatgccctgccgttcctgattgccaacaccaaacagatcatgggctttggcgaaaccactgacgaaccgttcgtcagtatggaaggcaaacgcgtcgtggtactgggcggcggcgacaccgcgatggactgcgtgcgtacctcggttcgccagggcgcgacgcacgtcacctgcgcctatcgtcgtgacgaagagaacatgcctggctccagacgcgaagtaaaaaacgcgcgcgaagaaggggtcgaattccagttcaacgtgcagccgctgggtgtagaagtgaatgccaacggtaaagtaagcggcgtgaagatggtgcgtaccgaaatgggcgcgccggacgcgaaaggtcgtcgtcgtgcggaaatcgtcgccggttccgagcatgtgatcccggctgatgcggtggtaatggcgtttggtttccgcccgcacaacatggcgtggctggcgaaacacagcgtggagctggactcccaggggcggattatcgcgccggaaggcaatgaaaacgccttccagaccagcaacccgaaaatcttcgctggtggcgacatcgtgcgcggctcggatctggtggtcacggcaattgccgaaggccgtaaagcggcagacggtatcctgaattacctggaagtgtaa

SEQ ID NO: 72621 - DNA, 1086 bp, Citrobacter koseri
atgactgtaccaacaccacttcaacacgctgacgattatcagcaaatccatgacggtattattcgattagtggacaatgcccataccgaggccgtccgcagtattaatgctttgatgacggcaacctactgggaaatcggcaggagaattgtcgagtttgaacaaggcggcgaagcacgagcggcttatggtattcaactcattgagcggttatccgcagatttaagccagcgctataagcgtgggttctccaccgcaaacctacgacaaatgcgcatgttttatctttattttcaagatattgaaattcagcagacactgtctggtgaatcttcaaatctcatttacctcgctaaagtttttccgcttccctggtcagcttacgtgcgtttactatcggtaaaaaatcccgatgcccgcactttttacgagaaagagacgctacgtaacggctggtctgtgcggcaactcgatcggcaaatctccacccagttctacgaacggacgctactgtcccatgacaaatccgccatgttgcagcagcctgcgcccgccgagccaacagtcttgccggagcgagccatacgcgacccgttcattctggaatttcttaacctgagggacgagtattccgagtcggatctcgaagaagcgctgctcagtcacctgatggactttatgctggagcttggtgacgattttgcttttgtcggccgccagcgccgattacgcatagacgatagctggttccgcgtcgatctgttgttcttccatcgccgcttgcgttgcctgttactcgttgacctgaaggtcggcaaattcagttatgcggatgccgggcagatgaatatgtacctgaactatgccaaagagcactggacaatgccgggagaaaacccgcccgtcgggttggttttgtgcgcaggaaaaggcgcgggggaagcgcattacgcgctaaacggcctgccgaataccatcatggcgagcgagtacaaagtgcagttgcctgacgaaaaactactggcagatgagctcattcgttcacaaatagcactgactgcacagcaagttgaatcaactgaataa

SEQ ID NO: 72622 - DNA, 468 bp, Citrobacter koseri
atgttgatgggagaaattcagtcgttaccgtctgccgggctgcatccggtattgctggatgcgttaaccctggcgctggcggcaaggccgcaggagaaaacgcccgggcgctacgaattgcagggcggcgatgtgtttatgaatgtgatgcagtttgccacgcagtcgccgcaggagaaaaaagcggagctgcatgtgcagtacgtcgacattcagctgttattgacgggtgaggagcgcattctgttcggcgtagtcgggtcagcgcgcgaatgcgaggagctgcatggtgaagaggattaccagctttgccgccgtatccatgaacagcagtccattacgctgacaccggggatgttctccgtgtttatgccgggggaaccccataagcccgggtgtatggctggcgagccaggggagattaagaaagctgtagtgaaggtgcgcgccagcttattagaggcatga

SEQ ID NO: 72623 - DNA, 873 bp, Citrobacter koseri
atgagcacgctggcgatcgatattggcggcaccaagctggctgccgcgcgggtggatgatgatttacgcatccgcgaacgacgtgaattgccgacccccgccagcaaaacgccggatgcgctgcgagaggcgctaaaagtgctgattgaaccgctgcaaacgaccgcgcagcgggtggcgatagcctctaccggcattatcagagaaggcgcgctactggcgataaatccgcataacctgggtggtctgctgcattttccgttggtgcagacgttagaagatcttaccggtctgccgacgctggcggtgaatgatgcgcaggcggcggcatgggcggaataccatgcccttgcgtctgatgtccgcgatatggtgtttattaccgtgtcgaccggcgttggcggcggcgtggtgagcgacggcagattgctcaccgggatgagcggtctggccgggcatctggggcatacgctggccgatccgcaggggccggtttgcgggtgcggacgacgcggctgtgtggaggctatcgcctcaggacgcggcatcgcggcagcggcgcagggttccctggccgggtgcgacgccagaattgtctttgcacatgcggcggccgggaacgaacaggccgtgagtctggttcagcactccgcgcaggttgtcgcgcggttaattgccgatgttaaagcgacaacggattgccagcaggtggttattggcggcagcgtagggttagctgagggatatctggcgcaggtacgccactttctggcgcaggagccggcggtttatcaggtggcgttgagcgcagcgcattaccgacatgacgcggggctactgggtgccgcgttgttagctcagggagataaatga

SEQ ID NO: 72624 - DNA, 690 bp, Citrobacter koseri
atgtcgttacttgaacaactggataaaaacattgccgccaatggcgggttgattgtctcctgccagccggttcctggcagcccgctcgataaaccggacatcgtggctgcgatggcgctggcggcggagcaggctggcgccgtcgcgctacgcattgaaggcgtggacaatttgcgggcgacccgtgcgctggtctccgtaccgattatcggtattctcaagcgtgaccttgacgactccccggtacgcatcacgccattccttgaggatgtggatgcgctggcacaggccggggcggatattattgcggttgacggtactgaccgtgtacgtccggcgaccgtcgatgcgctgctggcgcgtattcatcagcaccagttgctggcgatgaccgactgctcgtcactggaggatggcttagcctgtcagcggcgtggcgcggaaattatcggcaccacgctgtcgggatacaccacgccggacacgccggacgaacctgacctcgcgctggtcaacgtcctgcatgatgccggatgccgggtgattgccgaggggcgttacaacacgccggcacaggccgctgaagccatgcgtcacggcgcgtgggcggtgacggtgggatctgccattacgcggctggaacatatttgtcagtggtacaacacggcattgaaaaaggcgacgtcatga

SEQ ID NO: 72625 - DNA, 1491 bp, Citrobacter koseri
atgagtacttctacccagaatatcccgtggtatcgccatctcaaccgggcgcagtggcgggcattttccgccgcctggctgggatatttgcttgatggttttgattttgtgttgattgcccttgttctgacggaagtgcagggcgagtttgggttaacgacggttcaggcggccagcctgatctcggcggcgtttatttcccgctggtttggcgggctgatgttgggcgcaatgggtgaccgctatggccgacgtctggcgatggtcaccagtatcattcttttctctatggggacgctggcctgcggttttgcgcccggctataccaccatgtttatcgcccgtctggtgatcggtatgggaatggcgggcgaatatggctccagcgccacctatgtcattgaaagctggccgaagcacttacgtaataaagccagtggattcctgatttccggtttctccgtcggggcggtcgtggcggcgcaggtttacagcctggtggttccggtctggggctggcgcgcgctgttcttcattggcattctgccgatcattttcgcgctctggctgcgtaaaaacatccctgaagcggaagactggaaagagaagcacgaaggcaaagcgccggtgcgcacgatggtggacatcctctaccggggtgaacatcgcgtcgtcaatgtgctgatgacgatcgtcgccgcaaccgcactgtggttctgctttgcgggcgacctgcaaaacgcggcgattgtggcggtgttagggttactgtgcgccgttatcttcatcagttttatggtgcaaagcagcggcaagcgctggccaacgggcgtgatgctgatgatcgtggtgctctttgctttcctctattcatggccgattcaggcgctgctgccaacgtatctgaaaactgaactggcttacgatccgcacaccgttgcgcaggtgcttttctttagcggctttggggcggcagtcggctgctgcgtgggcggtttcctcggcgactggctgggtacgcgtaaagcctacgtttgcagtttgctggcttcccaggtgctgatcattccggtatttgcgattggcggcgcaaacgtctgggtactgggtctgctactgtttttccagcagatgctggggcaggggatctccgggatcttaccgaaactcattggcggttattttgataccgaccagcgagcggcaggtctgggctttacctataacgttggcgcactgggcggcgcgctggcccctattataggggcgctgatcgcacagcgcctggatctgggcaccgcgctgggatcgctctccttcagcctgacctttgtggtgatcctgttgattgggctggatatgccgtctcgcgtacagcgctggctgcgtcctgaagcattgcgtatgcatgatgctatcgacggaaaaccgttcagcggggccgtgccgtttggcggcgacaaaagcgcctttgtaaaaaccaaaagctga

SEQ ID NO: 72626 - DNA, 894 bp, Citrobacter koseri
atggcaaaagatttacgaggcgtaatgccagcgttgttaactccttttgataaccagcagaaactggatattgagagtctgcgccgtctggtgcgtttcaacattgcgcagggcattgatgggctgtacgtcggcggctcgaccggggaagcgttcgttcagagccgcgcagaaagagagcaggtcctggaaattgtggcggaagaggcgaagggcaaagtgacgctgattgcccatgtcggtacggtcagtaccgaagagagccagcagctggccagcgcggcgcatcgttacggttttgatgccgtttccgccgtgacgccgttttattatccgtttagctttgaagagcattgcgatcactaccgcgccattatcgattctgctgaaggattaccgatggtggtgtacaacattcctgcgctgagcggcgtgaagctgacgctggatcaaatcaacacgctggtcacgctgcccggcgttggcgcgctgaaacaaacctccggcgatctctatcagatggagcagatccgccgtgcgcatcctgatctggtgctctacaacggttatgacgaaatcttcgcttccggtctgctggcaggcgcagatgggggaatcggcagcacttacaacattatgggctggcgttatcaggggattgttaaggccttgcaggaaggcgatgtagtgaaagcgcagcatctgcaaaccgagtgcaataaggtcatcgatctgctcattaaaaccggcgtgttccgtgggctgaaaacggtgctgcactacatggacgtggtctccgtaccgctgtgccgtaagccgtttgcgccggttgatgagaagtatctgcctgaactgaaagcgctggcgcagcagttaatgcaggaacgcggttga

SEQ ID NO: 72627 - DNA, 816 bp, Citrobacter koseri
ttgctgttttcctcgacgatttacataatggacgctatgaacgcatttgattcgcaagcagaaaattctccgccaaccatcggccgtagtttgcgcagccgtccgctggcgcgtaaaaaactgtcggaaatggtagaagaagagctggagcagatgattcgtcgcggtgaattcggcgaaggggagcaactgccgtctgagcgggagttgatgaccttcttcaacgtgggccgcccgtcggtgcgtgaagcgcttgccgcgctcaagcgtaaaggtctggtgcaaatcaataacggcgaacgcgcccgcgtgtcgcggccttctgctgataccatcatcagcgaactttccggcatggcgaaagatttcctctcgcatcccggcggtatcgcccactttgagcaactgcgcctgttctttgaatcaagccttgtgcgctatgcggcggaacacgcgacggatgagcaaattgatctgctggcgaaagccctggagatcaacagccagtcgctggacgataacgcgctcttcattcgttccgacgtcgagtttcaccgcgtgctggcggaaatccccggcaatccgatcttcatggcgattcatgtcgcgctgctggactggctgatcgctgcgcgtcctgcggtttccgggcaggagttacatgagcataatagcgtgagctatcaagagcatatcgctattgtcgatgctattcgtcggcgcgatccagatgaagctgaccgcgcgctgcaaacccacctcaatagcgtatctgccacctggcacgcctttgatcaaaagaaaaaattgcgttag

SEQ ID NO: 72628 - DNA, 501 bp, Citrobacter koseri
atggatttgtcacagctatccccacgccgtccatatttgctgcgtgcattctatgaatggttgctggataaccagctcacgccgcacctggtggtggatgtgacgctgcctggcgtgcatgtccctatggaatatgcgcgcgacgggcaaattgttctgaacattgctccccgtgcggttggcaatctggagttggccaacgacgaagtgcgtttcaacgcgcgctttggcggcgtcccgcgtcaggtctccgtgccgctggctgcggtactggcgatctatgcgcgtgaaaacggcgcaggcacaatgtttgaacctgaagccgcttacgatgaagacgtcgccagcttaaatgatgacgatgtaacgccgggcgcggagagcgaaacggtcatgtccgtgattgatggtgataagcccgatcatgacgatgacaacaatcctgatgacgatccgccgccgccgcgtggtggtcgacccgcattacgcgtagtgaagtaa

SEQ ID NO: 72629 - DNA, 639 bp, Citrobacter koseri
atggctgtcgctgccaacaaacgttcggtaatgacgctgttttctggtcctactgacatctatagccatcaggtccgcattgtgctggcggagaaaggtgttagtttcgagatcgagcatgtggagaaggataacccacctcaggatctgattgacctcaacccgagtcagagcgtaccgaccctggtggatcgtgagctgaccctgtgggaatctcgcatcattatggaatacctggatgagcgtttccctcatccgccgctgatgccggtttacccggttgcgcgtggcgaaagccgcctgtacatgcaccgtatcgaaaaagactggtacacgctgatgaacgtcatcgtgaacgggtccgcttctgaagctgacgttgcgcgtaaacaactgcgtgaagagttgcaggcgattgcgcctgtgtttggtcaaaaaccgtatttcctgagcgatgagttcagcctggttgattgctatctggcgccgctgctgtggcgtttgccgcaactgggtattgagttcagcggtgcgggcgctaaagagctgaaaggctatatgacccgcgtctttgaacgtgactcgttcctcgcttctttaactgaagctgaacgtgaaatgcgcctcggtcggggttaa

SEQ ID NO: 72630 - DNA, 393 bp, Citrobacter koseri
atggctgaaaatcaatactacggcactggtcgccgcaaaagttccgcagctcgcgtgttcatcaaaccgggcaacggcaaaatcgttatcaaccaacgttctctggaacagtacttcggtcgtgaaactgcccgcatggtagttcgtcagccgctggaactggtcgacatggttgagaaactggatctgtacatcactgttaaaggtggtggtatctctggtcaggctggtgcgatccgtcacggtatcacccgcgctctgatggagtacgacgagtctctgcgttctgaactgcgtaaagctggcttcgttactcgtgacgctcgtcaggttgaacgtaagaaagtcggtctgcgtaaagcacgtcgtcgtccgcagttctccaaacgttaa

SEQ ID NO: 72631 - DNA, 429 bp, Citrobacter koseri
atgaaaacttttacagctaaaccagaaaccgtaaaacgcgactggtacgttgttgacgcgaccggtaaaactctgggccgtctggctactgaactggctcttcgcctgcgcggtaagcacaaagcggaatacactccgcacgtcgataccggtgattacatcatcgttctgaacgctgacaaagttgctgtaaccggcaacaagcgtactgacaaagtgtactatcaccacaccggtcacatcggtggtatcaaacaagcgacctttgaagagatgattgctcgccgtcctgagcgtgtgattgaaatcgcggttaaaggcatgctgccaaaaggcccgctgggtcgtgctatgttccgtaaactgaaagtttacgctggcaacgagcacaaccacgcggcacagcaaccgcaagttcttgacatctaa

SEQ ID NO: 72632 - DNA, 1125 bp, Citrobacter koseri
atgcaaagcatttcccccacatcgcgttaccttcaggccctcaacgatggcagccatcaacccgacgacgtgcaaaaagatgcggtcaaccgactggagtcgatttaccaggcgctgatcgccaaaacgcctccggcgccgcaaaccggcggactgatggcccgtttcggtaaactgcttggcaaacgtgaaccgtcagcgaatgcgccggtgcgtggtctgtatatgtggggtggggtcgggcgagggaaaacctggctgatggatctcttctatcatagtctgccgggcgagcggaaacagcgtctgcatttccaccgctttatgctgcgtgtgcatgaggagctaacggcgctacaggggcagaccgacccgctggagattattgccgatcgtttcaaagccgaaacggatgtgctctgctttgatgagttttttgtttccgacatcaccgacgcgatgctgcttggcggcttaatgaaagcgctgtttgcccgcggcattaccctggtggcgacctcgaacatcccgccggatgagctgtaccgcaatggcctgcaacgtacccgcttccttccggctatcgacgctatcaaagcgcattgcgacatcatgaatgtggatgccggggtggattatcgtctgcgcacgctgacgcaggcgcatctgtggctttcgccgcgtaataacgaaacgcagcaacagatggataaactctggctggcgctggccggtgcgaaacgtgagaatgcgccaacgctggaggtgaatcatcgtccgttaccgacgatgggggtggaaaaccagacgctggcggtttccttcatcaccttatgcgtggacgctcgcagccagcatgactatattgcgctgtcgcgcctgttccacacggttctactgtttgatgtgccggtcatgacgccgctgatggaaagcgaagcgcgccgttttatcgcgctggtggatgaattctacgagcgccatgtgaagctggtggtgagcgccgacgcgcctttatatgagatctatcagggcgaacgcctgaagtttgagttccagcgctgtttgtcgcgtttgcaggagatgcagagcgaggagtatctgaaacgttcgcatatgccgtag

SEQ ID NO: 72633 - DNA, 399 bp, Citrobacter koseri
atgacctgggaatatgcgctaattgggttagtcgtcggtatcatcattggtgccgtagccatgcgttttggtaatcgtaaattacgccaacagcaggcattgcagtacgaactggaaaagaataaagctgagctggaagagtatcgtgaagagctggtcagccactttgcccgcagcgccgagctgctggataccatggcgcatgattatcgtcagctgtatcagcacatggcgaaaagctccagtagcctgctgccggaactgtctgcggaatcgaacccgttccgtaaccgtctggcggagtctgaagccagtaacgatcaggcgccggtccagatgccgcgtgactattccgaaggcgcttccggcctgctgcgtagtggcgcaaaacgcgactaa

SEQ ID NO: 72634 - DNA, 1368 bp, Citrobacter koseri
atgaaaaaacaaaccccgttgttaagtgcattagcgttaagtgtcgggttaacgctctcggcaccgtttcaggccgtcgcatcgatacccgcgcagattcccggtcaggcggcgctccccagtctcgcgccaatgctggaaaaagtgctgccggccgtgattagcgtgaaggttgagggaaccgcgacccaaagccagaaggttccagaagagtttaaaaagttttttggcgacgagttgcctgatcaaccctctcagccgttcgaagggctggggtcgggcgtcatcattgacgccgccaaaggctacgttctgaccaataaccatgtcattaatcaggcacagaagatcagcgttcagttaaatgacggacgcgagtttgacgctaaactgatcggcagcgacgaccagagcgacatcgcgctgctgcaaatccagaacgccagcaacctgacgcaaatcgccatcgccgactccgacaaactgcgcgtcggcgactttgccgtcgcggtaggcaacccgtttggtctggggcaaaccgccacctccggcattgtctccgcgcttggccggagcgggctgaatctggaaggactggaaaactttattcaaaccgacgcctcgattaaccgcggcaactccggcggcgcgctgctgaatctcaacggcgagctgatcggcatcaacaccgctattctggcacctggcggcggtagcatcggcattgggtttgcgattccgagtaatatggcgcgcacgctggcgcaacagctgattcagtttggtgaaattaaacgcggcctgctgggaattaaaggcatggaattgaccgccgatatcgccaaagccttcaagctggatgtacagcgcggggcgttcatcagcgaagtgctcccgggttcaggttccgcgaaagcgggtgtgaaatccggcgacgtgatcaccagtctcaacggcaagccgctgagcagctttgccgaactgcgctcacgcatcgcaacgacggaacccggcacgaaagtgaagctcggtctgttacgcgacggcaaaccgctggaagtcgaagtcaccctcgacaccagcacgtcatcctccgccagcgcggagatgatcgccccggcattgcagggcgcaacgctgagcgatggtcagttaaaagacggcaataaaggcatcaaaattgataacgttgaaaaaagcagtcccgccgcccaggccggtttgcacaaagatgacgtgatcatcagcgttaaccgcgatcgcgtgcactcgattgcggaaatgcgcaaagtgctggaagcgaaaccgtcgattattgcgctacaggtcgtacgcggtaacgagaacatttacctgctcctgcgttaa

SEQ ID NO: 72635 - DNA, 1068 bp, Citrobacter koseri
atgtttgtgaagatcttacgttcggtcgcaattggtcttattgtgggtgccattctgttggcggccatgccctcgctgcgcaaaataaataccctgaccacaccgcaattcgacagcgcggatgagacgccagccagctataattcggcggttcgccgcgccgcgcctgccgtcgtcaacgtttataaccgcagtatgaacagcaccacgcataatcagcttgagatccgtacgctgggatcgggcgtgatcatggatcagcgcggttacatcatcaccaataagcatgtgatcaacgatgcggatcagatcatcgtcgccctacaggatggacgcgtgtttgaagcgctgctggttggttcggatacgctgacggatctggcggtgttaaagattaatgccacgggcggtctgccgacaatcccgatcaacacgaaacgctcaccgcatattggtgatgtggttctggccatcggcaacccgtataacctggggcagaccattactcaggggatcatcagcgccaccgggcgtatcggtctgaacccaaccggacgacaaaacttcctgcaaacggacgcctccatcaaccacggtaactccggcggagcgctggttaactcgctgggcgaactgatgggcattaacaccctgtcatttgataagagtaacgatggcgagacgccggaagggatcggttttgcaatcccgttccagttagcgaccaagattatggataagctgatccgcgatggtcgcgtgattcgcggttatatcggcatcggtgggcgagaaatcgcgccgctgcatgcgcagggcgccgggatggatcaaatccaggggattgtggtcaatgaagtgtcgccggacggcccggctgcgcaggcgggtattcaggtcaatgatgtgatcatttcagtcaacaacaaacctgctgtttccgctctggagaccatggatcaggttgctgaaatacgtccaggttcggtgatcccggtgattgtgatgcgtgacgataaaaagctgacgctccaggtcaccattcaggaatacccggcgacaaattaa

SEQ ID NO: 72636 - DNA, 939 bp, Citrobacter koseri
atgaaagtcgcagtcctcggcgctgccggcggtatcggccaggcgcttgcactactgttaaaaacccaactgccttcaggttcagaactctccctgtacgacatcgctccagtgaccccaggtgtggccgttgacttgagccatatccctacagcagtaaaaatcaaaggtttctccggcgaagacgcgaccccggcgcttgaaggcgcagacgtcgtactgatctcggctggcgtggcgcgtaaaccgggtatggatcgttccgacctgtttaacgtcaacgcaggtatcgtgaagaacctggtacaacagatcgcaacgacctgtccgaaagcctgtgtgggcatcatcaccaacccggtgaacactaccgtcgctatcgctgctgaagtgctgaaaaaagcaggcgtttacgacaagaacaaactgtttggcgtgaccacgctggacatcatccgctccaacacctttgtcgcggaactgaaaggcaaactgccgaccgacgttgaagttccggttatcggcggtcactctggcgtgaccattctgccgctgctgtcgcagatcccgggcgtcagcttcaccgagcaggaagtggctgacctgaccaaacgtatccagaatgcgggtacggaagtggttgaagcgaaggctggcggcggatcggcaactctgtctatgggtcaggctgctgcgcgctttggtctttctctggtgcgcgcgctgcaaggcgagaaggacgtggtggaatgtgcctacgttgaaggcgacggccagtatgcgcgcttcttctctcagccgctgctgctgggtaaaaacggcgtggaagagcgcaagtctatcggcaaattgagcgcgtttgaacagaatgcgctggaaggtatgctggatacgctgaaaaaagatatcgccctgggcgaagagttcgttaacaagtaa

SEQ ID NO: 72637 - DNA, 471 bp, Citrobacter koseri
atgcgaagctcggctaaacaagaagaattagtcaaggcgttcaaagcgctactcaaagaagaaaaattcagttcacagggcgaaatcgtcctcgcgttacaggatcagggctttgataacatcaaccagtccaaggtctcgcgcatgctgaccaagttcggcgcggtgcgtacccgcaacgcaaaaatggagatggtctactgtctcccggctgagctaggcgtgccaaccacctccagccctttaaagaatctggtgttagatatcgactacaacgatgctgttgtggtgatccataccagtcctggcgccgcacagctgatcgcgcgtctgctggactcgctggggaaagcggaaggcatcctcggaaccattgccggtgacgacaccattttcaccacccccgcgaatggctttacggtgaaagatctgtacgaagccattctggaactgttcgaacaagagctgtaa

SEQ ID NO: 72638 - DNA, 264 bp, Citrobacter koseri
atgaaaatcaaaactactgttgcagcattaagcgttctgtccgttctctcttttggcgcattcgcagccgaatccatcaacgcagaacaagcgcaaggccgtcaggctatcggctctgtttccgtaagcgctatcggttcttccccgatggatatgcatgaaatgctgaacaaaaaagcagaagcgaacggcgcatccgcctatcagattactgaagcacgtagcggcgacaactggcacgctacggcagaactttacaaataa

SEQ ID NO: 72639 - DNA, 276 bp, Citrobacter koseri
atgaacatctatacctttgattttgatgaaatagaagaccagaacgatttttaccgcgagtttacgcggatgtttggcctggccagagagaaagtcggcgatcttgattctctatgggatgctctcatgagcgaggtgctgccattgccgctggagattgagtttgttcatctgccggaaaaactgcgcaggcgctacggcgcgctgattttgctgtttgatgaagcagaagaggaactggaaggacagctgcggtttaatgttcgccattcgtga

SEQ ID NO: 72640 - DNA, 1449 bp, Citrobacter koseri
atgcaaacgctccaggacaacgaactttttcagacgggatatctggttgatggactttggaaaacgctggataacacctttgatgttcttaatccggcaaccggtgaaacgatagccgccgttgccaaagccggtaaaaaagagaccgaagaggcgattgcggcggcggcaaaagccttccctgcctggcgggccaaaacggcaaaagagcgctcggccattctgtatcgctggtatgaactgatcattgagcataaatcctggctgggccgtctgatgaccactgagcaggggaagccgttgaaagaggcggaaggcgaagtggagtacgccgccagtttcatccagtggtttgctgaacaggcgaagcgggcgaatggtgaaataatcccgccgatcaaacccggatcgcggatctttgccacccgtgaaccgattggcgtcgtggcggcgattacgccgtggaacttcccgatggcaatgttgacccgtaaattaggcccggcgctggcggcaggctgtacgggggtcattaaaccggcgaataacacgccgcttagcgcattcgccttgctgacgctggcgaagaaagctggcgtacctgacggcgtgctgaacgccgtcgcgggcaataccccggagatcagcgacgccattatggccagccacgaggtacgcaaaatctcctttaccggatcgaccgccgtggggaaaacgctggtgcgtaacgcggctgacacgatgaagaaagtctcgatggaactggggggcaatgcgccgtatatcgtgtttgacgatgcggatattgacgctgcggtacagggggcgatcgccaataaattccgcaacgcggggcaggtgtgcgtcagcgttaaccgtttctatatccatgagtcggtctatgacgaatttacccgcaagctggcggatgccgtacaaaaactgaaggtcggaaatggtctggaggagggcgtgatcgtcggcccgctgattgaaccggcggctgtcgataaagtgcgtgagcacgttgaggacgctatcgcaaaaggggcgaaggtgctggcaggcgctaaagtgcattcgttaggcgggaatttctggcagcccaccgtactgggcgactgtagcgatgggatgaaactggccagtgaagagaccttcgggccggtcgcggcctgctttcgttttaccagtgaagaagaggtcattcagcgcgccaacaatacgccgtttggcctggcggcttacttctacacgcgaaatttacaacgcgtattccgtgtttcccaggcgattgaaagcggcatgattgggattaatgaatgcgccgtatcaaccgagctggggccatttggcggggtgaaagagtcgggtctgggacgtgaaggatcggtgctggggcttgaagagtttctggaagtgaagaccctgcacatcggcggcctgtaa

SEQ ID NO: 72641 - DNA, 1968 bp, Citrobacter koseri
atgggtattttctccattgccaaccagcatatccgctttgcggtaaaactggcatgcgccatcgtcctggcgctgttcgttggctttcactttcagcttgagacgccgcgctgggcggtgctgaccgccgcgattgtcgccgcaggcccggcattcgctgccggtggggaaccctattccggcgcgattcgctatcgcgggatgctgcgtatcatcgggacatttattggctgtatcgccgcgctgaccattatcatcaccatgattcgcgcgccgttattaatgattctggtgtgctgtatctgggcgggattttgtacctggatctcctcgctggtgcgggttgaaaactcttatgcatgggggctgtccgggtatacggcgctgatcatcgtcattaccattcaggcggagccactactgacgccgcagttcgcggttgaacgttgcagcgagatcgtgattggtatcgtctgcgccattatggcggatctgctcttttcgccgcgttcagtgaaacaggaagtggatcgtgaagtcgacggtctgctggtggcgcaataccagctgatgcagctgtgtattaagcacggcgacagtgaggaagtggacaaagcctggggcgatctggtgcggcggacggcggcgctggaaggcatgcgcagcaatctcaatatggagtcatcgcgctgggggcgcgccaaccgccgcctgaaagcgctgaatacgctctcgttgacgctgatcacccagtcctgtgaaacatacctgattcaaaacactcacccggagttgatcaccgacactttccgcgagctgttcgaaacgcccgtcgaaaccgcgcaggacgtacataaacagcttaagcggatgcgccgcatcattgcctggaccggcgaacgtgaaacgcccgtaaccctttacacctgggccggtgcggcgacgcgctatctgctgctgaagcgcggcgtgattggcaacgccaaaatcagcgtgacggaagaggaagtgttgcagggcgagcccgtcgtgaaggtggaatctgctgagcgccatcacgcgatggttaacttctggcgcaccacgctgtcctgtgtgctgggcaccttattctggctgtggacgggctggacgtcgggaagcggcgcgatggtgatgattgcggtcgtcacgtcgctggcgatgcgcttacccaatccgcgcatggtcgcaatcgactttatttacgggacgctggcggcgctgccgttgggcctgctctattttttagtgatcatcccgaatacgcagcaaagcatgttgctgctgtgtctgagcctggcggtgctgggattcttcctcgggatcgaagtccagaaacggcggctgggttcaatgggggcgctggccagtaccattaacatcatcgtgctggacaacccgatgaccttccacttcagccagttccttgacagcgcgctcgggcagattgtggggtgcatgatggcgtttatcgtcattctgttggttcgtgataattcacgcgacagaaccggacgtgtactgcttaaccagttcgtttccgcagcggtgtctgcaatgaccaccaacgttgtgcgccgtaaagagaaccaccttccggcgctgtatcagcagttgttcttgttaatgaacaaattcccgggcgacctgccgaagtttcgtctggcgctgacgatgatcattgcgcaccaacgtctgcgtgatgcgcccatcccggtcaatcatgatttatctgcttttcaccgccagctccggcgtacggccgatcatgtgatttcagccggaaatgacgataagcgtcggcgctactttggacaactgctggatgagcttgatgtctatcaggaaaaattgcgagtctgggaagcgccgccacgggtgacggagccggtaaaacggctatccggcatgttgcacaaatatcagcacgccttgacggataactaa

SEQ ID NO: 72642 - DNA, 933 bp, Citrobacter koseri
gtgaaaacactaacaagaaaactctctcgtacggccatcacgctcgtactggtcattctggccttcatcgcaattttccgtgcctgggtctattacaccgagtcgccgtggacgcgtgacgcgcgcttcagcgccgacgtggttgccattgcgccagacgtcgcgggtcttatcactaacgtgagtgtgcatgataaccagctggtgaagaaagaccagatactgttcaccatcgatcagccgcgctataaaaaagccctcgaagaagcggaagctgacgttgcctactaccaagtgctggcacaggaaaaacgtcaggaggctggccgccgtaaccgccttggcgtccaggcgatgtcgcgtgaagagatcgatcaggccaataacgttctgcaaaccgtattacatcagcttgccaaagcgcaggcgacgcgcgatctggcaaaattagacctcgaacgtaccgtgattcgcgcccctgctgacggttgggtcaccaacctgaacgtctacaccggcgagtttattacccgtggctcaacggcggttgcgttggtgaaacagcactctttctacgtgctggcctatatggaagagaccaaactggaaggcgtccgtccaggctatcgcgcagagataacgccgcttggcagtaacaaagtgttgaaaggcaccgttgacagcgtggcggctggggtcactaacgccagcagcacgcgtgacgccaaagggatggcgaccatcgactccaatctggagtgggtacgtctggcgcagcgtgttccggtacgtatccgtctggacgatcagcaggacaacctgtggcctgccgggacaaccgcaaccgttgtgattaccggcaagcaggatcgtgatgaaacacaggactccttcttccgtaaaatggcgcaccgtctgcgcgagtttggttaa

SEQ ID NO: 72643 - DNA, 204 bp, Citrobacter koseri
atgagtctgtttcccgttatcgtggtgtttggtctctccttcccaccgatatttttcgaattgcttttgtcactggcgattttctggctggtgcgccggatgctggttccaaccggcatttatgacttcgtctggcatccggctctgtttaataccgcgctgtattgctgcctgttctatttaatatcgcgcttgttcgtttga

SEQ ID NO: 72644 - DNA, 930 bp, Citrobacter koseri
atggaaagattaaaacgcatgtcggtgttcgccaaagtcgttgaatttggctcctttaccgccgctgccagacagctacaaatgagcgtttcctctatcagccagaccgtggcaaaactggaagatgagctacaggttaagctgctaaaccgcagtacgcgcagcattgggctgaccgaggccggtaaaatttattatcagggttgccgtcggatgctgcacgaagtgcaggatgtccatgagcagctttatgccttcaacaacacgcctatcggcaccttgcgaattggttgttcttcaaccatggcacaaaatgtcctcgccgggttaacagccaaaatgctgaaagagtaccctggcctgacggttaacctggtgaccggcatcccggcgccggacctgatcgccgatggtctggacgtggtgattcgcgtcggtgcgttgcaggactccagcctgttttcacgccgtctgggggcaatgccgatggtggtgtgcgccgccaaaagttatctcgcgcaatttggcgtgccggaaaaacccgctgacctcagcaatcactcatggctggaatacagcgtgcgcccggataacgagtttgagttgattgcgccggaagggatctccacccggctgatcccacaagggcgcttcgtcaccaacgatccgatgacgctcagccgctggctgaccgcaggcgccgggatcgcctacgttccgttgatgtgggtgatcaatgagatcaacagcggagatctggagatcctgctgccccgctaccagtccgatccacgcccggtttacgcgctgtataccgaaaaagataagttgccgctgaaggtgcaggtggtgattaactatctgacagactattttgtcgatgtcgcgcagctatttcagggaatgtacggtcgagggaaagagaagtga

SEQ ID NO: 72645 - DNA, 1446 bp, Citrobacter koseri
atgagtctgaacctggtaagtgaacaattgctagcggcgaacggcctgaaccatcaggatttgtttgccattctgggccaactggccgaacgccgtctcgattacggcgatctctattttcagtcgagctatcacgaatcctgggttttagaagatcgcatcatcaaagatggttcttacaacatcgatcagggcgttggcgtgcgcgctatcaatggtgaaaaaacagggtttgcctatgccgatcagatcagcctgcaagcgctggagcagagcgcgcaggccgcgcgtaccatcgtgcgcgacagcggcgacggcaaagtaaaaacactgggcgcggtagagcacccgatgctctataccgccattgacccgctacagagcatgagccgcgaagagaaactcgacattctgcgtcgcgtggacaaggcggcgcgtgaagccgacaagcgcgtacaggaagtgacggccagcctgaccggtgtgtatgagctgattctggtggcggcgaccgacggtacgctggcggcggatgtgcgcccgctggtgcgtctgtctgtcagcgtgcaggtagaggaagacggtaaacgcgagcgcggctccagcggcggcggcggtcgttttggttatgactttttcttaggcgatttggacggtgaagtacgcgccgatgcctgggcgaaagaggcggtgcgcatggcgctggtgaatctgtcggcggttgccgctccggcgggaacattacccgttgtgctgggcgcgggctggcctggcgtgctgctgcacgaagcggtaggccacggactggaaggggatttcaaccgtcgcggtacgtcggtgttcagcggccatatcggtgaactggtcgcgtctgaactgtgtaccgtggttgatgacggcacgatcgccgatcgccgtggttcggttgccattgatgatgaaggtacgccgggccagtacaacgtgttgattgaaaacggcatcctgaaagggtacatgcaggataaactcaacgcgcgtctgatgggcgttgcaccgaccggtaacggacgtcgtgaatcatatgcgcatctgccgatgccgcgtatgaccaacacctatatgctggccgggaaatccacgccgcaggagattatcgaatctgtggaatacggtatctatgcgcctaactttggcggcgggcaggtggatatcacttccgggaagtttgtgttctcgacttcagaagcgtacctgatcgaaaacggtaaggtgacgaaacccgtgaaaggggcgacgctgattggttctggtatcgaagcgatgcagcagatctctatggtcgggaacgatctgaaactggataacggcgttggcgtctgcggtaaagaagggcagagtctgccggtaggcgtgggccagccgacgttaaaagtggataacctgaccgtgggcggcaccgcgtaa

SEQ ID NO: 72646 - DNA, 3801 bp, Citrobacter koseri
gtgaggcgattgccggggatattactgctcactggagccgcgctcgtcgtcgtcgttgcgctgctgatcagtggattgcgccttgcgctcccccatctggatagctggcgcccggcgatcctcagcaaaattgaatctgccacgggtattcctgttgccgccagccagttgcatgcgaactggcaaacctttggccccacgcttgaagcccgggacatccatgccagtttgaaagatggcggcgagctttcagtaaagcgcgtcacgctggcgctggatgtctggcaaagcctgttgcacatgcgctggcagtttcgcgatctcaccttctggcaactgcacatccgcaccaatacgccgatccaacgcagcgacagcgacgaaggcattgaaaccaaccgtattagcgatcttttcctgcgtcagtttgatcacttcgatctccgggacagccaaattagctttctgaccttatcaggccagcgagccgaactggcgatcccgcagcttacctggttgaacggcaaagacaggcaccgcgcggaaggtcaggtcagtctctccagcctgaccgggcagcatggcgtgatgcaggttcgtatggatctgcgtgacgacgacgggctgctgaacaacggtcgggtctggctacaggccgacgatattgatgtgaagccgtggctgggcaaatggatgcaggataacgtagcgctgcaaaccgcgcgctttagcctggaaggctggatgacgctcacgaaaggcgaagtctccagcggcgatatctggcttaagcagggcggcgcgagctggcagggcgataatcattcgcacacgctttccgttgataacctgaccgcgcacattacgcgtgaacagccgggctggcagttttatattcctgacacgcgtatcacgctggatagcaaaccctggccgcgcggcgcgttaacgctggcctgggtgccggaacaagaagttggcggtcagaacaacatacgcagcgatgaattgcgtattcgcgccagcaaccttgaactggctgatatggacgggctgcgtccggtggctgcgaaactctcgcctgcgctgggcgacatctggcaggccacacagccacgcggaaaaataaacactctcgcgctggatatcccgctacaggcgacggagaaaacgcgtttccaggcgtcgtgggataacctcgcctggaagcagtggaagctcttaccgggcgcggaacacttctccggcaccttgtccggcagcgtggaaaacggcgcgctgaccgcctcgatgcagcaggccgaaatgccgtatgaaaccgtctttcgcgcaccgctggaaattgaaaacggcgtggcgacgctcacctggctgaagaatgacaaagggtttcagctggacgggcgcaacatcgatgtgaaagcgaaagccgtacatgcgcgcggcggttttcgttacctgcaacccgccggagaggagccctggctggggattctggcagggatcagcaccgatgacggttcacaggcctggcgttatttcccggaaaacctgatgggcaaagagctggttgattaccttagcggcgcgattcagggcggcgaagcggataacgccacgctggtgtatggcggcaatccacatcttttcccctacaaacataatgaaggtcagtttgaagtgctggtgccgctgcgtaacgcgaagtttgctttccagccggactggcccgcgctgaccgacctcaacattgagctggacttcctgaacgacggcctgtggatgaaggcggatagcgtcaatctgggcggtgttaaggccagcaatctgaccgcgatcatcccggactatgccaaagaaaagctgctgattgatgccgatatcaatgggccgggtaaagcggtcggcccgtattttgacgacacgccgctgaaagattctctcggcgccacgctggagcaactccagattgacggcgatgtgaatgctcgcttacatcttgatattccgctggatggcgagctggtcaccgccaaaggggatgccttgctgcgtaataatagtttgttcattaagccgctcgacagcacgctgaagaacctgagcggtaagttcagcttcaacaacggcaatcttaagagcgaaccgttaacggcaaactggtttaatcagccgttgaacgtggatttctccaccaatgaaggggaaaaggcctatcaggtcaacgtcaaccttaacggcaactggcagccgggccgtatgggcgtgctacctgcgcaggtgaacgatgctttaagcggcggtatggcgtggaacggtaaagtgggcattgcgcttccttatcactctggtgcgacatacaacgtagaactgaaaggcgacctgaagaatgtgagcagtcacttaccgtcaccgctcgacaagcaggccggggaatccttgccggtgagcattaaggccgacggtaacttgcgtggcttcgcgctgaccggcagcgccgggaagaataatcactttaacagccgctggctgctgaatcagaaactgacgctggatcgggcaatctggacaacggatagccgcaccacgccgacattgcctgaccgacaaggcgttgagcttaatcttccggcaatggatggcgcagagtggctggcgctgttccagaaaggcgcggcggataacgttggcgcaaagaccagtttgccgcagcgcgtgacgctacgaacgccttcgctgtcgctgggcgggcaacagtggaataacctgagcattgtctctgagccgtcgctgaatggtcagaaggtcgaagcgcaggggcgcgaggttaacgccacgctggcgatacgcaataatgccccgtggcaggcgaacatcaaatacctgtattacaacccgagcgcggcgaagcgtacagacggcgcgcaggcgacctcgccgttctcctcccttgagcgagtcagtttccgcggctggcctgatgtgcagttacgctgcgttgaatgctggctgtgggggcaaaaatatgggcgtattgacggcgacgtcgcgattcagggaaatacgctgaccctgagtaacgggctgctggatacgggcttctcccggctgacggctgagggtgtctgggtgaacacgccgggtagcgagcgcacatcgctgaaggggaaactgcgcggccataaaattgatgccgcagcgggattctttggcgtttcgacccccatccgcaacgcctcgtttaacgtggactatgacttacactggcgtaacctgccctggcagccggatgaggcttcccttaatggcattttacgtacccgcctggggaaaggtgaaattaccgagctgagcaccggtcatgcggggcagcttctgcgtctgctgagctttgacgcactgctgcgtaagctgcgttttgattttagcgatacgttcagcgacggtttctggtttgactctattcgcagtacggcgtggatcaaagacggcgtgatgcacactgacgatacgctggtggatgggctggaggccgacatcgccatgaaaggttctgtcaatctggtgcgtcgggaactcgatattgaagccgtcgtcgcaccggaaatctccgccacggtaggggttgccgccgcgtttgcggtgaatccgattgtcggggcggcggtatttgccgcgagtaaagtgttggggccgttgtggagcaaagtctccattctgcgctatcgcatcacgggcccggtagacaaaccgcagattaacgaagtcctgcgccagccgcgtaaagaaagccagcaatga

SEQ ID NO: 72647 - DNA, 1470 bp, Citrobacter koseri
atgacggctgaattgttggtaaacgtaacgccatcggaaacacgcgtggcgtacattgatggcggtattcttcaggaaattcatattgagcgtgaagcgcgacgaggcatcgtaggcaatatctacaaaggccgtgtaagccgtgtacttccgggtatgcaggcggcttttgtagatattggactggagaaagccgcgtttcttcatgcttcagacattatgccgcataccgaatgcgtggcgggtgaagagcaaaagaacttcaccgtacgcgacatctctgagctggtgcgtcaggggcaggatctgatggtgcaggtggtaaaagatccgcttggcaccaaaggcgcgcgcctgacgacggacatcacgctgccttcccgctacctcgtctttatgcccggcgcgtcgcacgttggcgtttctcagcgtattgaaagcgaaaccgaacgtgaacgcctgaagaaggtggtggcggagtattgcgacgagcagggcggatttatcatccgtacggcggcggaaggggtgtgcgaagaggatctggcgtcggacgctgcttacctcaaacgcgtctggacgaaagtcatggagcgtaaaaagcggccgcaaacgcgctatcagatgtacggcgaactggcgctggcgcagcgcgtactgcgtgattttgccgatgccgagctggacagaatccgcgtggattcgcgtctgacgtacgaggcattgctggaatttactgcggaatatatccctgagatgaccagcaagctcgaacactacagcggtcatcagccgattttcgatctctttgatgttgaaaatgagattcagcgcgcgctggaacgcaaggtggagctgaaatccggcggttatctgattatcgatcaaaccgaagccatgaccaccgttgatatcaataccggagcgtttgtcgggcaccgtaatcttgatgatacgatcttcaataccaatattgaggcgacgcaggcgattgcgcggcagctgcgtctgcgcaatctgggcggtatcatcatcatcgattttatcgacatgaataatgaagatcatcgccgtcgggtactgcattctctggagcaggcgctgagcaaagatcgcgtgaaaaccagcatcaacggcttttcgcaactgggtctggtagagatgacccgtaagcgtacccgcgaaagcgtggaacatgtgctatgcaatgaatgtccaacgtgtcatggacgcggtacggtgaaaacggtggaaaccgtctgctatgaaattatgcgtgaaatcgtgcgtgtgcatcatgcctacgactccgatcgtttcctcgtttatgcctctccggcggtggcggaaacgttaaaaggcgaagagtcgcacgcgctggcagaggtggaaatttttgtcggcaagcaagttaaagtccagattgaaccgctctataaccaggagcaatttgacgtcgtaatgatgtaa

SEQ ID NO: 72648 - DNA, 594 bp, Citrobacter koseri
atgactgacgtttatcttgcttccggttcacctcgccgccaggagctgcttgcgcagctgggcgtctcttttgcacgtatcgttacgggaattgaagaaacgcgtggcgaaggcgaaagcgcgcaacagtatgtctcccgtctggcgcgggaaaaggcgcaggcaggcgtggcgcaaacggcgcgcgacttgccggtgctgggcgccgatactatcgtgattcttaacggtgaagtgctggagaaaccgcgcgatgcagaacacgcggcgcatatgctgcgcaaactgtcggggcagacgcatcaggtgatgacggccgtcgcgctggcggacagccagtacgtgctggattgtctggtggtgacggaagtgacgttcagggcactgagtgacgaggacatcgcgggctatgtcgccagcggtgagcctatggataaagctggagcatacggtattcaggggcagggtggctgttttgtcaggaagataaacggcagctatcacgccgtggtcggcttaccgctggttgaaacgtatgagttgctgagcaattttaacgcactgcgtgagaaaagggataaacatgacggctga

SEQ ID NO: 72649 - DNA, 489 bp, Citrobacter koseri
gtggcaagttatcgtagccagggtcgctgggttatctggctctcgtttcttattgcgctattgctgcaaatcatgccctggccggatgacatcatcgttttccggccaaactgggtgctccttatcttgctgtactggatcctcgcactgccgcaccgcgtaaatgtgggtacaggttttgtgatgggtgccatactggatctgatcagcggctccacgcttggcgtgcgggccttgtcgatgagtatcattgcttatctggttgcactgaaattccagctattccgtaacctggcgctctggcaacaggcgctggtggtgatattgctctcactggtcgtggacattattgttttctgggccgagtttttagtgatcaacgtctctttcagaccggaagtattctggagtagtgtagtaaacggtgtgctctggccctggcttttcctgctgatgcgcaaagtgcgccagcagtttgctgtgcagtaa

SEQ ID NO: 72650 - DNA, 1020 bp, Citrobacter koseri
atgaagccaatttttagccgtggcccgtcgctacagattcgccttattctggcggtgctggtggcgctcggcgtgattatagccgacagccgcctggggacgttcagccaaatccgcacgtacatggataccgccgtcagccctttctactttatttccaatggtccccgtgaattactcgacggcgtgtcgcaaacgctggcttcgcgtgaccaactcgaacttgaaaaccgggcgctgcgccaggaactgttgctgaaaaacagcgaattgctgatgctggggcaatacaaacaggagaacgcgcgtttgcgcgagctgctgggttcgccgctgcgtcaggacgaacaaaaaatggtgactcaggtcatctccacggttaacgatccttacagcgatcaggtggtgatcgacaaaggaagcgtgaacggggtctatgaggggcaaccggtcatcagcgacaaaggcgtagtgggccaggtcgttgcggtggcgaaactgaccagccgcgttctgcttatttgcgatgcgacacatgcgttgccgattcaggtgctgcgtaacgatatccgcgtcattgccgccggtaacggctgcacggatgatttacagcttgagcatttgccggcaaacaccgacattcgcgttggcgatgtgctggtaacgtcgggtctgggcggccgtttcccggaagggtatccggtgggcgtggtttcgtccgtcaagctggacacccaacgtgcttacaccgtgattcaggcgcgtccgactgcgggtttacagcgtttgcgttatctgctgctgctgtggggagccgatcgcaacggcgctaatccgatgacgccggaagatgtgcatcgcgtcgctaacgaacgactgatgcagatgatgccgcaggttctgccttcgccagatgcgatggggccgccagcgccaatgccggaccctgccacggggattagcccggcgcctgccgcgtctcaacaaccggcggctacgcgcgcaacgggggggcaatag

SEQ ID NO: 72651 - DNA, 1044 bp, Citrobacter koseri
atgttgaaaaaatttcgtggcatgttttccaatgacctgtccattgacctgggtactgcgaataccctcatttacgtaaaaggacaaggcatcgtattgaatgagccttccgttgtggccattcgtcaggatcgtgccggttcaccgaaaagcgtggccgcagtaggtcatgatgcgaagcagatgctgggtcgtacgccgggcaatatcgctgctattcgcccgatgaaagacggcgttatcgctgacttcttcgtgactgaaaaaatgctccagcacttcatcaaacaagtgcacagcaacagctttatgcgtccaagccctcgtgtgctggtgtgtgtaccggtaggagcgacccaggtagagcgtcgtgcgattcgtgaatccgcacagggcgctggcgctcgtgaagtgttcctgatcgaagagccgatggctgcggcaatcggcgccggtctgccggtgtctgaagcaaccggttcaatggttgtcgatatcggtggcggtacgacggaagtggccgttatctctctgaacggcgtggtttactcttcttctgtgcgtattggcggcgaccgcttcgacgaagcgatcatcaattatgtgcgccgtaactacggttctctgatcggcgaagcgaccgcagagcgtatcaaacacgaaatcggttctgcgtatccgggcgacgaagtgcgtgaaatcgaagttcgcgggcgtaacttggcggaaggcgttccacgcggctttaccctgaactccaacgagattctggaagcgttgcaggagccgctgaccggtatcgtgagcgcggtgatggttgcgctggaacagtgcccgccggaactggcgtctgatatctccgagcgtggtatggtgctcacgggcggcggcgcgctgctgcgtaaccttgatcgtctgttaatggaagaaaccggcattcctgtcgttgttgctgaagatccgctgacctgcgtggcgcgcggcggcggcaaggcgctggaaatgatcgatatgcacggcggcgacctgttcagcgaagagtaa

SEQ ID NO: 72652 - DNA, 1941 bp, Citrobacter koseri
atgcgattaacgacgaaattctcagcctttgtcacgctgcttaccgggttaacgattttcgttacgctcatcggctgctcgctgagtttttacaatgccatcgagaataaattcaccagccgcattcaggcggtcgccaccgctattgacacgcatcttgtctcctctgattttgtcacgctaacgccgcagattaatgaactgatggtatcggtcgatatcgtgcgcgtcgatttgttgcaggatggccgccaggtgtatagccattcgcgcaacagcagctatcggccagcgggaagcaacaacctgtatcgtgagctgacgattccgctggtaaaacatcccggcacctcgctgcatgtggtgtttcaggacccgatgggcaactattttcactcgctcgtgaccaccgcgccgctcacgctggcgatcggctttatcgttcttatcctgttcttatcggtacgctggctacagcgccagctgtccgggcaggagctgctggaaattcgtgcaacgcgtattctgaacggcgagcgcgggccgaatgcgcgagggtcggtctatgaatggcccgcgcgtaccagcagcgcgttggatatgctgctgtctgaaattcagtttgccagcgaacagcgcagccgtctggatacgcttatccgttcttatgcggcgcaggatgtcaaaaccgggctgggcaatcgcctgttttttgataaccaactggcgacgctgctggaagatcaggaaaaagtgggatcgcatggtgtggtgatgatgatccgcctgccagactttaacctgcttcacgacagctgggggcgcgatctcgcggaagaacagctgtttgcgctgattaatctgctgtcgacatttattatgcgctacccgggttcgctgctggcgcgctaccaccgcagcgactttgccgtcctgttgccgcaccgcacattgaaagaagcggagagcatcgccgggcagttattaaaagcggtagatgcattaccggttaataaaaagctcgatcgtgacgatatggtacatatcggcatttgcgcatggcgtagcggtcagtcaacggagcaggtgatggaacatgccgaagccgcgacccgaaatgccgtgttgcagggagggaacagctgggcggtgtatgacgattcgctgccggaaaaaggccgaggcaacgtacgctggcgcacccttattgagcagatgctcagccggggcgggccgcggatttatcagaaaccggcggtaatgcgtgaaggacgcgtacaccaccgggagctgatgtgccgtatctttgacggcgccgaagaggtgatttcggcggaatacatgccgatggtattgcagttcggtttatcggaagagtatgaccgcttgcaaattagccgtttgatcccgctgctgaaatactggccggaggaaaatctggcgatgcaggtaacggtagaatcgttgatccgcccacggtttcagcgctggctgcgtgatacgttgatgcagtgcgaaaaatcgcagcgaaaacgtattatttttgaacttgccgaggcagatgtttgtcaacacatcagtcggttacagcctgttattcgtttaatgaatgcgcttggcgttcggatcgcggtgacacaggcgggtttgacgctggtgagtaccagctggattaaagaacttaatgtggaattactgaaacttcatccgagtctggtaagaaacattgagaaacgaacggaaaaccagttgctggtacagagcctggtggaagcctgcacgggaacgcatacgcaggtttacgcgacaggcgtccgttcgcgtagcgagtggcatacgctgacggggcgcggagtggcgggcggacagggggatttttttgcctcctcccaaccacttgacaccaacgtgaaaaaatattcgcaaagatactcggtttaa

SEQ ID NO: 72653 - DNA, 975 bp, Citrobacter koseri
atgcaggctttgatcttagaacagcaggacggtaaaacccttgcttccgttcagacccttgaagaaagtcggctaccggaaggggatgtaacggtagatgtccactggtccagcctgaactataaagatgctctggccatcaccgggaaagggaaaatcatccgtaactttccgatgattcctggcatcgatttcgctggaaccgtacgcgccagtgaagatccccgcttccatgccggtcaggaggttttactgaccggctggggcgtaggcgaaaaccactggggcggtctggctgagcgcgcccgcgtaaaaggcgactggctggttgctctcccgaaaggtcttgatagccgaaatgcgatgattatcggcaccgccggttttaccgccatgctgtgcgtgatggcgctggaagacgcgggcattcgtcctgaagatggcgagattgtcgtgaccggcgccagcggcggcgtgggcagcactgccgttgcgttgctgcataagctgggctaccaggttgtggccgtgtcaggacgcgaaagcactcacgactacctgcgtagcctgggcgccaaccgcattctggggcgcgatgagtttgccgaatcccgcccgctggagaaacaactctgggccggggccatcgacaccgttggcgataaagtgctggcgaaagtgctggcgcagatgaactacggcggctgcgttgcggcctgtggtctggcgggcggcttcgagctccccaccacggtcatgccgtttattctgcgtaatgtccgcttgcagggcgtggattccgtgatgactccgcctgcccgccgcgcagaagcctggaaacgcctggtcaacgacctgccagcctctttctatgcgcaggctgcaacagaaatcacgctggcagacgcgccgaaattcgccgatgccatcatcaataaccaggcgcagggccgtacgctggtgaagattgcctaa

SEQ ID NO: 72654 - DNA, 1002 bp, Citrobacter koseri
atgaaaatgaaaaaactgacggaagccgacgtaaccgcggagtccgtttttatgttgcagcgccgccaggtactgaaagctttaggtatcagcgcggccgccctttctctgcccgctaccgcccaggccgacctgctgagctggtttaaaggcaacgatcgtccccctgcgcctgccggtaagccgcttgatttcagcaaacccgccgcctggcaaaacgacctcccgttaacgccggaaaacaaagtcaccggttataataatttctatgaattcggccttgataaagcagatccggccgccaacgcgggtagcctgaaaaccgatccctggacgttgaaaattagcggcgaagtggcgaaacccctaacgctcgatcacgatgcgctcacgacgcgtttcccgctggaagagcgaatctatcgtatgcgctgcgttgaagcatggtcgatggtggttccctggattggcttccccttacataaactgctcgcactggtcgaacccaccagcaatgccaactatgtggcgttcgaaacgatctacgcgcccgacgatatgccgggacaaaaagaccgctttatcggcggcgggctaaaatacccttacgtcgaaggattgcgtctggacgaggcaatgcacccgctcacactgctgactgtcggcgtctatggtaaagcgctgccgccgcaaaacggcgcccccatccgtctgacagtgccgtggaaatacgggttcaaggggattaagtcgatcgtcagtattaaactgacccgcgaacgcccgccgaccacctggaatctggccgcgccaaacgaatacggattttacgccaacgtgaatccgcacgttgatcatccgcgctggtcacaggcgaccgagcgttttattggcgcgggcggcattctggatgtacaaagacagccgacgctgctgtttaacggctatgccagtgaagtggcgtctttatatcgcggtctggatctgcgggagaatttctaa

SEQ ID NO: 72655 - DNA, 621 bp, Citrobacter koseri
gtgcgtctgacacaaaaacagatcgtctggctaaaagtactgctgcatcttgccggattattaccgtttctctggctcgtctgggcggtgaatcagggagggctcagcgccgatccggtcaaagatattcaacactttaccggtaggacagcgctgaaattcttgctcgccaccttgctggtttcaccgctggcgcgctacgctaaacagccattattgatccgcacccgccgcttgttagggttatggtgcttcgcctgggccacgctgcatttaaccagctatgcgctacttgaactgggcataaataatctggcgctgctgggccaggagttaatcactcgtccttatttaacgttgggcattatcagttggttcattttattcgcccttacgttgacgtccacgcaggcggcgcaacgaaaactggggaaacgctggcaacgtttgcataacttcgtttatcttgtcgcgattctggctcccattcattatctgtggtcggtaaaaattttatcgccgcagccagtcatttatgccctgctggcgttggcgcttttagcctggcgctacaagacatttcgccagtggtggcggtcgtttgcgggcaaaatgctgtaa

SEQ ID NO: 72656 - DNA, 453 bp, Citrobacter koseri
atggccgacaaattacacattttgcttttaaacggtccgaaccttaatatgctcggcacccgtgaacccgataagtacggcaccctgacattaacggaaattgttaaccgtttgaatgcagaagccgacgcgctgaatgtgacgctggatcatttgcagtctaacgcggagtacgcactcatcgaccgtattcatcaggctaaagacactgtggactatatcctgattaatccggccgcgtttacgcacaccagtgttgcgattcgcgatgcgctgctcgcggtgagcatcccgtttatcgagattcacctgagcaacgtacatgcgcgggaaccgtttcgccagcattcgtatctttccgatattgcggctggcgttatttgcggattcggcgctgacggttactcatacgctttacagacggcggtaaaacgcctgtcacaatcacactaa

SEQ ID NO: 72657 - DNA, 471 bp, Citrobacter koseri
atggatattcgtaagattaaaaaactgatcgagctggttgaagaatcaggcatctccgaactggaaatttctgaaggcgaagagtctgtgcgcatcagccgcaccgcgccaaacgcaggttttccagtgatgcaacaagcttatgctgcgccaatgcagcagccagctctgtctaacgctgtcgctccggcggctgttccagcaatggaagcgcctgctgcatcagcggaaatcagtggtcacatcgtacgttccccaatggttggtactttctaccgcaccccgagcccggatgcgaaagcattcgtcgaagtcggtcagaaagttaacgcgggcgataccctgtgcatcgttgaagccatgaaaatgatgaaccagatcgaagccgataaatccggcgtggtgaaagcaattctggtcgaaagtggtcagccggtagaatttgacgagccgctggtcgtcatcgaataa

SEQ ID NO: 72658 - DNA, 1350 bp, Citrobacter koseri
atgctggataaaattgtcatcgccaaccgtggcgagattgcactgcgtattcttcgtgcctgtaaagaactgggtatcaagaccgtggctgtgcactcaagcgcggatcgcgatttaaaacacgtattgctggcggatgagacggtctgtattggcccggctccgtccgtaaaaagctatctgaacatcccggctatcatcagcgccgctgaaatcaccggcgcggtggcaatccatccgggttacggcttcttgtctgagaacgccaacttcgctgagcaggttgaacgctccggctttatcttcattggcccgaaggccgacaccatccgcctgatgggcgataaagtgtccgcaatcagcgcaatgaagcaggctggcgttccatgcgtaccgggttctgacggcccgttgggcgacgatatggataaaaaccgcgccattgcaaaacgcatcggctacccggttattatcaaagcgtccggcggcggcggcggtcgcggtatgcgcgttgtgcgcggcgatgccgaactggcgcaatccatttccatgaccaaagcggaagcgaaagcagccttcagcaatgacatggtgtacatggaaaaatacctggaaaacccacgccacatcgaaattcaggtgttggctgacggccagggtaacgctatctatctggcagaacgtgactgctccatgcagcgtcgtcaccagaaagtggtcgaagaagcgccagcgccgggcattaccccggaactgcgtcgttacatcggcgagcgttgctccaaagcgtgtgtcgatatcggctatcgcggagcaggtacgtttgagttcctgttcgaaaacggcgagttctatttcatcgaaatgaacacccgtattcaggtagaacacccggttactgaaatgatcaccggcgttgacctgatcaaagaacagctgcgtatcgctgcgggccagccgctgtccatcaagcaggaagaagttgtggtgaaaggccatgcggtagaatgccgtatcaacgccgaagacccgaacaccttcctgccaagcccgggtaaaatcacgcgtttccacgcgccgggcggctttggcgtacgctgggagtcccatatctacgcgggttacaccgtaccgccgtactatgactccatgatcggcaagctgatctgctacggtgaaaaccgtgacgtggcgattgcccgtatgaaaaacgcattgcaggaactgatcattgatggcatcaaaaccaacattgacctgcaaacccgcatcatgaacgacgagcacttccagcacggtggcaccaacatccactatctggagaagaaactcggtcttcaggaaaaataa

SEQ ID NO: 72659 - DNA, 243 bp, Citrobacter koseri
atggacacgcgttttgttcaggccaacaaagaggcgcgttgggcgctgtggctgacccttctgtatctggctgcgtggttagtgactgcttacttaccaggcgcggcacccggcataacgggccttccacactggtttgaaatggcctgcctgctgacgccgcttgttttcattttactgtgctgggctatggtgaaatttatctatcgcgacattcctctggaggacgatgatgcagcttga

SEQ ID NO: 72660 - DNA, 1452 bp, Citrobacter koseri
atgcagcttgaagtcattctgccgcttatcgcctatctgctggtggtgtttggtctgtcggtctatgccatgcgaaaaaggacgacgggcaccttcctgaatgagtatttcctcggtagccgttcgatgggcggaattgtattggcgatgacgctgaccgccacctacattagcgccagctcatttatcggcggcccgggcgcggcctataaatacggcctgggctgggtattgctggcgatgatccagttacccgccgtctggctctcgctgggtattctgggtaagaagttcgctattctggcgcggcgctacaacgccgtcacccttaacgatatgctgtttgcccgctatcaaagccgtctgctggtctggctggcaagcctcagcctgctggtggctttcgtcggggcgatgaccgtacagtttattggcggcgcgcgtctgcttgagaccgcagcgggcatcccctacgaaacagggctgttaatctttggcgtcagcatcgcgttgtataccgcatttggcggttttcgcgccagcgtgctcaacgatacgatgcagggcatggtcatgctgattggcaccatcgtcctgttggtcggcgtggttcatgcggcaggcggcctcggacacgcggtcgaaaccctgcaaacgatcgacccgaaactggtgacgccgcagggcgcggatgacattctgtcaccgacctttatgacctcattctgggtgctggtgtgctttggcgtgatcggcctgccgcatactgccgtgcgttgcatctcctataaagacagtaaagcggtgcatcgcggcattatcatcggcacgattgtggtggcgatcctgatgttcggtatgcacctggcgggcgcgctggggcgggcggtgatccctgacctgaccgtaccggacctggtcattccaacgctgatggttaaggttctgccgccgattgccgccggcatctttctcgccgcgccgatggcggccattatgtcgacaatcaatgcccagttgctgcaaagttccgctacgatcattaaagatctctatctgaatattcgcccggagcaaatgcataacgaaactcgcctgaagcggatgtcagccatcatcacgctgctgttaggcgcgttgctgctgctcgcggcctggaaaccgccggaaatgattatctggcttaacctgctggctttcggcggcctggaagcggtgttcttatggccgctggtgctgggcctgtactgggagcgtgcaaacgcgaccggcgcgctaagcgccatgatcattggcggcgtgttgtatgccgtgctcgccacctttaacgttcagtacctgggctttcaccccatcgtgccctcgctactgctcagtttattggcttttctggccggaaaccgttttggttcatctgcccagcaagccaccttattgactactgataaataa

SEQ ID NO: 72661 - DNA, 882 bp, Citrobacter koseri
atgccgtggatccaactgaaactgaatacgaccggtacgaacgccgaagaacttagcgatgcgctggtggaaaccggcgcggtctctgtgaccttccaggacacgcacgacacgccggtatttgagccgctgccaggtgaaacgcgcctgtggggcgataccgacgttatcggcctgttcgatgccgaaaccgacatgaaagaggtggtggcaatccttgagcatcatccgctgctgggcgcgggtttcgcgcataagattgagcaactggaagataaagactgggaacgcgaatggatggacaactttcacccgatgcgctttggcgagcgtctgtggatttgcccgagctggcgcgatgtaccggatgagaacgccgtcaacgtcatgctggacccgggtctggccttcggtaccggcacgcatcccaccacatccctctgcctgcaatggctcgacgggcttgatctgaacggtaagacggtgatcgactttggctgcggttccggcatcctggcgattgccgcattaaaactgggcgcagcgaaagctatcgggatcgatatcgatccgcaggcgatccaggccagccgtgataacgcagagcgcaacggcgtatctgagcgtctggagctctatctccccaaagaccagccagaagccatgaaagccgatgtggtggtcgctaacatcctggctggcccattacgtgaactggccccgttaatcagcgtactgcccgttgagggcggtttactggggctttccggcatcctggccagccaggcggaaagcgtatgcgaagcctataccgaactctttacgctcgacccggtggtagagaaagaagagtggtgccgcattaccggtcgtaaaaaataa

SEQ ID NO: 72662 - DNA, 777 bp, Citrobacter koseri
atgaagttaatttctttggccactgcctttctggcaatctgtatgatgcccgtttccgtttcggcaactgactggagctatgaaggcgacacctctcccgcgcactggggtgaaatcaataaagcatacaaactgtgccagaccgggatgagccagtcccctgttgatattctcaccacgaatgaaatccagctcccgccgcttaacgtacagtacatcgatcgcgccgacatgctcctgaacgttaaccacactcttcaggtaacaatggccccctattcttctgcttccgctcagattgacgatcagccttatgctttagcagaatttcattttcatgccccaagtgaaaataccatcaatggtaaacactatgcgatggagctgcacctgacgcacaaaaaccaggaaggtgagattgccgtcgttgccgtcatgtttgatatcggtgagccaaatgaggcaattgaacgtttatggcaatccatcccggcaaccccgggcgacagcataccgttgctttcccccgtcgatatcaatctgctgttgccggaagacagaacctactggcgctttagcggttcgttaacgacgcctccctgtagcgaaggcgtaacctggattgtcctgaaacagcctatgacgctttctgctggtcaactggaaaagtttcgccatacgatacaccctgccaacaatcgccctgtccagcctttgaatggccgcgtcattaacgaatggtcgataccgacgcttcgcgatcctgtcctgaaatga

SEQ ID NO: 72663 - DNA, 966 bp, Citrobacter koseri
atgcgcatcggacaataccagcttagaaatcgcctgatcgcagcgcccatggctggcattactgacagaccttttcggacgctgtgctatgagatgggagcaggattgacggtatccgagatgatgtcttctaacccgcaggtttgggaaagcgacaaatctcgtttacggatggtgcacgttgatgagccaggcgttcgcacggtgcaaatcgccggtagcgaccctgttgagatggccgatgccgcacgtattaacgtggaaagcggcgcccagattattgatatcaatatggggtgtccggctaaaaaagtgaatcgcaagctcgcaggttcagccctcttgcagtacccggatttagtgaagtcgatactaaccgaggtcgtgagtgcagtggacgttcctgtcaccctgaagattcgcaccggctgggccccggaacaccgtaactgcgtagagattgcccaactggctgaagactgtggcattcaggctctgaccattcatggacgcacccgcgcctgtttgttcaatggagatgctgaatacgacagtattcgggcagttaagcagaaagtttccattccgattatcgcgaatggcgacattactgacccgcataaagccagagctgtgctcaactatacgggggcggatgccctgatgataggccgcgcagctcagggaagaccctggatctttcgggaaatccagcattatctggacactggggagttgctaccccccctgcctttggcagaggttaagcgcttgctttgcgcgcatgttcgggaactgcatgacttttatggccaggcaaaagggtaccgaattgcacgtaaacacgtctcctggtatctccaggagcacgctccaaatgaccagtttcggcgcacattcaacgccattgaggatgccagcgaacagctggaggcgttggaggcatacttcgaaaattttgcgtaa

SEQ ID NO: 72664 - DNA, 297 bp, Citrobacter koseri
atgttcgaacaacgcgtaaattctgacgtactgaccgtttctaccgttaactctcaggatcaggtgactcaaaagcccctgcgtgactcggttaaacaggcactgaagaactattttgctcaactgaacggtcaggatgttaatgacctctatgagctggtactggctgaagtagaacagcccctgttggacatggtgatgcaatacacccgtggtaaccagacccgtgctgccctgatgatgggcatcaaccgtggtacgctgcgtaaaaaattgaaaaaatacggcatgaactaa

SEQ ID NO: 72665 - DNA, 885 bp, Citrobacter koseri
atgaatgtcggatttgagccgcaatattttggcgatgaatcgaagaagatcattcacggtgatgcgctttcagaattgaaaaaactgcccccggaaagtgccgatttaatttttgccgacccgccctacaacatcggaaaaaattttgatggtctggtggagtcctgggacgaagagacctttttggcctggctgtttgaatgcattgatgagtgccatcgggtgctgaaaaaacacggcacgatgtacatcatgaacagcacggagaacatgccctatctcgacctcaaatgcaggaaactgttcgatatcaaaagccgcatcatatggtcgtacgacagctcaggcgtgcaggccaaaaagtattttggctcaatgtatgaacccatcctgatgatggtaaaagatgcgaagaactatacgtttaatcgtgatgacatcctggttgaaaccaaaaccggcgcgaaaagagcgttgatcgattaccgcaaaaatccgccccagccctacaacacgcaaaaagtccccggaaacgtctgggattttccccgcgtccgctacttaatggatgagtatgagaaccatcccacgcaaaaacccagagcgctgttgagccggatcatcctggcctcctcaaacccgggcgacacggtgttagatcccttcgccggaagcttcacgacgggcgccgtagccgtggaaaccgggcgaaaatttgtcggcatcgaaatcaacgatgaatacgtaaaaatgggcatcagaaggctgaacgtcacctctcactatgcggaaaacgaactggcaaaggtgaaaaagcgcaagacaacaaacctgtccaaaaagagccgtatggccgaaatgacggatgcgtctcaggtgaagtaa

SEQ ID NO: 72666 - DNA, 165 bp, Citrobacter koseri
atgattcgtaagtattggtggctggttgttttcgcagtctccgttttcctttttgacgcattactcatgcagtggatcgaactgatgacaacggaatacgataaatgccgcaacatgaattcggttaacccgctcaaactcgtcaactgcgccgaccttgagtag

SEQ ID NO: 72667 - DNA, 663 bp, Citrobacter koseri
atggccaggaaaacaaaagcggacgccctcagaacccgacaacacttgattgaaacagcgatcgtacagttcgccttgcacggggtcggcaacaccacgctaaacgacattgcagacgccgcgaatgttacgcggggcgctatctattggcattttgagaacaagacgcagttgtttaatgaggtatggggtcagcaaccgccgctacgcgatctcattcaggacaggttaacaacgtgtgggggcgataatccgctacagaatttgcgtgaaaaactgattgctgctttgcaatatattgctgaggtgccccgacaacaggcattaatgcagattttatatcataaatgtgaatttcataatgatatgatatcagagcaggatattcgggaaaaaataggtttcagttatcagataatgcgtgaagcattacagcaatgtatgaataaaggactgattgcgaccggtcttgatgtcgaagttaatttaattgtgcttcatggcagttttagcgggattgtaaagaactggttaatgaatccttccacttatgatctctataagcaggcgccacaattagtggataatgtattaaaaatgttagttccgaatggcaatgtgatggtattaacgcagaataataacccgatcggggaagcgtaa

SEQ ID NO: 72668 - DNA, 1158 bp, Citrobacter koseri
atgacgaaacatgccaggtttgcactcctgccctcattcatcataatctccgctgcgttactcgccggttgtaacgatcagggagatacgcaagctcaccctgctgagccgcaagtcaccgtccacgtagtcgaatctgcccccttagcggtgacgaccgagctgccggggcgcacgacgccatttcgtattgcggaagtccggcctcaggtcagcggcattgtactgaaaaggaatttcaccgaaggtagcgatatcgaagcaggccagtcgctttatcagattgacccggcgacttatcaggctgattacgacagcgccaaaggcgagctggcaaaaagcgaagctgccgccgccattgcgcacttaacggttaaacgctacgttccgctggttggcacaaaatacattagccaacaagagtacgaccaggccatcgccgatgctcgtcaggctgatgccgccgttatcgccgcaaaagccgcagtagaaagcgcgcgcatcaacctcgcctacaccaaagtgacttcgccgatcagcggccgcattggtaaatccagtgtcaccgaaggcgcgctggtgaccaatggtcaggcaaccgaactggcgaccgtgcaacagcttgatcctatttacgttgatgtgacgcagtccagcagcgattttatgcgtctcaggcagtccgtcgagcagggtagcctgcacaaagacaacacccgcagcaacgtcgagttggtaatggaaaatggtcaggcgtacccgctgaaaggcacgctgcaattttccgacgttacggtagatgaaagtaccggttctatcacccttcgggctgttttccccaatcctcagcacaccctgcttcccggtatgtttgtccgcgcgcgaattgatgaaggcattcagcccaatgccattctcgttccacagcagggcgtaacgcgtacgccgcgtggcgatgcgatggtgatgatcgtcaatgataaagatcaggttgaagcgcgcgacgttatcgctactcaggcgatcggcgataaatggttaatcagcaaagggttgcaaccgggcgacaaagttatcgtcagcggcttgcagaaagcccgccctggcgaacaggttaaagccaccaccgatgcccctgcggcgaatgcagcgcaataa

SEQ ID NO: 72669 - DNA, 3114 bp, Citrobacter koseri
atggcaaacttttttattaatcgcccgatttttgcctgggttctggccatcattctcatgatggctggcgccctggcgatcatgcagctgcccgttgcgcagtacccgaccatcgcgccgcccgccgttgcgatttccgcaacctacccgggagcggacgcgcaaacggtgcaggataccgtaacgcaggttatcgaacagaatatgaacggtatcgataacctgatgtatatgtcgtccaccagcgactcgtccggtagcgtaactattacgttgacgttccagtccggcaccgacccggatatcgcacaggttcaggtacaaaataaactgcaactggccatgcctttgttgccgcaggaagtacagcagcaaggtatcagcgtcgagaaatcaagcagtagcttccttctggtggccggttttgtttccgacaataagaacctgacgcaggatgatatttccgattatgtggcgtctaacgttaaagacaccatcagccggacatccggcgtcggcgacgtccagctgtttggcgcacagtacgcgatgcgtatctggctcgacagcaatgcgttaaacaaataccaactgacgccgttagatgttattaaccagctgaaaacgcagaacaaccagattgccgcaggccaactgggcgggacgccttccatcccgggccagcagcttaacgcctctatcatcgcgcaaacacgcctgaaaacgcctgaagagtttggccgcatcacgctgaaagtgaatcaggatggttcgatggtccatcttaaagatgtggcccgcatcgaacttggcggcgaaaactacaacatggtgacgaagattaatggccaggcggcgacaggcctgggtattaagctggcaaccggcgcgaacgcgctggatacggcagcggccattaaagcgaagcttgcggaactacagccgttcttcccgcaagggttgaaggtggtctacccgtatgacaccacgccgtttgtgaaaatatcgattcatgaagtggtgaaaacgctgtttgaagcgatcatcctcgttttcctggtcatgtatcttttcctgcaaaacatacgcgcgacgttgataccgaccattgcggtgccggttgtactgctgggtacattcgccatcctggcggcgttcggtttctctattaatacgttaacaatgttcgggatggtgctcgccatcggcttgctggtcgatgacgctatcgtcgtcgtggaaaacgtcgaacgcgtgatggtggaagaaaagctaccgcccaaagaagcgacccagaaatcaatgtcgcagattcagggcgcgctggtggggatcgcgatggtgctttccgccgtatttgtgccgatggccttctttggcggctcaaccggcgcaatttaccgccagttctcgctgactatcgtttctgcaatggcgctttctgtactggttgcgctcatcctgacgcctgcgctttgcgccacgctgcttaagccagtgtctgccgatcaccatgaaaagaaaggtggcttcttcgggtggtttaacacgctgtttgataaaagcgtcgggcattacagtaacagcgtcagcggtattttgcgcaagaccgggcgttatttgctgctgtatgtccttatcgtcggcggcatggccattttgttcctgcgcttacccacctccttcctgccagaagaagatcagggcgtattcatgacgatggtgcagttacctgctggcgcaacgcagacgcgtacgcagcaggtgctggatcagattcagaactactatctgaaccaggaaaaagccaacgttgaatccgtctttaccgtgaatggttttagctttagcggacaggggcagaactccggtatcgtctttattagcctgaagccctgggaagaacgccccggcgaagaaaatggcgtagaagcgatcgttgcccgcgcaaccaggtcattcagccagataaaggatggtcttgtcttcccgttcaacctgcccgcgattattgagctgggtacggcaacggggtttgactttgaactgatcgatcaggcgaacctgggccacacggagctcaccaaagcccggaaccagttgctgggtatgataaaagagcatcctgacctgctggttcgcgtacgccctaacggactggaagatacgccacagttcaagctggatgtcgatcaggaaaaagcacaggctctgggagtcagcctgtcagacatcaaccagacgatttccaccgcgcttggcggcacgtacgtgaatgatttcatcgatcatggacgagtgaagaaagtctatgtccaggcggatgcgccgttccgcatgttgcccggtgacatcaacaatctgtatgtccgtagcgcaaacggtgaaatggttccgttctccaccttcagttcggcacggtggatttacggctcaccacgtctggaacgctacaacggtatgccttcaatggaactgttgggtgaagcggcgcccggcagaagtaccggggaagcgatggcattaatggaaagcctggcggcaaaattaccgaacggtattggtcatgactggacaggcatgtcgtatcaggagcgcctctccggcaaccaggctccagcgttgtatgcaatctcactgattgtggtcttcctttgcctggctgcattgtatgaaagctggtccattccgttctccgttatgctcgtcgtaccgctcggcgtggtcggcgcattgctggccgcctcgcttcgcggactgaataacgacgtttacttccaggttggcctgctcacaaccattggtctttctgctaaaaacgccatcctgattgtggagtttgccaaagatctgatggagaaagagggacgagggttgattgaggcaacgcttgaagcatcgcgtatgcgtttacgcccaatcctgatgacatctctggcgttcatcctcggcgttatgccgctggttatcagtcatggcgcaggcagtggcgcacaaaatgcggtgggaacaggggttatgggaggaatgctgacggcgacattgctggcaatcttcttcgttccggtcttctttgtggtcgtgagacgtcgttttaaccggcatcatgattaa

SEQ ID NO: 72670 - DNA, 222 bp, Citrobacter koseri
atgaaaagattaattcctgttgcattgctcacaaccttgctggcggggtgtgcgcatgactctccttgcgttccggtttatgacgaccagggtcgtctggttcataccaatacctgtatgaagggcaccacgcaggataactgggaaacagcgggggcgattgccggtggcgcagccgctgtcgcaggcctgacgctggggattgttgccctgacgaaatag

SEQ ID NO: 72671 - DNA, 1026 bp, Citrobacter koseri
atgaaaaagatgatgatagccagcctggctgcggtcagcgtgctgcttgctgttgcaaatcaggcgcatgctggcgcaacactggatgccgtaaagaaaaaaggattcgtacaatgtgggatcagtgacggcctgcctggtttttcttatgcagacgcaagcggtaaattcacgggtattgacgtcgatgtttgtcgtggcgttgccgcagccgtctttggcgatgatacaaaagtaaaatataccccactcactgcaaaggaacgcttcaccgccttgcaatccggcgaagtcgatctgttatcccgtaatacaacctggacctcttcacgcgacgcaggtatgggcatgtcattcactggcgtgacgtattacgacgggattggtttcctgacgcataacaaagcggggttaaaaagcgctaaagagctggacggcgccaccgtctgtatacaggctggcacggataccgaactgaacgtggccgattactttaaagccaacaaaatgaaatacaccccggtcacttttgatcgctctgatgagtcagccaaagcgctggaatcgggccgctgcgacacgctggcttctgaccagtctcagttatatgccctgcgaatcaagctgagcgaccctgccgaatggatcgtcttgcctgaagtcatctcaaaagagcctctggggcccgttgtgcgccgtggtgatgatgagtggttctctgtcgtccgctggacgctgttcgctatgctgaatgctgaagaaatggggattaactcgcagaacgtagatgagaaagcggcgaatccggcaacaccggacatggcgcatttgttgggcaaagaaggggattacggtaaggatctgaaactggataacaaatgggcctacaacatcattaaacaggttggtaactacgcggagatctttgaacgtaacgtgggatcggaaagcccgctgaagatcaaacgaggccagaacaatctctggaataacggcggcattcagtacgcaccacccgtacgctaa

SEQ ID NO: 72672 - DNA, 1182 bp, Citrobacter koseri
atgtcccatcgccgctcaaccgtgaaaggaatgctctccttttctaaccctgcggtccgcgcctggttatttcaaatactcgccgttattgcggttgtcagtgttgcggtctatttaattcataatacgattaacaatctgagcagccgggggattacctcaggattcgcgtttctcgatcgcagcgccgggtttggtattgttcagcacctgatcgactacgagcaaggggatacatacggtcgcgtctttctggtcggcttgctcaataccctgttggtctccgcactgtgtattgtttttgcgtcatttttaggttttttcctcggccttgcacgcctgtcggataactggttattgcgtaagttatcgaccatttacatcgaaacctttcgcaatattccgccattgctgcaaatcttcttctggtactttgccgtcctgcgtaatttacccgggccacggcaggcggtcggcgcgctggatttggtttttctgagtaatcggggactctatattccggcaccacagctgggtgaaggcgttatcgctttttgcatggcaatccttctggcgatcgtcatctccactggactctttcgcttcaataaaacgcaccagattaagacggggcaattgcgccgaacatggcctacggcgttggcgcttatcgtactattgccggctgtcgctcagtggctatttggcgcggcgctgcactgggatgtgcccgagttacgcgggtttaacttccggggagggatggcattaattccagaactggctgcgttgacgctggcgctttcggtatacacctcggcatttattgctgagatcatccgttccggtatccaggcggttccccacggccagcatgaagccgcgcgttcactgggcctccctaatccggtaacgctgcgtcaggtcatcattccccaggcactgcgcgtgatcattcctccattgaccagccagtatctgaatatcgtgaagaactcatcgcttgccgccgctatcggctacccggatatggtttccctgtttgccggaacggtactgaaccagacgggtcaggccattgaaaccatcgccatcaccatgtcggtatatctgatcatcagcctcagtatttccctgctgatgaatatttataaccgccgtatcgccctgattgagcgctaa

SEQ ID NO: 72673 - DNA, 1104 bp, Citrobacter koseri
atgacaaaagctcttctgtctcatcccatgcgcccggccaataacggcgcaggtcgcataattttgtgggtacgtaaaaatctcttttccagttggtccaatagcctgctaacccttttttgtctgtggctcatgtggatactcattccccccttgctgaactgggcgtttctacaggctaactgggtgggttcgacgcgtgctgattgcacgaaggcgggtgcctgctgggtatttatccacgaacgttttggtcagtttatgtatgggctttatccacatgaccaacgctggcgcatcaacctggcattactcgttggtctggcctccattgtgccgatgttctggaaagcaatgccccgtcgcgggcgctacatcgccgcatgggcggttatctatcccattgttgtctggtggctgatgtatggcggtttcttcgggctggagcgggtagaaacacggcaatggggaggattaacactcacgttgatcatcgcttccgtcggtattgcgggtgcccttcctctgggaattttgctggcgctgggccgtcgctctcatatgccgatcgttcgtatgctctccgttatctttatcgagttctggcgaggcgtaccgttaatcaccgtgctgtttatgtcttcggtcatgctgccgctgtttatgtcggaaggaaccagtatcgacaaacttatccgggcgctggtcggggtgatcctttttcagtcagcctacgtcgcggaggtcgtacgcggagggttacaggcattaccgaaagggcagtatgaggccgcggaatctctggcgctcgggtactggaaaacccaggggctggtcattctcccccaggcgttgaagctggtgatcccgggtctggtgaacaccattatcgccctgtttaaagataccagcctggtgatcattatcggtttatttgaccttttcagtagcgttcagcaggcgactgttgaccctgcatggctggggatgtcgaccgaagggtatgtttttgccgcactgatttactggattttctgcttcagcatgtcgcgttacagccagcatctggagaaacgttttaacaccgggcgtacgccgcactga

SEQ ID NO: 72674 - DNA, 759 bp, Citrobacter koseri
atgagccaattactaattcaacctgccgacgcgatgatcacgctggaaaacgtcaataaatggtacggtcagtttcatgttctgaaagacattaatctgaacgtgaaacagggggagcgtatcgtgctgtgtggcccttccggctcgggtaaatccacgaccattcgctgtattaatcatctggaggaacatcaacaagggcgtattgtggtagacggtattgaactcaatgaagacattcgcaatatcgagcgggtaagacaggaagtcggtatggtgttccagcacttcaacctcttcccacatctgacggtactgcaaaactgtactctggcgccgatttgggtgcggaagatgccaaagaaagaagctgaagcactggcgatgcattacctggaacgtgtgcgcatcgctgagcacgcccataagtttccagggcagatttccggcgggcaacagcagcgcgtggctattgcacgttcgctatgcatgaagcccaaaattatgctgtttgatgaaccgacttccgcgctggatcctgagatggtgaaagaggtgctggataccatgattggtctggcacagtccgggatgacaatgctttgcgtcacccacgaaatgggctttgcccgaacggtagcagacagggtgatctttatggatcgtggtgaaattgttgagcaggcgccaccggaagagttttttgcccatcctaaatcagagcgtacccgggcgttcttgtcgcaagtcattcactaa

SEQ ID NO: 72675 - DNA, 2115 bp, Citrobacter koseri
atggctcgtacaacacccatcgcacgctaccgtaacatcggtatcagtgcgcacatcgacgccggtaaaaccactactaccgaacgtattctgttctacaccggtgtaaaccataaaatcggtgaagttcatgacggcgcagctaccatggactggatggagcaggagcaggagcgtggtattaccatcacctccgcagcgactactgcattctggtctggtatggctaagcagtatgaaccgcatcgcgtaaacatcatcgacaccccggggcacgttgacttcactatcgaagtagaacgttccatgcgtgttcttgatggtgcagtaatggtttactgcgcagttggtggtgttcagccgcagtctgaaaccgtatggcgtcaggcaaacaaatataaagttccgcgcattgcgttcgttaacaaaatggaccgtatgggtgcgaacttcctgaaagttgttggtcagatcaaaagccgtctgggcgcgaaccctgttccgctgcaactggcgattggcgctgaagaagcgttcaccggtgttgttgacctggtgaaaatgaaagccatcaactggaacgaagcagatgcaggcgttaccttcacttacgaagatatcccggctgacatgcaggaactggctgaagaatggcaccagaacctgatcgagtccgctgcggaagcttctgaagagctgatggagaaatacctgggtggcgaagaactgactgaagaagagatcaaaaaagctctgcgtcagcgtgttctgagcaacgaaatcatcctggtaacctgtggttctgcatttaagaacaaaggtgttcaggcgatgctggatgcggtaattgattacctgccatccccggttgacgtccctgcgatcaacggtatcctggacgacggtaaagatactccggctgagcgtcatgctagcgatgatgagcctttctctgcactggcattcaaaatcgctaccgacccgttcgtgggtaacctgaccttcttccgtgtgtactctggtgtggttaactctggtgatactgtactgaactctgtgaaatccgcacgtgagcgtttcggtcgtatcgttcagatgcacgctaacaaacgtgaagagatcaaagaagttcgcgcgggcgacatcgctgctgctatcggtctgaaagacgtaactacgggtgacaccctgtgtgatccggacgcgccgatcattctggaacgtatggaattccctgagccggtaatctccatcgcagtagaaccgaaaaccaaagctgaccaggaaaaaatgggtctggctctgggccgtctggctaaagaagacccgtctttccgcgtatggactgacgaagaatctaaccagaccattatcgccggtatgggtgagctgcacctcgacatcatcgttgaccgtatgaagcgtgaattcaacgttgaagcgaacgtcggtaaacctcaggttgcttaccgcgaagcgattcgctcgaaagttaccgatatcgaaggtaaacacgccaagcagtctggtggtcgcggtcagtacggtcatgttgttatcgacatgtacccgctggagccgggttccaacccgaaaggctacgagttcatcaacgacatcaagggtggtgtaatccctggcgaatacatcccggccgttgataaaggtatccaggagcagctgaaagcaggcccgctggctggctatccggttgttgacatcggtatccgtctgcacttcggttcttaccatgacgttgactcctctgaactggcgtttaaactggctgcgtctattgcctttaaagaaggctttaagaaagcgaaacctgttctgcttgagccgatcatgaaggttgaggtagaaacgccggaagagaacaccggtgacgtaattggtgacttgagccgtcgtcgcggtatgctgcgcggtcaggaatccgaagttactggcgttaagatccacgctgaagtaccgctgtctgaaatgttcggatatgcaactcagctgcgttctctgaccaaaggtcgcgcatcatacactatggaattcctgaagtatgatgatgcaccgagcaacgttgctcaggccgttattgaagcccgtggtaaataa

SEQ ID NO: 72676 - DNA, 471 bp, Citrobacter koseri
atgccacgtcgtcgcgtcattggtcagcgtaaaattcttccggatccgaagttcggatcagaactgctggctaaatttgtaaatatcctgatggtagatggtaaaaaatctactgccgaaactatcgtatacagcgcgctggagaccctggctcagcgttctggtaaatctgaactggaagctttcgaagtagctctcgaaaacgtgcgcccgactgtcgaagttaagtctcgccgcgttggtggttctacttatcaggtaccagttgaagtccgtccggttcgtcgtaatgctctggcaatgcgttggatcgttgaagctgctcgtaaacgcggtgataaatccatggctctgcgcctggcgaacgaactcactgatgctgcagacaacaaaggtactgcagttaagaaacgtgaagacgttcaccgtatggcagaagccaacaaggcgttcgcacactaccgttggtaa

SEQ ID NO: 72677 - DNA, 375 bp, Citrobacter koseri
atggcaacagttaaccagctggtacgcaaaccacgtgctcgcaaagttgcgaaaagcaacgtgcctgcgctggaagcatgcccgcaaaaacgtggcgtatgtactcgtgtatatactaccacccctaaaaaaccgaactccgcgctgcgtaaagtatgccgtgttcgtctgactaacggttttgaagtgacttcctacatcggtggtgaaggtcacaacctgcaggagcactccgtgatcctgatccgtggcggtcgtgtaaaagacctcccgggtgttcgttaccacaccgtacgtggtgcgcttgactgctccggcgttaaagaccgtaagcaagctcgctccaagtatggcgtgaagcgtcctaaggcttaa

SEQ ID NO: 72678 - DNA, 294 bp, Citrobacter koseri
gtgactatcctgcatacattacatcgttccgcatggctcagtgacgtttccgcgcttcttcgcgtgtgcaaagaaggcgatgcgcttttattgctacaggatggcgttacggcggccatcgaaggtagccgtttccttgaaagtttgcgtaacgcccccataacggtttacgcactgaaagaagatatcgatgctcgcggtttgagcggtcaaatttcagacagtgtcgtcagggttgactatactgacttcgtcagacttgcggttaagcatcccagccagatggcctggtga

SEQ ID NO: 72679 - DNA, 360 bp, Citrobacter koseri
atgaaacgtattgcttttgtattttccaccacgccgcacggcagcgcatcgggccgcgaaggactggatgcgttactggcgacgtcggcgctgacggaagaggctggcgtcttttttatcggcgacggcgtttttcagatcctttcgggacaaacgcctgatgtcgtgctggcgcggaattacatcgccaccttcaaactgctggggctgtacgatatcgagcaatgctggctgtgcgccgcctcgttgcgtgagcgcggtctggagacgggggcgagtttcatcgtggatgcgacgccgcttgaacctgaagcgttgcgcggtgaactggacaattatgatgttatcctgaggttctga

SEQ ID NO: 72680 - DNA, 387 bp, Citrobacter koseri
atgcgttttgccattgtggtgacggggccagcgtacggaacgcagcaagcgagcagcgcgttgcagtttgcgcatgccttagttaacgaagggcatgagttgagcagcgtctttttctaccgggaaggcgtgtataacgccaaccagttgacctctccggccagcgatgaattcgacctggtgcgcgcatggcagcagttaggcgcgcagcatggcgtcgcgttgaatatctgcgttgcggcggcgctgcgtcgcggcattgtggatgagaccgaagcaaaaaggctggcgctggcatcagccaacttacagccagggttttcgttgagcgggcttggcgcgctggcggaagcctccctgacctgcgatcgcgtggtgcagttttga

SEQ ID NO: 72681 - DNA, 723 bp, Citrobacter koseri
atgaccaggtcgcttttaaccaacgaaaccagtgagcttgacttactggatcaacgtcctttcgatcaaaccgactttgatattctgaaatcctacgaagcggtggtggacgggttagcgatgctcattggttcccattgtgaaatcgtattgcactctttgcaggatttgaaatgctcagccattcgcattgccaacggtgaacacacggggcgcaaaattggctcgccgatcactgaccttgcattgcgcatgctgcatgatatgacgggtgcggatagcagcgtatcgaagtgttacttcacacgcgcgaaaagcggtgtcctgatgaagtcagtgacgattgccattcgcaaccgcgagcatcgcgtaattggtctgctgtgcatcaacatgaaccttgatgtgccgttctcgcagattatgaatacctttattccgccggaaacgccggaagtgggttccgccgtgaactttgcctcctcggtggaggatctggtcactcagacgctggaattcaccattgaagaggtgaatgccgatcgcaatgtctcgaataacgcgaagaatcgtcagattgtgctgaatctgtatgagaaggggatcttcgatattaaagatgcgattaaccaggtggctgaccgcctgaacatctccaaacatacggtctacctctatattcgtcagttcaaaagcggcgacttccaggggcaagataagtaa

SEQ ID NO: 72682 - DNA, 819 bp, Citrobacter koseri
atgaaatcactgtttaaagtaacgctgctggcgaccacgatggccgttgctctgcatgcaccgctcactttcgctgcggacgccgcgaaaccagctgcaactgctgacagcaaagccgcgttcaagaatgacgaccagaaatctgcttatgcgctgggcgcttcgctgggtcgttacatggaaaactccctgaaggaacaagaaaaactggggatcaaactggataaagatcagctgatcgcgggtgtccaggatgcatttgcagacaagagcaaactgtctgaccaggaaatcgagcagaccttgcaggcatttgaagcgcgcgtgaagacctccgctcaggcgaagatggaaaaagacgccgctgataacgaagcgaaaggtaaagcgttccgcgagaaatttgctaaagagaaaggggcgaaaacctcttcaacaggtctggtttataaagtagagaaagccggtactggcgaagcgccaaaagacagcgacaccgttgtggttaactacaaaggtacgctgatcgacggtaaagagttcgataactcctacacccgtggcgaaccgctctctttccgtctggacggcgtgattccgggctggactgaaggcctgaagaacattaagaaaggcggtaagatccagatggttatcccaccggatctggcctacggtaaaacgggcgttccgggtattccggctaactccacgctggtattcgatgtagagctgctggacatcaaaccggcgccgaaagccgatgcgaaaccagacgcagcggccgacgccaaatcgacagatgctgctaaaaaataa

SEQ ID NO: 72683 - DNA, 219 bp, Citrobacter koseri
atgcaagatataacgatggaagctcgcctggctgaactggagagccgtctggcgtttcaggagatcaccattgaagaactcaacgtaacggtgaccgcgcacgagatggagatggcgaaactacgcgatcatctgcgcctgctgacggagaagcttaaagccagccaaccgtcgaatatcgcctcgcaggccgaagagacgccgccaccgcattattga

SEQ ID NO: 72684 - DNA, 588 bp, Citrobacter koseri
atgaaagtagcaaaagacctggtggtcagcctggcctatcaggtacgtacagaagacggtgtgttggttgatgagtctccggtgagtgcgccgctggactacctgcatggtcacggttccctgatctctggcctggaaacagcgctggaaggtcacgacgttggcgacaaattcgatgtggctgttggcgcgaacgacgcttacggtcagtatgacgaaaacctggtgcagcgcgtgcctaaagacgtcttcatgggcgttgacgagttgcaggttggcatgcgtttcctggcggaaactgaccagggcccggtaccggtagaaattaccgaagtggaagacgaccacgttgtggttgacggtaaccacatgctggctggccagaacctgaaatttaacgtggaagttgtggcgatccgcgaagcgaccgaagaagaactggctcatggccacgttcacggcgcgcacggtcacgaccacgaccacggtcacgacggttgctgcggcggccacggccacgatcatgaccacggtcatgagcatggcaaaggtggttgtggcggtaacggcggctgcggttgccattaa

SEQ ID NO: 72685 - DNA, 201 bp, Citrobacter koseri
atggcgattcgtaaacgttttattgcaggggcgacgtgtccggcctgccaggcgcaggattcaatggcgatgtggcgcgaaaataatgtcgatattgttgagtgtgttaagtgcggtcatcagatgcgtgaagccgataaagcggcccgcgagcacgttcgcaaagaagagcaagtgatcgggatttttcatccagactag

SEQ ID NO: 72686 - DNA, 1806 bp, Citrobacter koseri
atggaaggttctgatttattgactgcgggggtgatgttcctcttcgcggcggtcgctgcggtgccactggcatcgcggctgggtattggcgcggtactgggatatttgctggcagggattgcgattggcccctgggggctgggatttatcagcgacgttgatgaaatcctccacttttctgagctgggcgttgtctttctgatgtttatcatcggcctggaactcaacccttccaaactctggcaactgcgtcgctctatctttggcgtcggagcggcccaggtgatgctgagcgctgtcgtgctggccgggctgctgatgcttaccgatttctcgtggcaggcggcggtgatcggcgggattggtctggcgatgtcatcgaccgcgatggcgctgcaactgatgcgggaaaaggggatgaaccgcagcgaatccggccagttgggtttttcggtgctgctgtttcaggatctggcggtgatccccgcgctggcgctggtgccgctgctggctggctcggcagatgaacattttgactggattaaagtcggcatgaaggtgctggcctttgccgggatgctgattggcggtcgctatttgctgcgcccggtgttccgctttatcgccgattccggcgtgcgcgaggtgtttaccgccgccacgctgttgctggtgctggggtctgctttatttatggatgcgctggggctgtcgatggcgctcggcacgtttatcgcaggcgtactgctggcggaaagcgaataccgtcatgagctggaaacggccatcgatccgttcaaagggctgctgctggggttgttctttatctccgtagggatgtcgttaaaccttggcgtgctctatacccacctgctgtgggtggcggtgagcgtcgtcgtgctggtggcggtgaaaacgctggtgctttatctgctggcgcgtctgtacgggattcggagttcggagcggatgcagtttgcgggcgtgctgagtcaggggggcgagttcgcgtttgtgctcttttccaccgcctcgtcccagcggctgttccagggtgaccagatgtcgctgctgctggtcaccgtaacgctgtcgatgatgaccacgccgctgctgatgaagctcgtcgataaatggctctccagacagcttaacggcccggaagaggaagatgaaaagccctgggtggatgatgataaaccgcaggtgattgtcgtgggattcgggcgttttggtcaggtaattggccgtttgttgatggcgaataaaatgcgcatcaccgtactggagcgcgatatcagcgccgttaacctgatgcgaaaatacggctacaaagtgtattacggcgatgcgactcaggtggagctactgcgttcggcgggagcggaagcggcggagtctatcgtcattacctgtaatgagccggaagacaccatgaagctggtggagatatgccggcagcatttcccgcatttgcatattcttgcgcgagcgcgcggacgtgtggaagcgcatgagttattacaggcgggtgtcacacagttttcccgcgagacgttttccagcgcgctggagctggggcgtaagacgctggtgtcgttagggatgcacccacaccaggcgcagcgtgcgcaactgcatttccgtcggctggatatgcgtatgctaagggagcttattccgatgcataccgatatggtgcaaatttctcgtgccagagaagccagacgcgaactggaggagattttccagcgagagatgcagcaagagcggcgccagctggatggctgggatgagtttgagtag

SEQ ID NO: 72687 - DNA, 552 bp, Citrobacter koseri
atgtcccagccagcaaaggtactgctgctgtatgcccatccagaatctcaggactcggtcgcgaaccgggtgctgcttaaaccggccatgcaactcagtaatgtgacggtgcacgatctctacgcgcactaccctgatttttttatcgatatcgcgcatgagcaggcgctattgcgtgaacatgacgtaattgttttccagcatccgctgtatacctatagctgtccggcgctgcttaaagagtggttagaccgcgtgctcagccgtggtttcgccagtggcccaggggggaaccaactggcgggaaagtactggcggagcgtgattaccaccggcgagccggaaagcgcgtatcgctacgatgcgctgaaccgctatccgatgaccgatgtgctgcggccgtttgagctgacggcggcgatgtgccggatgcactggatgagtccgattattatttactgggccaggcgacaaagtgagcaggaactggccagccacgcgaaagcctacggcgaatggctggcaaaccctgttctggcgggaggtcgctaa

SEQ ID NO: 72688 - DNA, 1902 bp, Citrobacter koseri
atgattgttttctcctcgttacaaattcgtcgcggcgtgcgcgtcttgctggacaatgccaccgccaccatcaacccgggacagaaggtcggcctggtgggtaagaatggctgcggtaaatctaccctgctggcattgctgaaaaatgaaatcagcgccgatgcaggcggcgtgacctttcccggtaactggcagctggcgtgggtgaatcaggaaacacccgcgcttgcgcagcccgcgctggagtacgtgattgatggcgaccgcgaataccgccagctggaagcgcagttgcacgacgccaacgaacgtaacgacgggcacgccatcgccaccgtacacggcaagctcgacgccatcgacgcctggaccgtgcgctcacgcgccgccagcctgctccacggcctcggttttagcaacgaacagcttgaacgtccggtcagcgacttctccggtggctggcgtatgcgccttaacctagcccaggcgctgatttgccgttctgacctgctgctgctcgatgaaccgaccaaccacctcgatcttgatgccgttatctggctggaaaaatggctgaagagctatcagggcactctgattctgatttcgcacgaccgcgacttcctcgatccggtggtagacaaaatcattcatatcgaacagcaaaccctgttcgaatacaccggcaactacagcgcatttgaagtgcagcgcgcgacccggctggcccagcagcaggcgatgtatgagagccagcaggagcgcgtagcgcatttgcaaagttatatcgaccgtttccgcgccaaagcaacaaaagcgaagcaggcgcagagccgtatcaaaatgctggagcgtatggagcttatcgctcctgcgcatgtcgataacccgttccacttcagcttccgcgcgccggaaagcctgcccaacccgctgctgaaaatggagaaagtgagcgccgggtatggcgatcgcatcattctggactccattaagctgaatctggtgcccggttcacgcatcggcctgctggggcgcaacggcgccggtaaatcaacgctcatcaagctgctggcgggcgagcttgcgcctgccagcggtgaaatcggtctggcaaagggcattaaactcggttacttcgctcagcatcagctggagtatttgcgagcggatgaatcgccgctgcaacatctggcgcggctggcgccgcaggagctggagcagaagctgcgcgattacctcggcgggtttggcttccagggcgataaggtcagcgaagagacccgtcgcttctccggtggtgaaaaagcgcgcctggtgctggcattgatcgtctggcagcgccctaatctgctgctgcttgatgaaccgaccaaccaccttgacctcgatatgcgtcaggcgctgaccgaagcgctcatcgaatttgaaggcgcgctggtggtcgtctcgcacgaccgtcacctgctacgctccaccaccgacgatctctatctggttcacgaccataaagtcgagccgttcgatggcgatctggaagactatcagcagtggctgagcgacgtgcagaaacaggaaaaccagcctgatgacgccccgaaagagaacgccaacagcgcccaggcgcgtaaggatcagaagcgtcgcgaagccgaactgcgtgcccagacccagccgctgcgtaaagagatcgcccgtctggaaaaagagatggagaagctgaacgcgaaactggcgcaagcggaagaaaaactgggcgacagcgaactgtacgaccagagccgcaaagcggaactgacggaatgcctgcaacagcaggccagcgccaaatccgggctggaagagtgcgagatggcctggctggaagcacaggaacagcttgagcagatgctggccgactaa

SEQ ID NO: 72689 - DNA, 933 bp, Citrobacter koseri
atgaatccgctgatgaccaacgatatcacctttcgcaagttaagcatcttcatgacgtttatggagaaaggcaatattgcccggacggcggaggcgctggatatcagcggggtcagcgttcatcgcgcgctgcatacgctggaagagaatgttcgctgtccgctgttcgtgcataaaggacgtaatctgatcccgcaaccggcggcgtggacgctgctggagtattgccaggaggtcagccagttgatggcgcgcgggctggaagaggcgcgcaaaacggcagggatcggccaggggcgtctgcgcgtaggtacgctctactctctgacgctggaaaccgtcccgcatctgatcatggggatgaaactgcgccgaccggatctcgaactggatctgacgatgggctccaacgaagcgctgctgagaatgctggaagacgggatgctggatgcgatcctgatctccatttcggaaagcgctatcgatcgcaacagtctggaagtgctgccgctgtttcatgacgacatttatctcgccgcaccggcgacggcaacgcttgacacctcctcgcccgccgatctgcgtgattaccgggatcagaagtttgtctcactggcggaaggctttgccacctatgcaggcttccaggaagcctttcatattgccgggtttgaaccagagattgtcacccgtgtgaacgacatcttctcgatgctcagtctggtgcaggcgggtgtcggtttcactctgatgccgggacgcatgaagaagatgtacgagaattccgtacagttgctgaagctgtcgcagccgtaccagatgcagcagctcatcgccattgtcttcgcccgcaaccgcgagcgcgaccctaatctgttggcgctggccgccgaagggcgcatgtacgcgcgtagccttaatccgggcgcctga

SEQ ID NO: 72690 - DNA, 897 bp, Citrobacter koseri
atgaaaatcctgtttacctttccgggacaggggacgcagtatgcaggtatgctgcaaaaccttccgggaacggagttagcgctggcgcgcgaggtgctgggggcggaggcgaatacgcttgataccccggacgcgctgcaacacacccgggcggtacagcttgctttgctgattgccggggtggcgtgggcgcgcgagctggaacgtcgcggcgtcgcgccggatattgtcagcggcctgtccatcggcgcatatccagcggcggtgatcgccggagcgctggagtttaccgacgcgctgacgctggtggccctgcgcggtgatttgatggagcaggcgtatccgcacggttacggcctgacggcgattatggggctgaccttgccgcaggtggagtcgctggttgcaggcagtggaacctttatcgctaacctgaatgcggaaacccagattgtgattgccggcagcgatgaggcgatggcggatgttgcgaagcgggcgctggataaaggcgcgagtaaagcccaccgtctggcggtgagcgtgccgtcgcactgcgctctgctggcggaaccggcgcagcggctgacggaggcgttccgtcatgtgacgctctcccgtccgcgctgtgcatacctcagcggtagcaccgggcgtgtgctgtggcagccggaacgtattgctgacgatctggcgatgaacatggcgcggacggtgcgctggcaggacgcggcgatctccgccaacgagcgcgaggcgcggctggcgattgaaatgccgcccggcggcgtgttgacctgcttaacgcgacaggcggagtgggaaggtgagtctgtctcgctggagcgcagcggggtggatgtcgcggtgcatctggcaaaacggcttagaggctag

SEQ ID NO: 72691 - DNA, 618 bp, Citrobacter koseri
atgaacacaacattacgcccccacgatcttatctggcttaacgcgcggagcgcgctggaaggtgtcacggaatcctgggtggatgacgtctggcatacccgcctgccggtggtggtgcggcgtgatgttgatgcgcaggggcgcattcccgtcggcgttcgcggcataaagcgcgaccagcgcgcggcgggctgggctcaaccggacgccattacccgcgtctgtacgccggaatcgctggttgacccacagatgctgctgcgctcgccctttatctcgcagccaccggttcaggtggctttattactgacgcaacaggcatggccgtggacgtgggggattaccggcagtaccggctacgcgctggcgaccggactcccggtgatccacgccgcaagcgatctggatttgctgattcgcgcccggcagccgctctctcgcgagctgctggagaaatggcggcagcaactgacgggcgggctttgccgtgcggatacccaggtggaaacgccgcacggcgcgtttgcgctgaacgaatggctgcgcgatggcaaagcgctgttaaaaacgtcgcaggggccgcggctggtcagcgacccgtggcgcagggaggagtaa

SEQ ID NO: 72692 - DNA, 960 bp, Citrobacter koseri
atgacttacgtgattgttcatgctcttgcaccgatttttgtcatcatgttgctggggttctgggccgggaaggccaaaatggttgataacaagaatgtttccctgctcaacattttcgtcatggattttgcactccccgctgcgctgtttagcgccacggtacaaacgccctggacgggtattgtcgcgcagtcgccgctgattctggtgctgacgctggcgatgtggatcacctacgccgctatctattttctggcaacgaaggtatttaaaaaatcaccgcaggatgcggccgtgctgaccctgaccgtcgctctgccaaactacgctgcgcttggcctgccgattctcggtagcgtgctgggcgaagggccgtcaacgtcgctctccgtcgcggtttccatcgcctgcggttccgtgctgatgacgccgttctgcctgctgattctggagcgtgagaaagcgcgtgcggaaggcggtaactcaggttctactctgtctatgctgccggtgctgatgtggcgttcaatcaagaaaccgatcgtgatggggccgctgctgggggttattctctccgctatcggtatcaagatgccggagctggtgctggcggcgatcaaaccgctgggcctgtccgccactgcggcggcgctgttcctgaccggggtgattctttctgcgcgtaagttgcagattaacacgatggttattacctccaccattgccaagctgctgattcaaccggcgattgcctgggggatcgtgctgattttcggtctgcatggctcggtggcgatcaccgctatcctgatgattgcgctgtctgccggtttcttcggcgtggtgttcggtaatcgcttcggcgtgcagtcgccggatgcagaagccgtgctgctgttaagctcggtcctgtgtatcctgtcgctgccgttgtttatctcgctgacttcaggactctaa

SEQ ID NO: 72693 - DNA, 804 bp, Citrobacter koseri
atgatgagtaacgcaataagccgtggcgagttatggctgcaagccctcgtaccgaacgccaggcggctcgaagggctgtgcccctccgtgcaggccgctgacggtgagctgaacggtgaaacggcgcgctttatcgcggtagtgccggatgctaacaaccattacccacgcgccgcaaaaggcgaggttggtctgctggaaggctggacgcttgcaaaagtggtcagcgaaaccgtggctgccgatgctgacaacgctgttaagcgcccgatcgtggcggtgattgatgtgcccagccaggcctacggtcgccgtgaagaaggctttggtattcaccaggcgctggccggtgcggcagcggcgtatgccaatgcgcgtctggcaggacatccggtgattggccttattgtcggcaaggcgatgtccggcgcgtttctggcgcacggttatcaggccaaccgtctgattgccttcaacgacaaaggcgtgctgatccacgcgatgggcaaagagtctgcggcacgtatcaccctgcgtaccgtcgagtcgctggaaaaactggcggccactattccgccgatggcgtacgacatcagtaactacgccacgctgggactgctctccagtctgctggatatcagtaatccagatgctccttcggcaaacgatctgacgttggtgacggccactctgcaacaggccatcagcgatgctcgtcaggagccgacgctgaaaaaccgtctgggtgctgacaatcgtcgtagttctgctcttgtacgcgaacgcatgcgggcgagctggtaa

SEQ ID NO: 72694 - DNA, 834 bp, Citrobacter koseri
atgcgtgatgaccgcagttttatcgaattaaaagcgcgtcagcgcgcccatgcgctgctggatgaaggcagctaccgcgaactgctcgacccgtttgaaggtgtgatgtcgccgtggctgggtgcgcagggcatcgtgccgcaggccgatgacggcatggtcgtggcgaaaggcactattaacggcaaaccggcggtggttgtggcgattgagggcgcattccagggcggcagcatgggcgaagtgtccggcgctaaaatggcggcggcgctggagctggcggcagaagataaccgtaacggcattccgacgcaggcggtgttgagcctggaaaccggcggtgtgcgtttgcaggaagccaacctcggcctggcggcgattgccgacatccacgcggcgattgttgacctgcgtcgttataccccggtggtcggcattgtggcggggactgtcggctgcttcggcgggatgtctatcgccgctgcgctgtgtagctatctgattgtcacccgcgaagcgcgtctgggtctgaacggcccgcaggttatcgaacaggaagccgggattgaagagtatgactcccgtgaccgcccgtttatctggagcatgaccggtggcgaagtgcgctatcaaagcgggctggtggatgcgctggttggcgatggcgtcaacgcggtgaaagcggcgatgaacgatgcgctggcgaaaggcgttccggcaaaacaccgcaccgataactacgacgattatctgaaccgtctgagccatttcgacacccgcaaacaggccgattcagaacagattaacgcgctctttgcccgggaggtgaaatga

SEQ ID NO: 72695 - DNA, 300 bp, Citrobacter koseri
atggaaaaaatcacattgaccgtgccagccagccgcgcgttacgcggcagggcgctggcaggggttgtcggctccggggatatggaggtgttattcaccgccgaccagggccagacgttaaccattgatatcaccacttccgtcgataacagccgcagccgctgggaagcgctgtttacccgtctgcaaacggtcagcagcctgccggcaggcaaactgaccatccacgacttcggcgcgacgccgggcgtagcgcgcattcgtatcgaacaggtatttgaagaggtgagctatgcgtga

SEQ ID NO: 72696 - DNA, 858 bp, Citrobacter koseri
atgaaacttctgccccggattcaggttgaaggcggtgccgaatggctggcgcgaaccgccacgcagtgtctgatcgacgaagcacgattaagcccgaagcccggtctggtggacagtcgggggaacggcgcgcaccacgatttatcgcttgcgctgatggagcgctcggcgcacagcctgacctccacgtttcaggcgctggcgcaacaaagctggcggcgtccggctgatattgcgctcagacaaaccatagggcgactcggtcgcgaaggcgagcagcagatgatggcggcaacgggcggcgtgaacacccaccgtggcgcgatttgggcactggggctgttggtaagcgccgtggcgatgcacggcggcgcgggtagggcgcagcaggtgacggcaaccgccgctgaactggcaaaactgccggatgacgccgcgccgaaagtcttcagtaaagggctgcgcgccacccatcgttatcgcgtaccgggcgccagagaagaggcgcagcaggcgtttccacacattatgcagcgtgcgctgccgcagcttcggctaagtcgacagaacggcagcagtgaaatgcacgcccggctggatgcgctgatggccatcatgacctcgctgaccgacacctgcgtgctttctcgcgccgggatggaggggctggatgccatgcagcacggcgcgcgcgccgttctccatgcgggcggcagcgcgcacccggcaggggcgcaggcgctggcccgtttagaccgtcagatgctggcgctgaacgcctcgccgggcggcgcggcggacttgctcgccgccaccctgtttcttgatcgcgtcgaaacgtcttattcaaagcattaa

SEQ ID NO: 72697 - DNA, 1656 bp, Citrobacter koseri
atgttatctgggcaaacgccagcacgagtctggaacacgcgccgcaccgagaagcagcggcgtctggcttccgttccggtgcagggcaaggtgctgccaaccgcagacctgaccgcaatgctggaaaaactgatcgcgccgggtgaccgcgtggtattagaagggaataaccagaagcaggcagatttcctgtcccgcatgctggcggaggtcaacccgcagatagtgcatgacctgcatatgatcatgccaagcgttgggcgcagcgaacatctcgatatcttcgaaaagggtatcgcccgcaagctggacttctctttttccggcacccaaagtctgcgcatctcgcaactgctggaagatggcctgctggaaattggcgccatccacacctacatcgagctttactcccgtctttacgtcgacctggcgccaaacgtggcgctgattgccggttacaaagctgaccgcaaaggcaacctctacaccgggccgagtaccgaagataccccggcgctggtggaagccgccgcattccacgatggcatcgttatcgcacaggtgaatgagctggtggacgacgagtgcgacttgccgcgcgtcgatattccgggctcgtggatcgactacgtggtggttgccgacaaaccgttctttatcgaaccgctgttcactcgcgacccgcgcctgatcaaacaggaacatatcctgatggcgatgatggccattaaaggcatctacgcagagcatcaggtgcagtcgctgaaccacggtatcggcttcaacaccgccgctattgaactgctgctgccgacctggggcgagcaactcggtctgcgcggcaaaatctgtaaacactggacgctgaacccgcatccgacgctgatcccggcgattgaaagcggctgggtggaaagcgtgcactgcttcggcggcgagctggggatggaggagtacatccgcgcccgtcctgacgtgttctttaccggcgccgacggatccatgcgttctaaccgcgccttctgtcagctggcgggtcagtacgcggtcgatatgtttatcggctccacgttgcaggttgatggcctggctaactcctcaacggtgactcgtggtcgtctgtccggctttggcggcgcgccaaatatgggccacgacccgcacggtcgccgtcacgctaccccggcctggctgaacatgatcaccgaacctgaccccatgcagcgcggtaaaaagctggtggtgcagatggtggaaactttccaggcaggcgtgaaaccgaccttcgtggaaaaactggacgcggttgacgtggcgaaagcctccggtatgccactggcgccggtgatgatctacggcgacgacgtgacccacgttctgaccgaagaaggtatcgcttatctctaccgggcggaaagtctggaagagcgtcgcgcgatggttgcggcggtggccggtattaccgacatcggtctgggcgtagacgcccggcgcgtcgccgaactgcgtcagagcggcaaggtggtttacccggaagatatgggcattcgtcgtaccgacgccacccgttctctgctggcggccggcagcgttgccgacctggtggaatggtccggggggctctacaacccacctgcgaaatttcggagctggtaa

SEQ ID NO: 72698 - DNA, 960 bp, Citrobacter koseri
atgcgcggtatccgcaaccgccacctgcaaaccatgctgccgcgactcatccgccgcaaggtgaagttcgatgcgcactggcaacgtctggaattaccggacggcgattttatcgatctggcctggagtgaagatccacagcacgcgaagcacaaaccgcgtctggtggtttttcacggcctggaaggcagcctgaacagcccgtacgctcacgggctgattgaagcggcgcaaaagcgcggctggctgggcgtggtcatgcactttcgcggctgtagcggtgaaccgaaccggctgaaccgcatttatcactccggcgaaacggaagacggcacctggtttttacactggctacagcgcgagtttggcgccgtccccaccgccgccgtcggctattcgctcggcggaaatatgctggcgtgtctgctggcgaaagaaggccgcgagatcccaattgacgcggcggtcatcgtttccgcccccttcgtgctggaagcgtgcagctatcatatggaaaaagggttttcccgcgtttatcagcgctatctgctcaatctgctgaaggccaacgccgcgcgcaagctggcggcataccccggcacactgccgattaatctggcgcagctcaaatccgtgcgccggctccgtgaatttgacgatctgatcaccgcgaaaattcacggctttgccgacgcgatagactattatcgtcaatgtagcgccatgccgatgctcaaccagatcgccaaaccgacgctcatcatccacgcgaaagacgatccgtttatggatcatcatgtgatcccgaaaccagaaaatctgccgccgctggtggagtatcagctcaccgagcatggcgggcatgttggatttatcggcgggacgctgcgtcgcccggaaatgtggctggagtcgcggattcccgactggctgacaacgtatctggaggcgtcatcatga

SEQ ID NO: 72699 - DNA, 219 bp, Citrobacter koseri
atgatgatcccctggcaagagctgtcttctgagacgctggacaatttgatcgaaagctttgtgttgcgtgaaggcaccgattatggtgaacatgaacgttcgcttgagcaaaaggtcgccgacgtcaaacgacagctacagtgcggagaggctgttctggtgtggtctgaactgcacgagacggtcaatattatgccgcgtggacagtttcgcgaataa

SEQ ID NO: 72700 - DNA, 870 bp, Citrobacter koseri
atgtctgccaaacatccggtgattgcggtaacagggtccagcggcgcggggaccacgaccaccagcctcgcgtttcgaaaaattttcgcgcagttaaatctgcgcgcagccgaggtggaaggcgacagttttcatcgttacacacgccccgaaatggacatggcgatccgcaaagcgcgcgacgccgggcggcatatcagctatttcggccctgaagccaacgacttcagtctgctggaacaaacttttattgaatacggacagacgggcaaaggccaggcgcgtaagtatcttcatacctacgatgaggccgtgccgtggaatcaggtgccggggacgtttaccccgtggcagccgctgccggaacccaccgatgtgctgttttacgaagggctgcacggcggcgtggtaacgccgcagcatgatgtcgcgcgtcatgtcgatctgctggtcggcgtggtgccgatcgtcaacctggagtggattcaaaagctgattcgcgataccagcgagcgcggccactcccgcgaggcggtgatggattccgttgtccgctcaatggatgactacattaatttcattacgccgcagttttcccgcacccacattaacttccagcgcgtacccaccgttgacacctccaatcccttcgccgcgaaaggcattccttcgctggacgaaagttttgtggtcattcatttcagaaatctggaagggattgatttcccgtggctgctggcgatgttgcaggggtcgtttatttcccatatcaatacgctcgtggtgccgggcggcaaaatggggctggcgatggagctgatcatgttgccgctggttcagcgactgatggaagggaagaagatcgaataa

SEQ ID NO: 72701 - DNA, 405 bp, Citrobacter koseri
atgcaagcgcgtgtaaagtgggttgaagggttaacctttctgggagagtctgcctccggccaccaggttttaatggatggcaactccggtgataaagcgccaagcccgatggaaatggtactaatggccgcaggcggttgtagcgcaatcgacgtggtttctattttgcagaaagggcgtcaggatgtgacgaattgcgaagtgaagctgacgtccgaacgccgtgaagaagcgccgcgcctgtttacgcatatcaatctgcatttcattgtgaccggcaatgatctgaaagacgcggcggttgcgcgggcggtcgatctttcggctgagaagtattgctcagtggcgctaatgctggaaaaagcggtgaatattacccattcatatgaagtgattgcggcgtga

SEQ ID NO: 72702 - DNA, 633 bp, Citrobacter koseri
atggtgcttggcaaaccgcaaacagacccgactctcgaatggttcttgtctcattgccacattcataagtacccatcgaagagcacgctgattcaccagggtgaaaaagcggaaacgttgtactacatcgttaaaggctcagtggcagtgttgatcaaagatgaagaagggaaagaaatgatcctttcttatctgaatcagggcgattttattggcgaactgggcctgtttgaagagggtcaggaacgcagtgcctgggtacgtgccaaaacggcctgtgaagtcgctgaaatttcttacaagaaattccgtcagttgatccaggtaaacccggatattctgatgcgcctgtcttcccagatggctcgccgtctgcaagtgacatctgagaaagtcggtaacctcgccttcctcgacgtaacgggccgtatcgctcagaccctgctgaacctggcgaaacaacctgacgcgatgactcacccggatggcatgcagatcaaaatcacccgtcaggagatcggccagatcgttggctgctcccgtgaaaccgtggggcgtattctgaaaatgctcgaagatcagaatctgatctccgctcacggtaagaccatcgtcgtctacggcacacgttaa

SEQ ID NO: 72703 - DNA, 2088 bp, Citrobacter koseri
atgtggcgaagactgatttaccatcctgagatcaactacgcactacggcaaacgctggtgctgtgcctgcctgtggctatcggcctgatcatcggccagttgcacctgggactgctgttctcgctcgttcccgcctgctgcaacattgccggtcttgataccccgcataaacgctttttcaaacgcttaatcatcggcggatcgctgtttgccggatgcagcctgattacgcaactgctgctggcgcgcgacatccccctgccgctgatcctcaccgggctgacgctgctgctcggcgtcacggcggaaatcagcccgctgcatgcaaggctgctgcccgcttcactgatcgccgccattttcacgctaagcctggcggggaacatgccggtctgggagccgctgctcatctacgcgctcggcacgctatggtatgggctgtttaactggttctggttctggctgtggcgcgaacagccgctgcgcgagtcgctcagcctgctgtatcgcgagctggccgactattgcgaggccaaatacagcctgctcacgcagcatatcgatccagaaaaagcgctgccgcctctgctggtgcgccagcagaaagcggtagatctcattacccagtgttaccagcagatgcacatgctgtcggcccagcacaataatgactacaagcgcctgctgcgcgccttccaggaagcgctggacttacaggagcatatctccgttagtttgcatcagccggaggaggttcagaagctggtggagcgcagccacgcggaacaggttattcgctggaatgcgcaaaccgtcgctgcccgcctgcgcatcatcgcggatgacatcctgtatcaccgtctgcccagccgtttttcgatggagaagcagactggcgcgctggaaaaaatcgccaatcagcacccggaaaaccctgtcgggcagttttgctactggcactttagccgtattgcccgcgtattacgcactcagcgtccgctgtacgcacgcgacctgatggctgataaacagcgtcgcctgccgctgctgcccgcgctgaaaagctatttatcgtttaaatcgcccgcgctgcgcaacgccgggcgaatcagcgtcatgttaagtatcgccagtctgatgggcagcgccttacatctgcccaagccgtactggattctgatgaccatcctgttcgtcacgcaaaacggctacggcgcgacgcgcgtacgcattctgcaccgttcggcgggtacgctggccggtctggtggtggcgggcgtcacgttgcactttcgcattcctgaaggctacacgctggcattaatgctgatcattacgctggtgagctatctgaccattcgcaaaaactacggctgggcgacggttggctttacggtgacggcggtctataccctgcaactgctgacgctcaacggcgaacagttcatcgtgccgcgatttattgatacggtcattggttgcctgattgcttttggcgggatggtctggctctggccgcagtggcaaagcggccttttgcgtaagaatgcccacgacgcgctggaagcggaccaggaggccattcggctgatcctcagcaacgacccgcagccaacgccgctggcgtaccagcgaatgcgggtgaaccaggcgcacaatacgctgtttaactcgctgaatcaggcgatgcaggaaccggggtttaacacgcactatctggaagatatgaaactgtgggtaacgcacagtcagtttatcgttgagcacgtcaacgccatgaccacgctggcgcgcgagcatacgatgctgacgccggatctggcgcagcgctacctggaatcctgcgaaattgcgctccagcgctgtcagcagcggctggagtatgacgcgccgggcggttccggggatgtgaatattctggagtcatcggagatgctctcccacgggccgctcagtacgctggaacagcatctgcaacgcgtgctggggcacctgaataccatgcacaccatttcgtcagtggcatggcgccagcgcccgcatcacggcatctggcttagtcgccggttacgggatatgaagggttga

SEQ ID NO: 72704 - DNA, 1218 bp, Citrobacter koseri
atggcaactgaacaaactgcaattacgcgcgcgactttcgatgaagttatcctgccgatttatgcaccggcagagtttattccggtaaaaggcaagggcagccgggtctgggatcagcagggtaaagagtacgttgatttcgcgggtgggattgcagttaccgccttagggcattgccatccggcgctggtggaggcgctgaaaacgcagggtgaaacgctgtggcacaccagcaacgtttttactaacgaacctgcgctgcgtctggggcgtaagcttatcgacgcgacctttgccgagcgcgtgctgtttatgaactccggcaccgaagccaacgaaaccgccttcaaactggcgcgccactatgcctgcgtgcgtcatagcccgtttaaaaccaaaatcatcgccttccataacgcttttcatggccgctcgctgtttaccgtttccgttggtggtcagccgaagtattccgacggatttggccctaaaccggcggatatcatccatgttcctttcaacgatctgcacgcagtgaaagcggtgatggatgaccatacctgcgcggtggtggtggagccgatccagggagaaggcggcgtcaccgccgcaacgccagcgtttctgcaaggcctgcgcgagctgtgcgatcggcatcaggcgctgctggtgtttgatgaagttcagtgtggtatggggcgcaccggcgatctgttcgcctatatgcactacggcgtgacgccggatattcttaccagtgcgaaagcgctgggcggcggcttcccggtcagcgctatgctgaccacgcaggagattgcgtccgcgttccacgttgggtcgcacggttccacctacggcggcaacccgttggcctgcgccgttgccggggccgcgttcgatatcatcaatacgtctgacgtgctgagcggcgttcagactaaacgcgagcggtttgttcagcatttgcagaagattgacgagcagtatgacattttcagcgatattcgcggcatggggctgttgattggcgcggaactgaagccgcagtacaaaggccgggcgcgggatttcctttacgctggcgcgcatgaaggcgttatggtgctgaatgccgggccggatgtcatgcgctttgccccgtcgctggtggtggaagaggcggatattgacgaagggatgcagcgttttgcgcaggcggtggcgaaagtggctggctga

SEQ ID NO: 72705 - DNA, 564 bp, Citrobacter koseri
atgattctgctgatcgacaactatgattcgtttacctggaacctgtatcagtatttctgcgaactgggcgctgatgtcctggtcaggcgaaatgacgcgttgacgctggcgcaaattgacgcgctgaatccgcaaaaaatcgtgatctcgccggggccctgtacgccggatgacgcgggtatctccctggcggtaatccgccattatgccgggcgccttcccatgctcggcgtctgtcttggacaccaggcgatggcgcaggcctttggtgcgacgatcgtgcgggcggctaaagtgatgcacggtaaaacctcccccgtcacccatagcggccagggcgtttttcaggggctatcgaacccgctcaccgtcacgcgctatcactcgctggtgatcgatcctgcgacgcttcccgcctgctttgacgttacggcctggagtgacacgcaggaaattatggggattcgccaccgggagtgggacgtggaaggggtgcagttccacccggaaagtattctgagcgagcagggacatcaactgctggctaatttcctgtcgcgctga

SEQ ID NO: 72706 - DNA, 603 bp, Citrobacter koseri
atgagcgataagtttggtgatggacgcgacccctatctgtatcccggcctgaatatcatgcgtaaccgcttaggcatccggcaggttcagcgtctggagcaggcggcgtatgaactgaccgcactgcgtgccgcgacgattgaacctggccccctggtgcgcggactgcctcaccttcgcgccattcatcgtcagctgtatcaggatgtttttgactgggccggacaactgcgcgaggtcgatatatatcagggagatacccgtttttgccattttgcctacatcgaaaaagagggcaacgccctgatgcaggatctggaagaagaggggtatctggtcgggctgacgaaagagaaattcgccgatcgtctggcgcactactactgtgaaattaacgtgctgcatccttttcgtatcggcagcggactggcgcagcgcatcttctttgagcaactggcgctccacgccggttatatcctgagctggagcggcattcaggtggccgaatggagccaggcgaaccagagcggcgcgatgggcgacctgtcgggattacaggcaatatttcgtaaaggggtaagcgaagcccaggaaactgagtag

SEQ ID NO: 72707 - DNA, 168 bp, Citrobacter koseri
gtgaaaaaactcaccgataaacaaaagtctcgcctctgggaacaacgacgaaatatcaatttccaggagagtcgacgtctggaaggggtggacatcccgttagttaccctgaccgccgaagaagcactggtgcgcctggcagaattaaggaggcactatgagcgataa

SEQ ID NO: 72708 - DNA, 573 bp, Citrobacter koseri
atgctcaaatcgactctggcggctgttgcagctgttctcgctctttctgctctctctcctgtagcgttggcagcgaaaggtgacccacatgttctgctgacgacctccgccggaaatattgaactggaactgaatagccagaaagcgccagtttcagtgcaaaactttgtcgattatgtcaacagcggtttctataacaacaccacgttccaccgtgtgatccccggctttatggtgcagggcggcggttttaacgagcagatgcagcaaaagaaacctaacccgccgatcaaaaacgaagcggacaacgggctgcgcaacacccgtggcaccattgcgatggcgcgtaccgcagataaagacagcgcaaccagccagttctttatcaacgttgccgacaacgccttcctggatcacggccagcgcgattttggctacgccgtatttggtaaagttgtgaaagggatggatgtcgctgacaaaatctcccaggtgcagacacatgatgtcggcccttaccaaaatgttccttcaaaaccgatagttatcctttccgccaaagtcctgccgtaa

SEQ ID NO: 72709 - DNA, 1182 bp, Citrobacter koseri
atgactaacagcaatcgcatcaagctcacatggattagctttctctcctacgccctgacaggcgcgttggtaattgtcaccgggatggtgatgggaaacattgcagagtatttcaacctgcccgtttccagtatgagtaacacattcacctttcttaacgccggtatcctgatctctattttcctgaatgcctggctgatggaaattatcccgctgaaaacgcagctgcgttttggctttgtgttgatggtgctggccgtggccgggctgatgctcagccatagcctggcgcttttctctgcggcaatgtttgtactgggtctggtgagcggtatcaccatgtcgatcggtactttcctgatcacccagatgtatgaaggccgtcagcgtggttctcgcctgctgttcaccgactccttcttcagtatggccgggatgatcttcccgatggtcgccgcttacctgctggcgcgcagcattgagtggtactgggtatacgcctgcatcggtctggtctacgtggcgattttcatcctgaccttcggctgcgaatttccggcgctgggtaaacacgcgccgaaaacggaaacgccggtggtaaaagagaaatggggcattggcgttctgttcctgtctatcgccgcgctgtgctacatcctcggtcagttaggtttcatctcctgggtgccggaatacgccaaaggtctgggcatgagcctgaacgacgccggtacgctggtcagcgatttctggatgtcgtacatgttcggcatgtgggccttcagcttcattctgcgcttctttgatctgcaacgtatcctgacggtactggcgggtctggcggcggtgctgatgtacctgttcattaaggcccagccggagcatatggcgtggtttattctgacgctcggcttcttctccagcgccatttacacctcaatcattacgctgggttcgcagcaaaccaaagtgccgtcgccgaagctggttaactttgtgctgacctgcggcaccattggcaccatgctgaccttcgtggtgacaggcccgatcgtggcgcacagcggcccgcaggccgcgttgctcaccgcaaacggtctgtatgccgtggtgtttgtgatgtgctttatcctcgggtttgttacccgtcatcgccagcataacgtgccagcagcgcactga

SEQ ID NO: 72710 - DNA, 2544 bp, Citrobacter koseri
atgagcaaagtcagactcgctattatcggtaatggtatggtcggccatcgctttattgaggaccttcttgataaatccgacgctgccaattttgacattaccgtgttctgtgaagaaccccgcaaagcatacgaccgtgtccacctgtcttcctacttctcccaccacaccgctgaagagctgtctctggtgcgtgaaggcttttatgagaagcacggcgttaacgttctggtcggcgaacgcgctattacgatcaaccgtcaggagaaggtcatccactccagcgcgggtcgtacggtttattacgataaactgatcatggcgaccggttcctacccgtggatcccgccaattaaaggttccgaaacccaggactgctttgtttaccgtaccattgaagatctcaacgccattgaagcctgcgcccgtcgcagcaaacgcggcgcggtggtcggcggcggcctgctgggtctggaagccgctggcgcgctgaaaaacttaggcgtcgaaacccacgttatcgaatttgcccccatgctgatggcagaacagctggatcagatgggcggcgagcagctacgccgtaaaatcgaaagcatgggcgtgcgcgtacacaccagcaaaaacaccaaagagatcgttcaggaaggcaccgaagcgcgtaaaaccatgcgttttgccgacggtagcgagctggaagtcgacttcatcgttttctctaccggtatccgcccgcgtgacaaactggccacccagtgcggcctggacgtcgctcagcgcggtggtatcgtgattaacgacgcctgccagacgtctgacccggatatctacgcgattggcgaatgcgccagctggaacaaccgcgtgtacggtctggtcgcgcctggctacaaaatggcgcaggttgccgttgaccacatcctcaaaaccgaaaacgtgtttgaaggcgcagacctcagcgccaagctgaaactgctgggcgtggatgtcggcggcattggcgatgcgcatggccgcacgccgggcgcgcgtagctacgtttacctcgacgaaagcaaagaggtctacaaacgcctcatcgtcagcgaagacaacaaaaccctgctcggcgcggtgctggtgggcgataccagcgattacggcaacctgctgcaactggtgctgaacgcgattgaactgccggaaaacccggactcgctgatcctgccggcacattctggcagcggtaagccttccattggcgttgataaactgccggacagcgcgcaaatctgttcctgctttgacgtcaccaaagggatgctggtcgccgccatcaacaaaggctgccacaccgttgcggcgctgaaagcggaaaccaaagccggtactggctgcggcggctgtattccgctggttactcaggttctgaacgccgaactggcgaaacagggtattgaagtgaacaacaacctgtgtgagcactttgcgtactcgcgtcaggaactgttccacctcatccgcgtggaaggcattaaaacctttgaagaactgctggcgaaacacggtaaaggctacggctgcgaagtgtgtaaaccgaccgtcggttctctgctggcctcctgctggaacgaatacattctgaagccacagcacaccccgctacaggataccaacgacaacttcctggcgaacatccagaaagacggcacctactccgtgatcccgcgttctgcgggcggcgaaatcacgccggaaggtctggtggccgtaggtcgcatcgcgcgtgagtttaacctgtacaccaaaattaccggttctcagcgtatcggtctgttcggcgcgcagaaagacgatctgccagaaatctggcgtcagctgattgaagcgggcttcgaaaccggtcacgcgtatgccaaagcgctgcgtatggcgaaaacctgcgtgggcagcacctggtgccgctacggcgtgggcgatagcgtcggcttcggcgtcgaactggaaaaccgctacaaaggcatccgtaccccgcacaaaatgaaatttggcgtctccggctgtacccgtgaatgtgcggaagcccagggtaaagacgtggggattatcgccacggaaaaaggctggaacctgtacgtctgcggtaacggcgggatgaaaccacgtcatgcagacctgctggcggcggatatcgaccgcgaaacgctggttaaatacctcgaccgcttcatgatgttctacatccgtaccgccgacaaactgacccgtaccgcaccgtggttagataacctggaaggcggtatcgactacctgaagtcggtcatcatcgacgacaaactgggcctgaacgcgcatctggaagaagagatgacccgcctgcgtgaagcggtggtgtgcgagtggacggagaccgtgaatacaccgtctgcgcaggttcgtttcagacactttatcaacagcgataagcgcgacccgaatgttcaggtggtgcctgagcgtgaacagcatcgtccggcaacgccgtacgagcgcattccggtaactctggtggaggaaaacgcatga

SEQ ID NO: 72711 - DNA, 327 bp, Citrobacter koseri
atgagccagtggaaaaacatctgcaaaatcgatgacattctgccggaaaccggcgtctgcgcgctgttaggcgaaaagcaggtcgccattttccgtccatatcacagcgaccaggtgttcgcgatcagcaatatcgacccgttttttgagtccagcgtgctgtcgcgcgggttgattgccgagcatcagggcgaactgtgggttgccagcccgctgaaaaaacagcgtttccgtctgagcgacggtctgtgcatggaagatgaaagccattccgtcgcgcactacgaagctcgcgtgaaagacggcgtggtgcaactgcgcggttga

SEQ ID NO: 72712 - DNA, 195 bp, Citrobacter koseri
atgaatttggggaggcgcaacgcctccctttttgacgtctttgtaggcctgatttgtaggcctgataagcgcagcgccatcaggcaaaacataccgccggatggcggcataaatgccttatccggcctacggttttacgatttttattgtttttacttcaaggacaatcaaatggttacaggcccgattttgtag

SEQ ID NO: 72713 - DNA, 810 bp, Citrobacter koseri
atgtttacagacactattaacaagtgtgcggctaacgctgcgcgcattgcacgcctgtcggcaaataatccactcggtttctgggtgagttccgcaatggccggcgcctacgtcggtctcggcatcattcttatttttaccctcggcaatctgcttgacccttccgttcgcccgctggtgatgggcgctaccttcggcatcgccttaacgctggtgatcatcgccggttctgaactctttaccggtcataccatgttcctgacgctcggcgtaaaagcgggcaccatcagccacggtcagatgtgggcgattctgccgcaaacctggttgggcaacctggtgggctccgtgttcgtcgcgctgctgtatagctggggcggcggcagtctgctgccggtcgataccagcatcgttcacacggttgcgctggcgaaaaccaccgcgcccgccacggtactgttctttaaaggcgcgctgtgcaactggctggtttgcctggcgatctggatggcgattcgtaccgaaggcgcggcgaaattcctcgctatctggtggtgtctgctggcgttcatcgcgtccggctacgagcactccgtcgccaacatgacgctgttcgccctctcctggttcggccatcacggcgacgcctacacgctggcgggaattggtcataacctgctgtgggtgactctcggcaatactttgtccggtgtcgtattcatgggattaggttattggtatgctacgccaaaagcggagcgtccggctccggcaaaaatcaatcaaactgaagctactgccaataattaa

SEQ ID NO: 72714 - DNA, 1374 bp, Citrobacter koseri
gtggaccatttgcctatattttgtcaattacgcgatcgtgactgtctgctcgtcggcggtggcgatgtcgcagaacgcaaagcgcggttactgctggaagcaggcgctcgattaacggtcaacgcgctggcgtttattccgcagttcaccgtgtgggcaaatgaaggcatgttgacgttagttgaaggggcattcgaagaatccctgctcgacgagtgctggctggcgatcgccgcgaccgatgatgacgccgtgaaccagcaggtgagcgaagccgctgaatcacgccgcattttctgcaacgtggtcgatgcgccaaaagccgccagtttcatcatgccctccattatcgaccgctcgccgctgatggtggcggtctcctccggcggcacctcgcccgttctcgcacgcttgctgcgcgagaaactggagtccttgctgccccagcacctcggccaggttgcgcattacgccggccagctccgcgcgcgggtgaaaaagcagttcgccacaatgggcgagcgccgtcgcttctgggaaaaactgttcatcaacgacaggctcgcgcagtcgctggcgaatgccgatgcgaaagcggtgtcggagatcaccgagcagatgcttagcgaaccgctggatcaccgtggtgaagtggtgctggtgggcgcgggccctggcgacgccgggctgctgacgctgaaagggttacaacagatccaacaggcggatgtggtggtgtatgaccgtctggtctccgacgacattatgaatctggtacgccgcgacgctgaccgcgtgttcgttggcaaacgcgcgggctatcactgcgttccgcaggaagagattaaccagatcctgctgcgagaagcgcagaaaggcagacgcgtggtgcgtctgaaaggcggcgatccgtttatcttcggtcgcggcggcgaagagctggaaacgctgtgccacgccggtattccgttctcggttgttcccggtattaccgcggcctccgggtgctcggcttattccggcgttccgctgactcaccgcgactacgcgcaaagcgtgcgtctggtcaccgggcacctgaaaacgggcggcgagctggactgggaaaacctggcggcagagaaacaaacgctggtgttctatatggggctgaatcaggcggcaaccattcaggagaagctgatcgcgtttggtatgcaggccgatatgcctgtggcgctggtcgaaaacggtactgccgtcaagcagcgcgtggtcagcggcgttcttgcgcaattaggcgagctggcgaaacaggtcgaaagcccggcgctgattattgtcggtcgggtggtcgcgttacgcgataagctaaactggttctcaaaccattaa

SEQ ID NO: 72715 - DNA, 5529 bp, Citrobacter koseri
atgtttatgcaaaggaaaaaactccttgcagtgggtattgcgattgcactgcaaacatattactgcccggcaattgcggcagagaatacagaagatgagaaagaatgtccggtaaatatttcgtcgttatctcaggcggaacgcaataagttaccggcgaaatgtctgacggcagaagccgggcaggataaccattgggcatgggtcgccagcggcgtagcggctctggcggcgggcatcgccattggcaatcacagcgacggcgaccaccattcaacaacgccagtcccgccagacgacgggggcgacgttaccccaacgccgccggatgacggcggagatgtcaccccaacgcctcccgatgatggcggcgacgtcacaccgcctgatgatggcggtgatacgccagtaccgcctgacgacacgtccgtgacgaccttcagcaatcaggtaacgctggataaaggcacagacaccctgcacttcgacgacatcaaactggataacggcgagcacctcggcgaagccacgctcagttattccgaacaagacgcgcagtggcagttaaccacccaggacggtaaaacgctggcgatttccggctggaacgttaccgacagcaacgcggccgtgattgaaggcgctcaggccaacggcttttactggaagtacgacagccggggctatctgatcctcgcggataacaatacccaggttgtcaccggagacggcaatacgcacaccaccgatcgcgaactggatatcggcgggaaaaatcgtaccggcgtcattatctcgggcgataacacccgtaatacgctgaacggggattccaccgtgaccaatagcgcagttggcctggtgattagcggcgacggcaccactaacgctatttcaggcaaaagtacggtagatggcgctaccggggcgttaatttccggtaatggcacctcgacctcgctctccggcgatatctccatcagcggcggcggtacgggcatcgttatcgatggtgataacgccctcattgataatgcgggaacctccagcattagcggcgcaggttctaccggttccatcattaacggcaataacattcgcctcatcaacaagggggaattaaacgtttctgacggcggcaccggggccaaaatcaccggtgacgatgctatcgtcgataacaaaggccattcgacaacccgcggtgccggctctacggggttgtacattgagggtgataatgcgctggtaattaatgaaggtaatcagctcatcgccgatggcgcgacgggcgtacgcatcgatggcgacaacgcccgcgtactcaataccggtaatatggccgtcgacggcgctggctcaacgatcgccaccattacgggcaataacgctgacatgacgcagaatggcgacctgctggttatgaatggcgcgacgggcctgaccatcaacggcgaagaaagcgaactcataaacagcggcaccaccaccgtgcgtaacgacggctctgtcggcttcgttgttgccggtacacaaaacaccttcaacaacaaaggtaatatcaacaccagccttaacggtacgggaacgctgatcagcggtactgaatcgcaggtcagtctgacgggcgatattaacgtgactgcggctcaggacagcagcggcgtatttcgtggggcaaccggtcttaacgtttctggcgacacgaatacgacaaccattctgggtaatgtgaacatcgaggctggttacgcgcaagacgctcaaattaaaagcgatgagcagttacaaggcattaccgtcaacggcaatcaaaatacggtcaatctggatggcgcgatgaatatccatcttgacagttctgatgtcagctctgggtattcgagcgttaccggcctcaatatcagcggcagcggtaacgccgtgaatgtcgccggtggtataaacatcgacttttcccaaaacgaagcgtctattggctctgaagctatcggtatcaacattgatggtgacaacacgttaacgctaagcggtaaatctaccgtggatatgaccactatcacaggtggccaggcaacgctggcaaacgttaataatggcggctctctgctcattaccgatgacgccacgattgaagtgaacgccgactatctgaacttaaattactccaccggaagtaatgccctgctgtcagctcatggccagggctcgacgattgaaaatcagggcgatattaccacccacggaacagtcaacgttctccttgccgataagggagcggaagcgagcaacagcggcaatattctcatctacggaagcagtggcgatacgggagatgaccgttctgccatcacccgtgcaaatggcgaagatacggtcgtacacaacaaagcaggggccgatatcaccctcttttctaaccaaacgccagagttcattaacggtatcaatatctacccggaaagatggtatacccacacgctttacgccatgctggcgacccagggcggcagcgtcgttaatgataaaggagcgaccgtccatttacagggcgcgggagcatatggcgtcagtgccagtgtagggacggcgttaaacgaaggcgatatttatctggacggttttatcccgacgctggacgatgaaaacaatatcatcagcacagactactggcagccgacatacctctatttgaccagctcggcaatggttgccggttcctcagacatcggctacggtgacgccactgccatcaacaccggcaccatcaccgtcaacaacgccgggttcggtatgatggcgctcagcggcggcacggccgttaaccagggtactattacgctgaccgctgatgaaggtgtgaccggcgaggaaaaccaactggtggggatggccgcattaaacggcggcaccgtcgtgaacgacaccaccggcaccatcaatattgatgccgactacggtcaggcgttccttagcgacagcaacagctacatcatcaataacggcgccatcaacctgaacggcagcccgatggacgaaaacgacccacatatgggttccatgccaaccgacaaaatctggatacggtcgctgcccggcagcggcgacagcgatagccaaacttcagaagcgggctttttcaccaccggagcgctggcgaattacggcaatgaaacgctgaacggcgatctcgatgttagcggctggctgtacaacgaagcaggcgccacgctgaccgtcaacggcgatatggcgattaataacgctggcaatatggaaaaccacgggacgatgcatgccgatacgatcaccacgtatcacagcctgttcaaccgcgcagacggcagcctgaccactgacctcctgacgcttaatggcgatatcaccctgttcaacgagggcagctttaccggctcaattgcaggaacctcttacgcccaggaagtcgtcaataccggcaatatgacggtggcggaagatggcaaatcgctcatcaacggcagctttgcgttttataaccaggaaggcgcaacgcttaccaacagcggcagcgcggtagaaggcggcgaaaacaccatcatcaacatgacgcgtaccagcagttccatcgctcaggtgaacagcggcaccattaccgccaccaacggttacagcgccatcaccaccgcgaatgccagcaactccccgatgtggatctggaacacggaaaccggcgtgattaatggtattaacccggacgcccccctgatcaacctcagccgtggctatagctttggcaacgaagggaccattaacgtccagggcgacaatgccgtggcgatcagcggcggcaccagcagttatatcatcgacctggtcaacagcggcaccatcaacgtcggcaccgaacaggggcaaatagacggaaccaacggcaccggacttatcggcatcaaaggcaacggcaacgccaccaccatcaacaacaccgccgatggcgtgatcaacgtgtacgcgaatgactcttacgcgtttggcggccagagcaaaaccatcatcaataatggcgaagtgaatctgctgtgcgacaccggctgcggcatctacgcccctggcactacgggtacgcaggacgatcacaacggtacggcggatatcgtgatcccggatgcgattgtcgcgccgacgcagggtgatattccagcgcctccggccgatccgaacgcgccgcagatgttaagcaactacattgtgggcaccaatgccgacggcagttccggtacgctgaaagcgaataacctgatgattggcgacgacgtgaaggtgaataccggctttaccgcaggtacggcagagaccaccgtcgtggtcgataacgcctttaccggcagtaatatccagggcgcggacaatatcacctccaccagcgtggtgtggaacgcccagggcagcaccgacggcgacggtaacgttgacatcaccatgaccaaaaacgcctatgcggatgtggcgacggagagttccgtcagcgacgtcgcacaggcgctggacgccgggtataccaacaatgagctgtacaacagcctgaacgttggcacgaccgcagagctgaacaacgccctgaaacaggtcagcggcagccaggcgaacaccgtcttccgcgaagcccgcgtactcagcaatcgctttacgatgctggcggacgccgcgccgcaggtgaaagacggtctggcgttcaacgtgatggcgaaaggcgatccgcgtgccgaactgggtaacgacacccagtacgacatgctggcgctgcgccagacgctggatctgaccgccagccagaacctgacgctggaatacggtattgcgcgtctggacggcgacggttcgcagaaagcgggcgacaacggcgtgaccggcggctacagccagttcttcggcctgaagcacagcatgacctttaatgagggtctggcctggaacaacagcctgcgttatgacgtgcataacctcgacagcagccgctctgtcgcctatggcgatgtcaataaaatggcggattctgacgcccgtcagcagtacatagagttccgcagcgaaggggcaaaaacctttaacctgatggacgatgcgctgaaaatcacgccgtatgcgggcgttaagctgcgtcacacaatggaagaaggttacaaagagcgcagcgccggggacttcaacctgtcgatgaacagcggcagcgaaacggccgtagattccgtgcttggcctgaaaatggactacgccggggaaaacggctggagcgcaagcgccacgctggaaggcggcccgaacctgagctacacgaaaagccagcgtagcgccacgctggcgggtgcaagcgaccagcgctttagcgttgacgacggccagaaaggcggcggtctgaacggtctggcaacgatgggcgtgaagtacagcgcccaggacagcagcctgcatcttgacgcttatcagtggaaagaggatggcatcagcgataaaggctttatgctgaactttaagaaaacattccgttaa

SEQ ID NO: 72716 - DNA, 171 bp, Citrobacter koseri
atgtttaaaattgcaaagattgccgttgtggcagggatgctggctacgctcaccgcgtgtacgggtcatatcgaaaacaaaaagaatgattgcagttacgattatttacttcacccggcaatttctatttcaaaaattattggtggttgcggcccggctgcggatcaataa

SEQ ID NO: 72717 - DNA, 1104 bp, Citrobacter koseri
atgaaaaccttccccctgcaaagcctgacgctcgccgaggcgcagcagaagcagtttgcgctggtggacacggtgtgtcgttattttccgggcgcggattttttaaagggtggcgatctggggttaagtccggggcttaaccagccgggaaccacccgacaagtggaaaaggtgctggcggaggcgtttcatgctgaggacgcggtgctggtgcagggcgcgggaaccggcgcgattcgggccgggctggctgcgctgctgaaaccggggcaacgccttctggtgcatgatgcgccggtttatcccacaacgcaggggatcgtcgagcagatggggattgtgcttgtcagagcggatttcaacgatctggcgacgatagcgcaggttatcgcagagcatcgtccccatgcggcgctggtgcaacatacgcgtcagcaaccgcaggattgctattctctggccggggtgctggcggagcttgcgcgatgcggcgtccccacgctgaccgacgataattatgcggtgatgaaagtggcgcgtattggctgtgaatgtggggccacgctgtccacgttttcctgttttaaactcttcgggcctgaaggcaccggcgcggtggtgggggaggcggaagccatcgccagaatacgtgcgacgatgtattccggcggcagccagattcagggcgcgcaggcgctggcggtgcttcgtggcctggttttcgcgccagtgatgcacgctgtgcaggcaggggtgacggaacgtttactcgccttgttgaacagcgggaccgtgccggaagtgaagcaggcggtgattgcgaatgcgcaatcgaaagtgttgattgtggagtttcaccagcccgttgccgaaaaggtgttggaggaggcgcaaaagcgcggggcgttgccttacccggtaggcgcggagtccaaatatgaaatcccgccattgttttatcgcctttccggtacgtttcgtgcggcccgtccgggtctggcgcgttatgcgattcgtattaatcccaaccgcagcggcgaagaaacggtgttacgtattttgcgggaaagcctgatggcgctgcgcttatcaggcctacaatga

SEQ ID NO: 72718 - DNA, 1305 bp, Citrobacter koseri
atggagctgtatattcagattctggtggtggcctgcctgacggggatgacgtcgctactggcgcatcgctcagccgccgttttccatgacgggattcgcccgatcttaccgcagctgatcgaaggctatatgaaccgccgggaggcggggagtatcgcgtttggtttgagtatcggttttgtggcgtcggtggggatctcatttaccctcaaaacggggctgcttaacgcctggctgctgtttttacctaccgatattcttggcgtactggcgatcaatagcctgttggcgtttgggcttggcgccgcctggggcgtgctgattctgacctgtctgctgccggtgaaccatctgcttaccgccttgccggttgacgtgctggggagccttggcgagttgagttccccggttgtcgccggttttgcgctgttcccgctggtggcgattttttatcaattcggctggaagcacagtcttatcgctgcggttgtggtgctgatggcgcgtgtcctggtggtgcgctacttcccgcacctgaacccggaatcgattgagatttttatcggcatggtgatgctgctggcgattgcgattacgcacgacctgcgccaccgtggcgatgaggagatggataccagtgggttatccgtctttgaggagcgcacctcccgcattattaaaaacttaccgtatatcgcaatcgtcggcgcgttgattgcggcggtcgccagtatgaatatttttgccggcagcgaggtgtcgatctttacccttgagaaagcctattctgctggcgttacgcctgaagagtcgcagaccttgcttcatcaggcggcgctggcggagttcatgcgcgggcttggcttcgtgccgatgatcgccacaacggcgctggcgacgggcgtgtatgcggtggccggttttacttttgtgtattccgtgggctatctggcgccgaatccgtggattgccgccatcctgggggcggtcgtgatttctgcggaagtgctgctgttgcgctcgattgggaagtggcttggacgctacccgtcggtgcgcaatgcgtcggacaatatccgtaacgcgatgaatatgctgatggaaaccgcgctactgatcggctctatttttgcggcgatcaagatggcgggttataccggcttctcgattgcgattgctatctacttcctcaacgagtcgctggggcgcccggtgcagaagatggccgcgccggtcgtggccgtgatgattaccggtatcttgttgaatattctctactggttcggtctgtttattccggcctga

SEQ ID NO: 72719 - DNA, 354 bp, Citrobacter koseri
atgaaaaagattggtgttgctggcttacagcgtgagcagattaaaaaaaccatcgagaccgtggcgcccggctgctttgacgtgtccattcacaacgatatggaagcggcgatgaaagtgaagtccgggcaactggattattacatcggcgcgtgtaataccggcgctggcgcggcgttgtcgatagcgattgcggtgattggctacaacaaaagctgcaccatcgctaagccgggtattaaagcgaaagacgagcatatcgcaaagatggtcgcggaagggaaagtggcgtttggcctctccgtcgaacatgttgagcatgcgattcccatgctggttaaccacttgaaataa

SEQ ID NO: 72720 - DNA, 879 bp, Citrobacter koseri
atgaattttgatacgtcaggctacacctgggcccatgagcatctgcacatcgatctctccgggttcaaaaataacctcgactgccggttagatcagtacgatctcatttgtcaggagatgaaagatctgcgggcgttgggcgtgcgcaacatcattgaaatgaccaaccgctatatggggcgcaacccgcaattcatgctcgatttgatgcgggatagcgggataaacgtggtggcctgtacgggttactaccaggacgcatttttccctgagcatgtcgcgacccgcagcgtggaacagcttgcgcaggagatgatcgatgagattgtcatcggtattgataacacgacgctgaaagccggaattattgcggaaatcggctccagtgaaggggtgattacgccgctggaagagaaggtgtttatcgccgctgcgcgcgcccacaatgaaaccggacgccccatttccacccatacctcgttcagtacgatggggctggagcaactggccttgttgcaggcgcagggcgtcgatctctcccgcgtggtgattggtcattgcgatttgaaagataacctcgacggcattttgcagatgatcgatctcggcgcgtacgtgcagttcgacaccatcggcaaaaacaactactacccggatgaaaagcgcatcgacatgctgaatgcgctgcgccagcgcggtttgctcaaccgcgtgatgctttcaatggatattacccgccgctcccatctaaaagccaatggcggcaatggctacgactacctgttaaccacctttatcccacagctgcgccagtcaggattcagtcaggccgatgtggacacgatgttgcgtgataacccctcacaatttttccaataa

SEQ ID NO: 72721 - DNA, 1227 bp, Citrobacter koseri
atggctcgttttgtggtgctggtgattgatagcttcggcgtcggcgcaatgaaggatgtggcggaggttcgcccgcaggatgtcggggcgaatacctgtggacatattctgcgtcagctcccgcagctacatctgccgacgctggagaaactggggctgattaacgcgctgggctatgcgccaggcgttatggctccctcggcgtcggcagtgtgggggatcgcggaattgcagcatgaaggaggggataccttcatggggcatcaggagattttaggcacgcgtccgcaggcgccgctgcgtatgccgtttagcgaggtgattgatcgcgttgagctggcgctgaaggcggcgggctggcaggtagagcgacgtggcggcgaactggcgttcctgtgggtcaatgagtcggtggcgataggcgataacctcgaagcggatttagggcaggtttacaacattaccgccaacctttccgccatcgcctttgacgaggtgctgaagattggccgcattgtgcgtgaacacgcgcaggtggggcgcgtcattgcattcggcggcacgcttcacgacagtcagcggattctggacgccgcagaagcgaaagaggggcgttttattggcatcaatgcgccgcgatccggcgcatatgagagcggttttcaggttgttcatatgggctatggcgtggatgagcgggttcaggtgccgcaaaaactgcatgaggttggcgtgccgaccgtgctgatcggcaaagtggcggatatcgtggcgaaccctcacggacgtagctggcaaaacctggtggacagccagcgcattatggatatcacgcgcgatgaattcagtgccgcccggcacgcgtttatctgcaccaacatccaggaaaccgatctggcggggcacgcccaggatgtcgcacgttatgcggaacgtttgcaggtggttgaccgtaatcttgcgcggctgacaagcgagatgacacccgatgattgtctgctggtgatggccgaccacggcaacgatccaacgataggtcacagtcaccatacccgtgaaagagtgccgattctggtctaccggcaggggctgaagcctgttcagttaggccttcgcgccacgctgtcggatgtgggcgcgacggtttgtgagttctttggcgcgcccgcgccacaaaacggcacctctttcttttcgtcattacagctcacaggagacgccgtatga

SEQ ID NO: 72722 - DNA, 1164 bp, Citrobacter koseri
atgtttatacacgcattgaaacgccagaatccggcgctgattaccgccgcgatccgactctggcagcagggaaggatcgtcccggacagctgggtgattgatgttgatcaggtgctggaaaacgggaagcgcctggttgatacggcccatcaatacggtatcacgctgtatctgatgacaaaacagcttggtcgcaatccctggctggcggaaaagctgctggcgctgggatatgccggaattgtcacggtggattacaaagaggccagggtcatgcgtcgcgccggattgccggtggcgcatcaggggcatttagtgcagatcccctcccggcagattggcgaagcggtggagcaagggacggacgtgattacgctcttttcgctggagaaggcgcgtgaagtgtcggcggcggcggtgaaggccgggcgcgtgcaggcggtaatgctgaagatttacggcgagcaggattttctttatccggggcaggagagcggcttcccgctggcgcgccttgatgacgcggtgaatgacattcgccgtctgccggggctccatgtcacggggttaacgcatttcccctgcctgctgtgggatgacgcatcaggtgagaccaggccgacgcccaatctgcattccctggtcaaggcgaggcagcaactggaagagcgggagattgccattgagcagcttaatgcgccctctgcaaccagctgcgcgtctttgccgctgttggcgcggtatggcgtcacccatgccgaaccgggccatgcgctgaccggcaccattccgtcgaatcagcaaggcgatcagcctgaacgcattgcgatgctctggctgagtgaaatttcgcaccattttcgtggcaacagctactgctatggcggcggctattaccggcggggacatgcgcgcaacgcgctcgtttttacgccggaaaacgacgttcccgcgaagacgacgctggaacccgtcgatgacagcagtatcgactactacctgccgcttgcagggacgtttccggtgagcagcgccgtggtgctctgttttcgtacccaaatttttgtgacgcgcagtgatgtggtgctggtgtctggcattcagcgcggcgcggcggaaatcgtcgcccgttatgacagtctcggaaacgtactggaggcgtaa

SEQ ID NO: 72723 - DNA, 363 bp, Citrobacter koseri
atggaaaacagactcagcctgctgtgtgacgcaggggttatcgacgaagatatttgccgtggcatgttgcaggtcgtcagacgactggacaaggagtggaagctgccggtgcataccgagcagggaacgatggcgataacccacatggccagcgcgttaatgcgcagtcgccggggagaggtgattgacgcgctggatcacgagctgctggcggaactgacgcaatctccccactggcccgcgattttgttggcgcaccaggcgctgctgggggagtttacggtttcgcttcatgccaatgaggaaggttatttgttggcaaatctatatgggctgtggatggcggcgcacgaagcgtcgtga

SEQ ID NO: 72724 - DNA, 909 bp, Citrobacter koseri
atgatgcgtcgaacatttatcaaaaaagagggggtcgtgctgacgaccctggcccgctacctgcttggtgagaaatgcggtaaccgtttgaaaacgatagatgaactggctaatgaatgccactcatcggtggggttaacgcaggccgcattaaaaacgctggagtcttccggggcgatccgtattgagcgtcgtgggcgcaacggcagcttcctggtggagatggataacaaaacgttgctgtcgcatgtggacatcagcaacgttgtttgcgcgatgccgctgccgtacacccgtctgtatgaagggctggcgagcgggctgaaagcgcagtttgaagggattccattttattacgcgcacatgcgtggggcggacatccgggttgagtgcctgctgaatggcgtctacgacatggccgtggtgtcgcgtctggccgcagagagctacctggcgcaaaacgggttgcgcatagcgctggaactggggccccacacctatgtcggcgagcaccagttgatctgccgtaaaggcgaatccgaccgggtgaagcgagtggggctggataaccgttcggcagatcagaaaatcatgactgaagcctgtttcggcaaaagtgatgtggagctgatagacctctcttatcacgaaagccttcagcgcattgtgaaaggcgatgtggatgcggtgatctggaatgtggtggcggaagcggagctggcattgctggggttagaagcgacgccgctcacccgcgatccccgattcttgcaggccaccgaagccgtggtgctgacccggtcggacgattacccgatgcagcaactgctgcgcgccgtggtggacaaacaggcgctgctcgcccatcagcaacgtgtggtcagcggtgaacaggaacccagttactaa

SEQ ID NO: 72725 - DNA, 1005 bp, Citrobacter koseri
atgactaagcccatcgtttttagtggcgcacagccctcaggtgaattgaccattggcaactacatgggtgcgctgcgtcagtgggtgaacatgcaggatgactatcattgcatttactgcatcgttgaccagcatgcgatcaccgtgcgtcaggatgcacagcagttgcgtaaagcgacgctggatacgctggcgctctacctggcgtgtggtatcgatcctgagaaaagcaccatctttgttcagtcccatgtgccggagcacgcgcagctgggctgggcgctgaactgctacacctatttcggcgaactgagccggatgacccagttcaaagacaaatccgcgcgctatgccgagaacatcaacgccggtctgtttgattacccggttctgatggcggcagacattttgctgtatcaaacgaatcaggtgccggtgggtgaagatcagaaacagcatctggaattgagccgcgacatcgcgcagcgttttaacgcgctgtatggcgatatctttaacgttcctgagccgtttattccaaaatccggcgcgcgcgtgatgtcactgctggaaccgaccaaaaagatgtccaagtcggacgataaccgtaacaacgtcatcggcctgctggaagacccgaaatcggtggtgaaaaaaatcaagcgtgcggtgacggattccgacgagccgccggtagtgcgctacgacatccagaataaagcgggggtgtctaacctgctggatatcctctccgccgtaaccggccagagcatccctgagctggagcagcattttgaaggcaagatgtatggtcatctgaaaggtgaagtggctgaagccgtttccggtatgctgaccgagttgcaggagcgttatcatcgcttccgcagcgacgaagccttcttgcagaaagtgatgaaagaaggggcggaaaaagccagcgcccgtgcttccgaaacgctgaaagcggtctacgaagcgattggctttgtcgccaagccgtaa

SEQ ID NO: 72726 - DNA, 759 bp, Citrobacter koseri
atggataaattgcaggatattcggggtgtcgcctttgacctcgatggcacgctggttgacagcgcgccgggattagccgctgcggtagatatggcgttatacgcgctggaactgcctaccgctggcgaagatcgcgtaattacctggattggtaacggcgcggatgtattgatggagcgtgcgctcgcctgggctcgccaggaacgcgctacgttacgtaaaacaatgggcaaaccgcctgttgatgatgagatccccgccgaagagcaggtgcgtattttgcgtaagctgttcgaccgctactatggcgatgtggcggaagaagggacgttcctgttcccgcacgtagccgatacgctgggcgcgctgcatgccaaagggctgccgcttggactggtgaccaataagccgacgccgtttgtggcgccgctgcttgaagcgctggatatcgccaaatactttagcgtggttattggcggcgacgatgtgcagaacaaaaagccgcatcccgatccgctgctgctggtggcaaagcggatgagcgtcgcgcctgaacagatgctctttgtgggcgattcgcgtaacgacattcaggctgcaaaagcggctggctgcccgtcggtcggcctcacgtacggctacaactatggcgaatcaatcgctcttagccagccggatgtgatttacgacactattaatgaccttctgcccgctctcgggcttccgcatagcgaaaatcaggaatcgaaaaatgactaa

SEQ ID NO: 72727 - DNA, 678 bp, Citrobacter koseri
atgaaacagtatttgattgctccctcaattctgtcggctgattttgcccgcctgggtgaggacaccgcgaaagtgctggctgctggtgcggatgtcgtgcattttgacgtcatggacaaccactatgtgccgaacctgaccatcggcccgatggtgctgaaatccctgcgcaaatacggtattaccgcgcccatcgacgtgcatttgatggtgaagccggttgatcgcatcgtgccggatttcgccgcagcgggcgccagcatcattacgtttcatcccgaagcctctgagcatgtcgatcgtaccttgcagctgattaaagaaaacggctgtaaagcgggtctggtgtttaacccggccacgccgctgagttatctggattacgtgatggataagctggatgtgatcctgctgatgtccgtcaacccgggttttggcggccagtcttttattccgcacacgctggagaagctgcgtgaagtgcgccgtcgtattgatgagtcaggttatgacattcgcctggaagtggacggcggcgtcaaggtgaacaacatcggcgaaatcgccgcggcgggcgcagacatgtttgtggcaggctccgcgattttcgaccaaccagactacaaaaaagtcattgatgaaatgcgcagtgaactggcaaaggtaagtcatggataa

SEQ ID NO: 72728 - DNA, 837 bp, Citrobacter koseri
atgaaaaagaatcgcgcttttctgaagtgggcaggggggaaataccccctgcttgatgacatcaaacggcatttaccgaaaggtgaatgtctggttgaaccctttgtgggtgccgggtcggtgtttcttaacaccgacttttctcgttatattcttgccgatattaatagtgaccttatcagcctctataacatcgtgaagtcgcgtactgaagagtatgtgcgggcttcccgcgagctgtttacgcctgagacgaatcaggccgaggtttactatcaactccgtgaagagttcaatacgagccgggagccgttccgtcgagcggtcctgttcttatacctgaaccgctatggttacaatggcctgtgccgctataacttgcgtggggagtttaacgtgccgtttggccgttacaaaaagccctacttcccggaaacggagttgtaccattttgccaaaaaagcgcagaatgcagagtttcattgcctttcgtatgaagagtgtatggatcgtgctgatagcaattctgtggtctattgcgatccgccttacgcaccgctttctgcgacggcgaatttcaccgcttatcataccaatagcttcagcccaaaagagcaggcgcgcctggcggagatggcagaaaagctggtcagcaagcggatcccggtgttaatttcgaaccatgacacgcccgatacccgcgagtggtacaaagcggcgaaacattttcaggtcaaagtgcgtcgcagtataagcagcaatggcggcacacgtaaaaaggtggacgaactgctggctctgtaccaaccaggagtcgtaacgcctgcgaaaaaataa

SEQ ID NO: 72729 - DNA, 1293 bp, Citrobacter koseri
atggatgaattcaaaccagaagacgagctgaaacccgatcccagcgatcgtcgtactggtcgtactcgtcaatcttctgaacgcgataatgatccacagatcaatttcgatgacgtcgacctggatacggacgatcgtcgtccagggcgtgcgcgaaaggcgcgtgaggaagagcagtacagcgaagacgattatgaatccgatgatgcagtggatgaagaacgcgtagagcgtcgtccccgcaaacgtaagaaagccgccagcaaacccgcttcccgtcagtacatcatgatgggtgtcggcgttctggtgttgctgctgttgatcatcggtattggttccgcgctgaaagctccttcaccctcctcttccagcgatcaaacggcgtctgccgagaagaacatcgatctttccggcaataacgcgaccgatcaggcgagcgccacgcagcctgcgccagacgctgaacagaccgccggaaacacgcagcaggatgtttctctgccgccgatcgcctcaacgccaacgcagggtcaggcacctgccgcgaccgaaggccaacagcgtgtggaagttcagggcgatctgaacaatgcgctgactcagccgcagggtcaggaacaggttaacaatgtggtggcgaactccacgctgccgacggaaccagccaccgttgcgccaatccgcaacggcaatgcgccgcgtcagacggcgacgacgcaatcgggcgagcgtcagaccactacgcgcccggaacgtaagcaggttgtgattgagccgaagaaaccgcagaccaccgcgaaagcgacgccagtggaaccgaagccgaccacgcagccgaaacgtagcgaacctgccgcgccggtcgcgacgacgaaagcgccagcaacctccgcgccagcggcaacgaccgcgccgaaagccaccgccagcactgcgcctgcacaaaccgcagcgccagcgcaaaccacagcggcagccggcagtgcggctggtacgaaaagcacaggtaacgtgggttcgctgaagtctgcgccttccagccattacaccctgcaactcagcagttcttctaactacgacaacctgaacggttgggcgaagaaagaaaacctgaaaaactatgtggtgtatcagacgacgcgtaacggccagccgtggtatgttctggtaacgggtgtgtatgcgtctaaagatgatgccaaacgtgcggtgtctacgttgccagccgatgtgcaggcgaaaaacccgtgggcaaaaccgttgcatcaggtgcaggccgatctgaagtaa

SEQ ID NO: 72730 - DNA, 1089 bp, Citrobacter koseri
atggagaggattacagttactctcggggaacgtagttaccctatcaccatcgcggctggtttgtttaacgaaccagcttcattcttaccgctgaaatcgggcgatcaggttatgttggtgaccaacgaaaccctggctcccctttaccttgataagatccgtagcgtacttgaacaggcgggggttaacgtagatagcgttaccctgcccgatggcgaaaagtataaaagcctgacggtacttgatacggttttcaccgcgttactgcaaaaaccgcacggtcgcgataccacgctggttgccctcggcggcggcgtgattggcgaccttaccggtttcgccgccgccagctatcagcgtggcgtgcgctttatccaggttccgacgacattgctgtcgcaggtcgactcctccgtaggcgggaaaaccgctgtaaaccatcccctcggcaagaacatgatcggcgcgttctaccagcctgcttctgtggtggtggatctcgactgtctgaaaacgcttcctgcgcgtgagctggcatcgggtctggcggaagtgatcaaatacggcatcattcttgacggtgaatttttcacctggcttgaggacaatctggacgcgttattacgtctggaaggtccggcaatggcgtactgtatccgccgttgttgtgagctgaaagccgaagttgtcgcagcagacgagcgcgaaacgggcttacgtgctttactgaatctgggacatacctttggtcatgccattgaagctgaaatgggttatggcaattggttacacggtgaagccgtcgctgctggtatggtgatggcggcgcgcacgtcagagcgtctcggtcagtttagcgctgcggatacgcaacgcattattacgctgctccagcgcgcaggtctgcctgtacacgggccgcgtgagatgtctgctcaggcgtatttgccacacatgctgcgcgataagaaagtcctggcgggcgagatgcgcttagtgctcccgctggcgatagggaaaagtgaagtacgcggcggagtgccgcacgaaatcgttctcagcgctattgctgactgtcagcaggcgtaa

SEQ ID NO: 72731 - DNA, 522 bp, Citrobacter koseri
atggcagagaaacgcaatatctttctggttgggcctatgggtgccggaaaaagcactattgggcgccagttagctcaacaactcaatatggaattttacgattctgatcaagagattgagaaacgaaccggagctgatgtgggctgggtcttcgatgtagaaggtgaagacggcttccgtgatcgcgaagaaaaagtcatcaacgagttgacggaaaaacagggtattgtgctggcaaccggcggtggctctgtaaaatcacgtgaaacgcgtaaccgtctctccgcgcgtggcgtcgtggtgtatcttgaaacgacaatcgaaaaacaacttgcgcgtacgcagcgcgacaagaaacgcccgctgttgcaggtagaagctccgcctcgtgaagttctggaagcgttggccaacgaacgcaatcctctgtatgaagagattgccgacgtgaccattcgtaccgacgatcagagcgctaaggtcgtggcaaaccagattattcatatgctggaaagcaactga

SEQ ID NO: 72732 - DNA, 1203 bp, Citrobacter koseri
atgcccgccgtacaggcggggaaagcgcaaaacgtgacgctggtggtggatgatgttcctgttgttcaggtattgcaggcgcttgccacgcaggagaagaagaatctggtggtctcgcctgacgtcagcggttcgctgtcgctgagtctgacggatgtgccgtggaagcaggcggtgcagacggtcataaaaagcgccgggctggtgctgcgccaggaggggaatattctgcatgttcactcggttcactggcaaaacgaaaacgccgcgcggcaggaggctgagcaggcaaggcttcgggctaacttaccgctggaggatcgcagtatttctctgcaatatgccgatgcctccgaactggcaaaagcgggagaaaaactgctgagcgccaaaggcagtatgacggtagataagcgcaccaaccggttattgcttcgggataacaacgccgcgctggcggcgctggaaaagtgggcggcgcaaatggatctccccgttgagcaggttgaactggcggcgcatatcgtcaccataaatgaaaaaagcctgcgtgagctgggggtaaagtggacgctggcggacgcgcaacaggccgggtcgccagggcaggtgacgtcgcttgccagcgatctgtccgtcgcggccgccacgtctcgcgtcgggtttaacatcgggcgcatcaacggtcgcttgttggatcttgagctttccgccctggagcagaagcagcaacttgatattatcgccagcccacggctgctggcttcgcacctgcaacctgccagtattaagcaggggagcgaaatcccgtatcaggtctccagcggcgagagcggggcgacgtccgtggagtttaaagaagcggtgctggggatggaggtgacgcccaccgttttgccgaaggggcgcattcgcctgaaacttcacatcagccagaacgttcccggtcaggtgctacagcaggcggatggcgaagtgctggcgatcgataagcaggagatcgacacgcaggtcgaggttaaaagcggcgaaacgctggcgctgggcggcatcttctcgcgcaagaacaaatccgctaaagatagcgtcccgctgttaggcgatatcccctggcttggttcccttttcagccatgatggaaaagaaaacgagcggcgcgaactggtggtgttcattacccccagactggttgcggcagaataa

SEQ ID NO: 72733 - DNA, 402 bp, Citrobacter koseri
atgactaagcgctggctgttggtctgtagctgcctgctgatgctgaccggaatgcgcgaccccttcaaaccgccggaggaccgatgccggatcgctgaactgccgatgtggcgttaccagggcgtggtgagtcagggagagcgcctgactggcattctcaaagacagccagcagaagtggcggcgcgtcgaacaatatcaggtgctggagaacggctggacgatttcccgactgacggcagacagcataacgcttgagaccggtaaaggctgtgaaccgtcacagtggcggtggcaacgacaaggagaagtgaatgaagcgatggatagccgcagcgttgatcgccgtgatgcccgccgtacaggcggggaaagcgcaaaacgtgacgctggtggtggatga

SEQ ID NO: 72734 - DNA, 471 bp, Citrobacter koseri
atggtcgcgctttttgacctctggtgcgggttattgccgcgaacccgcctcttctgctggttaggctggagcctggggctgggattactggcgtgtttatgtacgttttcttcgggcgcgcagcaacaggagcagcaacgaacggcgctggcgcaacagcgggcggctatcgaccggcagtggcgaagcctgcgtcagatcgccgcatcaatggatatgtctcgtttagcgtcggccagcaagcgcgtgcctttttcccctctggattttcagcgctctccggtacgccttcttcactggcagccttccgcgcagggaggcgagctggcgctgtcatccacctgggaggcggttccgcaactgttcagtcggctggcggagcgtggcatgcgcatcaaccgcttttcgcttgttccgcaggagacggaactgctgttgacgctacagctggagcggctgactgatgactaa

SEQ ID NO: 72735 - DNA, 540 bp, Citrobacter koseri
atgagtcatccggtcaactttttgccctggcgtcagtcccggcggcgcgaatgtctgcgattctggagcgtcatgttcagcggttcactgctgctgaccatcgcgctggcgtgcatccatgaggttacgctcacggcgcaaaagcgggcggatgcacagtggccgatcgcagagaaagagcgcgccgccgcgctactggcgatccaaccccgcttacagcagcggcagaccgcgtggcagcaagcgttgcagcggcaaacggaatatgagcagacgcggcgctggcagagcgtgctggaagggatggcggcgctgttgcccgggcaggtgtggctaacccggttatcctggcagcagggaacgctggaacttgagggatacgcgacgacatttctcgcgttaaacacgctggaaaccgcgctgcgtcgtcatcctgatttcccgttagccgggagtggggcaacgcagcaggatgcgcagggacgctggcaatttcattacccgttaaaaaggagcctcgcagatggtcgcgctttttga

SEQ ID NO: 72736 - DNA, 780 bp, Citrobacter koseri
atggctttcaggttctggcaaattggccttcatattcagcagcatgaggcgctggctgtcgccgtggttcgcggcgcgtcaggctggtctttacaacgctggtggcgggtgccgctggcggaacgtaccttcgttgacgggcatcttcgcgagcctgaacagctcgtcgatgcgctgcttccgtggcgtcgttcgcttcctcaccggcatcatatttatctctctttccctgccagccggacgctgcaaaagcatgtcccgcgcccggaaatggcgctgcgcgaacgtgaacaaacggcgtggctgaccggcgcgatggcgcgtgagctggatatgccccctgacgccctgcgctttgactatcgcgaagataccctgactccggcatttaacgtgaccgccgcccaaagcaaggaggtggcgaccttattaacgctggcgcaaaaactgaaaatgcaggtgacggcgattacgccggatgcctgcgcattacagcgctttattccttatctgctggcgcaccagcagtgtctggcctggcgtgacgaagaacagtggctgtgggcgacgcgctatgcgtggggacgaaaactgctacaagaggcggcctgcgccgacagtcttgccgcgacgttgtccattgcgccggaaagtctgacggtgtgcggcgcgggcggcttcgaaccctggtgcgcggttgccattcgccagcctcccgttccgccggaaggccatacctttgccatcgcgctgggattagcaatgggggcgccgcgctga

SEQ ID NO: 72737 - DNA, 2553 bp, Citrobacter koseri
gtgaagttcgtaaagtatttattgatccttgcagtatgttgcatcctgctgggagcaggctcgatttatggcctctaccgctatatcgagccgcaactacctgacgtcgcgaccttaaaagacgtgcgtttgcagattccgatgcaggtttacagcgcggatggcgagctgatcgcgcagtatggcgagaaacgtcgtatcccggtcacgcttgaccagatgccgccggaaatggttaaagcctttatcgctacggaagacagccgcttttacgagcatcatggcgtcgatccggtagggatcttccgtgcggccagcgtcgcgctgttctcaggccatgcctcacagggggcaagtaccatcacccagcagctggcgagaaacttcttcctgagcccggaacgcacgctgatgcgtaaaattaaggaagcgttcctggcaatccgcattgagcagatgctgagcaaagatgagatcctcgaactttacctgaacaagatctacctcggctaccgtgcctacggcgtcggcgcggcggcgcaggtctatttcggtaagacggtcgatcagctcaccctgagcgaaatggcggtgattgccggtctgccgaaagccccttccacatttaacccgctctactcgatggatcgggcgacggcgcgtcgtaacgtggtgctgtctcgtatgttgagcgaaggctacatcacccaggcgcagtacgatcaggcgcgcggcgaagcgattgacgccaattaccatgcgccggaaatcgcgttctcagcgccgtatctgtcggaaatggtgcgccaggaaatgtacagccgttatggcgaaagcgcctatgaagacgggtatcgcatttacaccacgatcacccgcaaagttcagcaggcggcgcagcaagccgtgcgtaacaacgtgctggactacgacatgcgccacggctatcgcgggccgtcgaacgtgctgtggaaagtaggcgaaaccgcctgggacaacaaaaaaatcaccgacacgctgaaagccctgccaacctacgggccgttgctgcctgccgtcattaccggcgcgaatccgcaggaagccaccgcgatgctcgctgatggcacctccgtgtcgctgcggatggaaggcgtacgctgggcgcgcccttaccgttcggatacccaacagggcccgacgccgcgtaaagtgaccgacgccgtacagacaggccaacaaatctgggttcgccagatgggtgatgcctggtggctggcgcaagtcccggatgtgaactcggcgctggtttccatcaacccgcaaaacggcgcggttctggcgctggtcggcggttttgactttaaccagagtaaattcaaccgcgccacgcaggcgctgcgtcaggtcgggtcgaacatcaaaccgttcctctataccgccgcgatggataaaggtctgacgctggcgagtatgctgaacgacgtgccgatttcccgctgggacgcaggcgccggttccgactggcggccaaaaaactccccgccgcagtatgccgggccaatccgcttacgtcagggtctgggtcagtcgaaaaacgtggtgatggtgcgggcgatgcgcgcgatgggcgtggattacgccgcagagtatctgcaacgcttcggtttcccggcgcagaacatcgtgcataccgaatcgctggcgctgggctccgcgtccttcaccccgatgcaggtggcgcgcggttatgcggtaatgtctaacggcggcttcctggtagacccgtatttcatcagcaagatagagaccgaccagggcggcgtgatcttcgaagcgaagccgaaaatcgcctgcccggattgcgatatcccggtcatttacggtgatacccaaaaatccaacgtgctggaaaacaataacgttgaagatgtcgccatctctcaggagcagcaaaacgccaccgtgccgatgccaaaactggagcaggctaaccaggcgttagtggcgcaaagcggaatgcaggaatatgctccacatgtgatcaacacgccgctggccttcctgattaagagcgcgctgaacagcaacatcttcggcgaacccggctggatgggcaccggctggcgcgcgggccgcgacctgcaacgtcatgatatcggcggaaaaaccgggaccaccaacagctcgaaagatgcctggttctccggttacggcccgggcgtggtgacttccgtgtggatcggctttgacgatcatcgtcgcgatctggggcgcactaccgcgtccggggcgatcaaagaccagatttctggttacgaaggcggcgcgaaaagtgcgcaacccgcatgggatgcttacatgaaagccgtgctggaaggggttcctgaagagccgctgacgccgcctccgggcatcgtgacgatcaatatcgacagaagcaccgggcaactggcaaacggcggtaacagccgcgcggaatactttatcgaaggcactcagccaacgcagcaggcggtgcatgaggtgggcaccaccattatcgataacggtgagacacacgaactgttttga

SEQ ID NO: 72738 - DNA, 561 bp, Citrobacter koseri
atgagcaaatcattacaaaaacccaccattttgaaagttgaaactgtcgcgaaatcccggctgtttaacgtcgaaagtgtggatctcgaattcagcaacggcgtgcgccgcgtctatgagcgtatgcgtccgtccactcgtgaagcggtaatgattgtgccgatcgtagacgatcacctgattctgatccgtgaatatgccgtgggcacggagtcttatgagctggggttctccaaagggttgatcgaccctggcgaaaccgtttttgaagcggcgaaccgggaactgaaagaagaagttgggtttggcgcgaacgatctgacgttcctcaaaaagctcagcatggcgccgtcctatttttccagcaaaatgaacattgtgatagcggaagacctctatcctgaatcactggaaggcgacgagccggaaccgctgccgcaggtgcgctggccgctgacgcatttaatggatctgctggaagaaccggatttcagtgaagcgcgaaacgtcagcgcgctgttcctggtccgtgagtggctgaaggggcaggggcggttgtaa

SEQ ID NO: 72739 - DNA, 2133 bp, Citrobacter koseri
atgagcaccattttgattttcttagctgctttgctggcctgctctctactggcaggatggctactcagagtaagagccaggcggcagaatctgccctggatcagcgccttttcagacgccgcgacgcgcaagctaacgccggaagagcgcagtgcggttgaaaactatctcgacaacctcagtcagattcagcaggtgccggggccgacaggcgccagcaccgctcccgtgtcgttaacgctgaatgcccagagtaataacgtcattattctgacccattccattacgcgttacggcattacgaccgacgatcccaataaatggcgatattaccttgattccgttgaggttcatttgccgccgttctgggaacagtacatcaatgacgaaaataacgttgagctgatccataccgatacgcttcctttggtcatctcgcttaacggccacacgttgcaggagtacatgcaggagacgcgcggctatgcgctacagcatacctcctccacccaggcgtcgattcgtggcgaagagagcgagcaaattgaactgctgaacattcgtcaggaaactcacgaagagtatgcgctcagccgccctgctgggctgcgcgaagcatcgctgattgtggcctcattcctgctgttcttctgttgcttaattacgccggatgtcttcgtgccgtggattgcgggtggcgcaattctgctgctcgccgcaggtctctgggggctgttcgcaccgccatctaaaacctcgctgcgggagattcactgcctgcggggaaccccgcgtcgctgggggctgtttggcgaaaacgatcaggagcagatcaacaatatttcgctggggattattgacctgatttaccctgcccactggcaaccctatatcgcacaggatctcgggcagcaaacggatattgatatctatctggatcgccacgtcgcgcggcaagggcgttttctctccctgcatgacgaggtgaaaaatttcccgttgcaacactggctgcgtagcgccgttattgcgggcggatcgctgctggtgctgtttatgctgctcttttggatcccgctggatatgccgatcaaattcaccttgtcgtggatgaaaggcgcgcaaaccattgaggccaccagcgttaagcagctccacgacgccggagttcgcgtgggcgatacgctgcatctgagcggcaaaggcatgtgtaatatccatcagtctggtagctggactgcgcagccgaactccccttttatgccgtttgattgctcgcaaatcatctggaatgacgcgcggacgctgccgctgcccgagtccgatctcgtcaacaaagccacagcgctgacccaggccatcaaccgccagctgcaccctaagccggaagatgactcccgcgttagcgcatcactgcgttcggcgattcaaaagtccgggatggtattgctggatgatttcggcgacatcgtattaaagaccgccgatctgtgcgccgccgaagatgaatgcgtgcgcctgaaaaatgcgctggtgaacctcggcaacagcaaaaactgggccgcgctggtcaaacgcgcgaatgcgggcaaacttgacggcgtgaacattctgctgcgccctgtcagcgcggagtcgctcgataacctggtgacgacctcaaccgcgccgtttatctcccgtgaaaccgcgcgcgccgcacaggcgcttaacagccccgcgccgggcggcttcctgattatcagcgatgaaggcagcgatctggttgatcagccgtggccgtcgatgtccctgtacgattaccccgcgcaggaacagtggggcgcattccagcgcctggcgcagatgttaatgcaaacgccgtttagcgccgaagggatcgtcacccgtgtctacaccgacgccaacggcacgcagcacatcggcctgcaccgcatcccggatcgttccggtttatggcgctaccttggcacgacgttgctgatgctcaccatgctgggcagcgccgcttacaacggcattcaggcgttcagacgttatcagcgtaaccgcacccgtatggcggaaattcaggaatattatgaaaactgcctgaatccaaagctgatcgcctccccggaaagcctcatctga

SEQ ID NO: 72740 - DNA, 669 bp, Citrobacter koseri
atgcatattgatattgcctggcaggacgtcgatactgttttgctggacatggacggcacgctgctcgatctggcattcgataactatttctggcagaaactggtgccggaaacctatggcgcacagcagggaatcactgcacaggaagcccaggactatattcgccagcagtatcatgccgtgcagcatacgctaaactggtactgtcttgattactggagcgaacggctgggtctggacatttgcgccatgacgacggcacaggggccgcgcgccgtgctgcgcgaagataccgtgccgtttctggatgcgttaaaagcccgcggtaaacgccgcattctgctgaccaacgcgcacccgcataacctggcggtgaagctggaacataccggtctggcatcacaccttgatttattactttctacccacacatttggttatcccaaagaggatcagcggttatggcacgcagtggctgaagaaacgggaataagcgcagagaaaacgctgtttatcgacgacagcgaaccgattctcgacgccgccgcccaattcggcattcgttactgcctcggcgtgaccaatcccgactccggcattgcggaaaagcagtatgcacgccatccgtcgttgaatgattaccgccgactgatcccctcactgatgtga

SEQ ID NO: 72741 - DNA, 402 bp, Citrobacter koseri
atgaaagaaaagccctctgttgaggtccgactggataaatggctgtgggccgcacgcttttataaaacccgtgcattggcccgcgaaatggttgaaggcggtaaggtgcactataacgggcagcgcagcaagccgggcaagattgtcgagctgaatgcgacgctgaccctgcgccagggcaacgacgagcggacggtagtcattaaaggcattaccgagcagcgccgtccggcgagcgaagccgttacgctgtatgaagaaacagcggagagcgtggaaaaacgcgaaaaaatggcgcaggcacgcaaacttaacgcattaaccatgccgcacccggacaggcgaccggataaaaaagagcgccgcgacctgttacgatttaaacacggcgacagtgagtga

SEQ ID NO: 72742 - DNA, 879 bp, Citrobacter koseri
atgccgcaacatgaccaattacatcgttatctgtttgaaaactttgccgtgcgcggcgaactggtaaccgtatcggaaaccctgcaacagatcctcgaaaaccacgcctatccgcagccggtcaaaaccgtgctggccgagctgctggtcgccaccagcctgctgaccgccacgctgaaatttgccggtgacattaccgtgcagctacagggcgacggcccgctgagcctggcggtgatcaacggcaataacaaccagcagatgcgcggcgtcgctcgcgtacagggcgaagtgccggaaaacgcggatctgaaaacgctggtgggcaacggctatctggtgatcaccattacaccagaagaaggcgagcgttatcagggcgtggtcggtctggaaggcgacacgctggcggcgtgcctggaagattacttcctgcgttccgaacagttgccgacacgcctgttcatccgcactggcgaggtggaaggcaaaccggcggcgggcggaatgctgctacaggtaatgcccgcgcagaacgcgcaggcggacgacttcgatcacctggcgacgctgaccggaaccatcaaaaccgaagagttgctgacccttccggctaacgatgtgttgtggcgtttgtaccatgaagaagaggtcacgctctacgacccgcaggacgttgagttcaagtgtacctgttctcgtgaacgctgtgcgggcgcgctgaaaacgctaccggatgaagaagtggacagcatcctggcggaagaaggcgagatcgatatgcactgcgattactgcggcagccactatctgttcaacgcgatggacattgcggaaatccgcaacaacgcctcccctgccgacccgcaggtgcattaa

SEQ ID NO: 72743 - DNA, 1620 bp, Citrobacter koseri
atgcgcgttaacagcttaaccccgcaagatctcaaggcttatggtatcaatgacgttcaggatatcgtttacgaccccagctacgacctgctgtaccaggaggaacttgatcctactctggaaggttacgagcgcggcgtattaacgaatctgggtgccgttgccgttgatactggtatctttaccggacgttcgccgaaggataaatacattgtccgtgacgacaccacgcgtgacacgctctggtggtccgacaaaggcaaaggcaagaacgacaacaaaccgctgtcccaggaaacctggcagcacctgaaagggctggtaactcagcaactctccggcaaacgcctgttcatcgttgacgccttctgcggcgctaacgcggacacccgtctctccgttcgcttcatcacggaagtcgcctggcaggcgcattttgtcaaaaacatgttcatccgtcctgcggacgaagaactggtggatttcaaaccagactttatcgtgatgaacggcgcgaaatgcaccaacccgcagtggaaggaacaggggctgaactctgaaaacttcgtggccttcaacctgactgaacgcattcagttaattggcggcacctggtacggcggcgaaatgaaaaaagggatgttctccgtcatgaactacctgctgccgctgaaaggcattgcctccatgcactgctccgccaacgtgggcgagaaaggcgacgtcgcggtcttcttcgggctttccggcaccgggaaaaccaccctctccaccgacccgaaacgccgtctgatcggcgatgacgaacacggctgggatgacgacggcgtgtttaactttgaaggcggctgctacgcgaaaaccatcaagctgtctaaagaagccgaaccggaaatctacaacgctatccgtcgcgatgcgctgctggaaaacgtcaccgttcgcgaagatggctccattgatttcgacgatggttccaaaaccgagaacacccgcgtctcctacccgatttatcatatcgataacatcgttaagccggtatcaaaagcgggccatgcaaccaaagtcatcttcctgactgccgacgctttcggcgtgctgccgccggtttctcgcctgacagctgaccagacgcagtaccacttcctgtctggctttaccgctaaactggccggtactgagcgcggcgttaccgaaccgacgccaaccttctctgcctgcttcggcgcggcgttcctgtcgctgcacccgacgcagtacgctgaagtgctggtcaaacgcatgcaggcatccggcgcgcaggcgtatctggtaaacaccggctggaacggcacgggcaaacgcatctccatcaaagatacgcgcgcgattatcgacgccatcctgaacggctctctggataatgcggaaacctttaatctgccgatgtttgacctggcgatcccgaccgagctgccgggcgtagagacacgtattcttgacccacgtaacacctacgcgtcaccggaacagtggcaggaaaaagccaccgcgctggcgaaactgtttgtcgagaatttcgagaaatacaccgataccccagccggtgaagcgctggtcagcgccgggccgaagctgtaa

SEQ ID NO: 72744 - DNA, 237 bp, Citrobacter koseri
atgcctcccttttcgtttctcagcgcccggtggcgctacgcttaccgggcctacaataacgtatgctccgtaggccggataaggcgcagccgccatccggtattgcgcccggtggcgctacgcttaccgggcctacaacagtgtgtgctccgtaggccggataaggcgcagccgccatccggcattgcgcccggtggcgctacgcttaccgggcctacaacaacgtatgctccgtag

SEQ ID NO: 72745 - DNA, 1353 bp, Citrobacter koseri
atgaggcgaatgcgcttctcaccgcgaagttcatttgcccgcacgctactgctcatcgtcaccttgctgttcgtcagcctggtgacgacttatctggtggtgctgaactttgcgattctgccgagcctccagcagtttaataaggttctggcctacgaagttcgtatgctgatgaccgataagctgcaactggaggacggcacgcaactggtggtgccgcctgcgttccgccgggaaatctatcgtgagctggggatttctctctattccaacgaggctgccgaagaggccgggctgcgttgggcgcaacactatgaattcttaagccatcagatggcgcagcagctgggcggcccgacggaagtgcgcgttgaggtcaacaaaagctcgccggtggtctggctgaaaacctggctgtcgcccaatatctgggtgcgcgtgccgctgacggaaatccatcagggcgatttctccccgctgttccgctatacgctggcgattatgctgctggcgataggcggcgcatggttgtttattcgtatccagaaccgaccgctggtcgatcttgaacatgctgcgttgcaggtggggaaaggcatgattccgccgccgctgcgcgagtatggcgcgtcggaggtgcgctctgtgacccgcgccttcaaccatatggcggcgggcgtgaagcaactggctgatgaccgtaccttgctgatggcgggggtgagccacgatttgcgcacaccgttgacgcgtatccgcctggctaccgaaatgatgggtgaagaggacggctatcttgcggagtccattaataaggacatcgaagagtgcaacgccattatcgaacaattcatcgattacctgcgtaccggtcaggaaatgccgatggagatggccgatctgaatgccgtgttgggtgaggttattgcggcggaaagcggctacgagcgggaaattgataccgcgctgcaaccgggcagtattcaggtgaaaatgcatccgttgtcgattaaacgcgcgatcgccaatatggtggtcaacgccgcccgttatggcaatggctggatcaaggttagcagcggtacggaaccgcatcgcgcctggttccaggttgaagacgatgggccgggcattaagccggaacagcgtaagcacctgttccagccgtttgtgcgcggcgacagcgcgcgcagcaccagcggcaccgggttgggtctggcgattgtgcagcgtattgtggataaccataacggtatgctggagattggctccagcgagcgcggtgggctttctattcgcgcctggctgccgattccggtcgctcgcgtaccgggttcgacgaaagacgcataa

SEQ ID NO: 72746 - DNA, 873 bp, Citrobacter koseri
atgtgtcgcaagattaattgtatacttaagctgctgttaaatatgctttgtaacaatttagcctggaatttataccagaattcgctggtgacgaacgtaagcttttttaagaatacacacattcaattgttgcgaacctttgggagtaaaacaatgcaagagaattataagattctggtggtggatgacgatatgcgcctgcgcgcgctactggaacgttatctgaccgagcagggcttccaggttcgaagcgtggcaaacgccgagcaaatggatcgtctgctgacccgtgagtccttccatcttatggtactggacctcatgctgcctggcgaagacggcctgtcaatttgccgccgtctgcgcagccagagcaaccctatgccgatcatcatggtgacggcgaagggcgaagaagtggaccgcattgtgggtctggagatcggtgctgacgactacattccgaagccgttcaacccgcgtgaactgctggcgcgtattcgcgctgtgctgcgccgtcaggcgaacgaactgccgggcgcgccttcgcaggaagaagcggtaatcgccttcggtaagttcaagctgaacctcggcacccgcgaaatgttccgcgaagacgaaccgatgccgctcaccagcggtgaatttgcggtactgaaagcgctggtcagccacccgcgcgaaccgctctcccgcgataagctgatgaacctggcgcgcggtcgtgaatactctgcgatggaacgctccattgatgtgcagatctcccgtctgcgccgcatggtggaagaagatccggcgcatccgcgttacattcagaccgtctggggactgggctacgtctttgtaccggacggttctaaagcatga

SEQ ID NO: 72747 - DNA, 474 bp, Citrobacter koseri
atgaaaacgcccctgattacccgggaagggtacgaaaaactcaaacacgagctgaattatctctggcgggaagagcgcccggaagtcaccaaaaaagtgacctgggctgcgagtcttggggaccgcagcgaaaatgccgactatcagtataataaaaagcgcctgcgtgagatcgaccgtcgtgttcgttatctgaccaaatgcatggaaaacctgaaaatcgtcgattattccccgcagcaggaaggcaaagtgttcttcggcgcgtgggtggaaatcgaaaacgatgagggcgatatccgccgctttcgcatcgtcggctacgatgaaattttcggtcgtaaggattacatctccatcgactcgcctatggcgcgggcgttgctgaaaaaagaagtgggcgatctcgcggtagtacacacgcccgccggcgaggccagctggtacgttaatgagatcgaatacgtaaaatag

SEQ ID NO: 72748 - DNA, 2334 bp, Citrobacter koseri
atgatgaatgattctttctgccgcattatcgcgggtgaaattcaggcacgcgccgaacaggtagacgctgccgttcgcctgcttgacgaagggaacaccgtgccgtttatcgcacgttatcgtaaggagatcaccggcgggctggatgacacgcaactgcgtaatctggagacccgtctgggatatctacgtgaactggaagacagacgtcaggccattctcaagtccatttccgagcaaggcaagctgaccgatgagctggctaacgccatcaacggcacgttaagtaagaccgaactcgaagacctctacctaccctacaaacccaagcgtcgcacacgcgggcaaatcgccatcgaagccggacttgaaccgctggctgacctgctgtggtcagatccctcccacaccccggaaacggaagcggcaaaatacatcgacgctgacaacggcgtggcggatgccaaagcagcccttgatggcgcacgctatatcctgatggagcgttttgccgaagacgcagcgctgctggcgaaagtgcgcgattatctgtggaagaacgcccacctggtcgcgaccgtcgtaagcggcaaagaggaggaaggggcgaaattccgagattacttcgatcatcacgaaccaatcgccaccgtcccttcacaccgtgcgctggcgatgttccgtggccgcaacgaaggcgtgctgcaactgtcgctgaatgccgacccgcaattcgatgagccgcccaaagagagccactgcgagcagatcatccaggatcacctcggcctgcgtctgaacaacgctccggcggatagctggcgcaaaggcgtggtgagctggacatggcgtataaaagtcctgatgcatctcgaaaccgaactgatgggcaccgtgcgtgaacgcgcggaagatgaagccattaacgtctttgcccgcaacctccacgatctgctgatggcggcgcctgctggcctgcgcgcgactatgggtctcgatccgggtctgcgtaccggcgtgaaggtcgctgtagtggacggcaccggtaaactggtcgccaccgacaccatttatccacataccggtcaggcagctaaagctgcggtggcggttgccgcgctgtgcgaaaaacacaacgttgagctggtggcgattggtaacggcacggcatcgcgcgaaaccgagcgcttcttcctcgacgtgcagaaacagttcccgaaagtgacggcgcagaaagtgatcgtcagcgaagccggagcatcggtgtattccgcttccgagctggcggcgctggagttcccggatctggacgtttcgctgcgcggcgcggtctctatcgcccgtcgtctgcaagacccactggcagagctggtgaaaatcgatccgaaatccatcggcgtcggccagtatcagcacgacgtcagccagacccagcttgcccgtaagctggatgccgttgtggaagactgcgtaaacgccgtcggcgtcgatctcaataccgcgtccgtaccgttgctgacccgcgtggcaggcttaacgcgcatgatggcgcagaatattgtcgcctggcgtgatgaaaacggtcagttccagaaccgccagcagttgctgaaagtgagccgtctggggccgaaagcctttgaacagtgcgcgggcttcctgcgcatcaaccacggcgataacccgctggatgcctctaccgttcacccggaagcctacccggtggtcgagcgtattcttgccgccacccaacaggcgctgaaagcgctgatgggcaacagcagcgagctacgcaatttgaaagcggtggatttcaccgacgacaaattcggcgtgccaaccgttaccgacatcatcaaagagctggaaaaaccgggccgcgacccgcgtccagagttcaaaaccgcgcagtttgctgatggcgtagaaaccatgaacgatctgcaaccgggcatgattctggaaggcgccgtaaccaacgtcaccaactttggcgcgtttgtggatattggcgtacatcaggacggtctggtgcacatctcttccctgtcgaataagttcgtcgaagatccacacaccgtggtgaaagcgggtgacatcgtgaaggtgaaagtgctggaggttgacctgcaacgtaagcgcatcgcgctgaccatgcgtctggacgagcagccaggtgaaaccaacgcccgtcgcggcggcggcggcaacgatcgcgcccagggcaaccgcccggcggcaaaagcggtgaagccgcgtggtcgtgacgcgcagcctgcgggcaacagcgccatgatggacgcgctggcggccgcaatgggtaaaaaacgctaa

SEQ ID NO: 72749 - DNA, 228 bp, Citrobacter koseri
atgcaattcattccagacacggcgtggaaaattaccggcttttcccatgaaatcagcccggcataccgtcagaaactgctttcactcggcatgttgccaggttcttcatttaacgtagtgcgcgtcgccccattaggcgatcctattcatatcgaaactcgccgcgtgagcctggtattacgtaagaaagatctggcgttattagaagtggaagcggtttcctgttaa

SEQ ID NO: 72750 - DNA, 2319 bp, Citrobacter koseri
atgaaaaaattaaccattggtttaattggtaatccaaattccggcaagacaacattatttaaccagctcaccggcgcgcgtcagcgtgtggggaactgggcgggtgttaccgttgaacgcaaagaaggtcagttcgcaacaaccgaccatcaggtcacgctggtcgatttacccggcacctattcactgaccaccatttcgtcacaaacttccctcgatgagcaaatcgcctgccattacattctgagcggcgacgcagacctgctgatcaacgtggtggatgcctctaaccttgagcgcaacctctacctgacgctgcaactgcttgagctgggcattccctgcattgtggcgctcaacatgctcgacatcgcggagaaacagcaggttcgcattgatatcgacgcgctgtccgcacgccttggttgcccggttgtgccgttggtttccacgcgcggccgtgggattgaagccctgaaactggctatcgatcgctataaagaaaacgaaaacgttgagctggtacattatgcccggccgttgctgcgcgaggccgaatcgctggccgacgtcatggcggcggatatgccggcgcaacagcgccgctggctgggcttgcagatgctggaaggcgatatctacagccgcgtttacgccggtaatgccgcgcaaaaccttgaggcgtcgctcactcgcctgagcaaagagatggatgacccggcgctacacatcgctgatgcgcgttatcagtgcatcgccgcaatttgcgacgtggtcagcaacaccctgacggcggaacccagccgtttcaccgcagcggtagataaggtcatcctgaaccgtttcctcgggttgccgattttcctgttcgtcatgtacctgatgttcctgctcgccattaacattggcggcgcgctgcaaccgctgttcgacgtgggttccgtggcgctctttattcacggcattcagtggatcggctacacgctgcacttcccggactggctcaccattttcctcgcgcaggggctgggcggcggtatcaataccgttctgccgctggtgccgcagatcggcatgatgtacctgttcctctctttcctggaggactccggctacatggcgcgcgcggcgttcgttatggaccgtctgatgcaggcactagggctgccgggtaaatcgttcgtgccgctgattgtcggctttggctgtaacgtcccgtccgtaatgggcgcccgtaccctggacgcaccgcgtgaacgtctgatgaccattatgatggcgccgtttatgtcctgcggcgcacgtctggcgattttcgccgtgtttgccgccgcgttctttgggcaaaacggcgcgctggcggttttctcgctgtatgtgctgggtatcgtgatggcggtactgaccggcctgatgcttaaacacacgattatgcgcggcgaagcctctccgttcgtgatggaactgccggtctaccatgtgccgcacatcaaaagtctggtgatccagacctggcaacgcctgaaaggctttgtgctgcgtgccggtaaggtcatcatcatcgtcagtattttcctcagcgcgtttaacagcttctccctgagcggaaaaatcgtcgataacatcaacgactctgcgctcgcgtccatcagccgcgtgattacgcctgtctttaaaccgattggcgttcatgaagataactggcaggcgaccgttggcctgttcaccggcgcaatggcgaaagaggtggtggtagggacgctgaacaccctctataccgctgaaaatattcaggaagaagagtttaatccggctgacttccatctcggcgacgagctgctgggcgcggtcgatgaaacctggcaaagcctgaaagacaccttcagccttagcgtactggctaacccaatcgaagccagcaaaggcgacggtgaaatggcgaccggggcgatgggcgtgatggacgcgaagtttggcagcgccgctgccgcatacagctatctgattttcgttctgctgtatgtaccgtgcatctcggtgatgggggctatcgcgcgtgagtccagccgcggctggatgagcttctcgattctgtgggggctgaatatcgcctactcgctgtctaccctgttctatcaggttgcaagctttagccagcatccgacctatagcctggtctgcattctggcggtcatcctgtttaacatcgtggtgctggggctgttacggcgcgcacgcagccgggtggatatcgaactgctggcgacgcgtaaaacggccagcgcctgctgcgcaagccctgccggtaactgtcactaa

SEQ ID NO: 72751 - DNA, 237 bp, Citrobacter koseri
atggcgtcacttattcaggttcgtgatttactggctttgcaggggcgtatggaggcaatgcagattagccgcacgctgcatacgccgcagccgatgatcgacgcgatgctgaatcagctggagaatatgggcagggccgtgcggattcaggaagatcccgacggctgcctgtccggtagctgcaaaagctgcccggaaggaaaagcctgtctccgggagtggtggacgttgcgttaa

SEQ ID NO: 72752 - DNA, 771 bp, Citrobacter koseri
atgaatgacatctggtggcagactgaaggtcagggaaattgccatcttgtgctgctgcacggatggggactgaatgcggaagtgtggaattgcattcgtgaggaactcagcgcgcatttcacgctgcatcttgtcgatttacccggatttggccgcagccagggttttggctcgatgtcgctggagcagatggcggagcatgtgctgaaacaggcgcctgataaagccgtctggcttggctggagtctgggaggactggtggcgagccaggtggcgttaatccatcctgaacgcgttcaggcgctggtgaccgtcgcgtcatcgccctgtttcagcgctcgcgaagcgtggccgggtattaagccggatatcctggcgggatttcaacagcagctcagcgaagatttccagcgtacggtggagcgttttctggcgctgcaaacgttaggcactgaaaccgcgcgtcaggatgcccgcacgctgaaaagtgccgtgctggcgttgccgatgccggaggttgcggtactgaacggtgggctggagatattgaaaacggccgacctgcgcgagccgcttaaatcgctgaccatgccgttcctgcgtctgtatggttatctggatggtctggtgccgcgcaaagtcgtgccgatgctggatgccgcatggccggagagtgagtcgcaggtgtttgcaaaggccgcccatgcgccgtttatttcgcatcccggcgaattttgtcaggcgttgatggcgttaaagcagaagatataa

SEQ ID NO: 72753 - DNA, 684 bp, Citrobacter koseri
atgctaacagtaccgggattatgctggctatgccgaatgccgctggcgttgagtcactgggggatttgttcggtttgcacgagagcggcgcgtcgccgcgtcagcctgtgcccacagtgtggattacccgctgcgcacgccaccattccctgcgggcgttgtctgcaaaaacccccgccgtggcagcgtctggtgacggtcagcgactacgtaccgccattaagtttacttatccaccagctaaaattctctcgccgcagcgacgtcgccgccgccctttcacgcctgctgttgctggaagtcttacacgcgcaccgcgcatcgacgcttccgctaccggatcgcttagtcagcgtgccgctctggcagcgccgtcactggcgcaggggatttaaccaaagcgatctactgtgtcgccccctggcgcgctggctgggctgcggctgggacagccgaagcgttacgcgccttcgcgccaccgccactcagcaccatctcagcgcccgattgcgcaaacataacctgaaaaatgcgtttcgccttgaattgccggtacagggactccatatggtcattgtggatgatgtcgtcactaccggaagtaccgtcgcggagatcgcgcagctgcttttgcgcaacggcgcggcgactgtccaggtatggtgcctgtgtcgaaccttgtag

SEQ ID NO: 72754 - DNA, 576 bp, Citrobacter koseri
atgatccatatttccgatgctgcacaagcgcactttgccaaactactggcaaatcaggaagaagggacacaaatccgcgtatttgtgatcaatcccggtacgcctaacgctgaatgcggcgtttcttattgtccgccggacgccgtggaagcaagcgacactgccctgaaatttgaccttctgaccgcttatgttgatgaactgagcgcgccgtatctggaagatgccgagatcgatttcgtcaccgatcagctgggttctcagctgacgctgaaagcgccaaacgccaaaatgcgtaaggttgctgatgatgcgccgctgatggaacgtgtggagtacatgctgcaatcgcagatcaacccgcagcttgccggtcacggcggtcgcgtctctctgatggagatcaccgacgaaggctacgccattttgcagtttggcggcggctgtaacggttgctcgatggtcgatgtgaccctgaaagaagggatcgagaagcagctgctgaatgaattccctgagctgaaaggcgttcgcgatctgaccgaacaccagcgcggcgagcactcttactactaa

SEQ ID NO: 72755 - DNA, 1317 bp, Citrobacter koseri
atgccattagtcatcgtcgctatcggtgtaattttgttattactcctgatgatccgcttcaaaatgaacggtttcatcgctctcgtcctggtggcacttgctgttggattgatgcaaggaatgccgctggataaagtcattggctctattaaagctggtgttggtggtactcttggtagcctcgccctgattatgggtttcggcgccatgctgggcaaaatgctggcagactgcggcggcgcacagcgcatcgcgaccacgctgattgccaaatttggtaaaaaacacatccagtgggcagtggtattaaccggcttcacggtaggtttcgcactgttctatgaagtgggcttcgtgctgatgctgccgctggtattcaccatcgcagcggcggccagcattcctttgctgtatgtcggcgtaccgatggcggcagcgctgtccgttacccacggcttcctgcctccgcacccgggcccgaccgccattgccacgatcttccacgccgatatgggtaaaaccctgctgttcggtacgattctggctatcccgaccgtaattctcgctggcccggtatttgcccgcttcctgaaaggcatcgataagccgatcccggaaggtctgtacagcgcaaaaaactttactgaagaagagatgcctggctttggcgtcagcgtctggacttctctggtgccggttattttaatggccatgcgcgccgttgcagaaatggtgctgccaaaaggtcatgccttcctgccggttgctgagttctttggcgacccggtaatggcaacgctgattgcggtactgattgcgatgttcacgttcggtctgaaccgtggccgctcaatggatcagattaacgacacgctgggttcctcaatcaaaatcatcgcgatgatgctgctgatcatcggcggcggcggcgcattcaagcaggtactggttgatagcggcgtagacaaatacatcgcgtccatgatgaacgaaaccaacgtttctccgctgttcatggcgtggtccatcgcagccgtactgcgtatcgcgctcggttctgccaccgtggccgcgattaccgcgggtggtatcgtggcgccgctgattgcgacgacgggcgtaagccctgaactgatggttatcgccgtcggttccggtagcgtcattttctctcacgtaaacgatcctggcttctggctgttcaaagagtatttcaacctgaccatcggcgaaaccatcaagtcctggtcaatgctggaaaccattatctccgtctgcggcctgattgggtgtctgctgctgggaatggtggtgtaa

SEQ ID NO: 72756 - DNA, 2088 bp, Citrobacter koseri
atggaacgcaaacgtctggataatgccgcgctggcggcggggatcagccccaattacatcaatgcccacggtaaaccgcagtcgattggcgccgaaaccaaacggcgtttgcttgatgcgatgcaccgtgccaccgccgccacgaaggtggcggtaacgccagtgccgaatgtgatggtgtataccgcaggcaagaagatgccgctggcggtagaaggcagcggcgattttagctggctgctgaccaccgaggagggcgtacagcacaaggggtacgccaccggcggtaaagcctttacgcttccggcaaagctgccggaggggtatcacacgctgaccctgactcagggcgaacagcgcacgcactgccggatcatcgtggcgccgaaacgctgctatgagccgcaggcgctgctgaccggacagaagctatggggggcgtgcgttcagctttataccctgcgttcggaaaaaaactgggggattggcgactttggcgatctccagtcgatgctgacggatgttgcgaaacgcggcggcgcatttattggcctgaacccgattcacgccctctacccggcaaacccggagagcgccagcccgtacagcccctcatcccgccgttggctgaatgtcatttatatcgacgtgaatgccgttgacgatttccggttgagcaaagaggcgcaggcctggtggaacacgccggcgacgcagcagacattgcagcgcgcacgggacgccgaatgggttgattattctgctgttaccgcgctgaaaatgaccgccctgcggatggcatggaaaggttttgcgcttcgtgatgatgaacagatggcggcgtttcgccactttgtcgcccaggaaggcgacagcctgtactggcaggcggcatttgacgcgctgcacgcgcatcaggtgaaggaagatgagttgcgctggggctggccggtctggccggaagcgtatcagtcagtgaactcgccggaagtgaaacagttctgtgaagatcaccgcgatgaggtggacttttacctctggttacagtggctggcgtatacccagtttgccgcctgttgggcggtatgccagggttatgatatgccgattggcctgtatcgcgatctggcggtaggggttgcggagggcggggcggaaacctggtgcgaccgtgagctgtattgcctgaaagcgtcggtgggcgcgccgccggatatcctcggcccgctagggcagaactggggactgccgccgatggacccgcacatcatcgccgctcgcgcctatgagccgtttattgaactgctgcgcgccaatatgcagaactgcggcgctttgcgtatcgatcatgttatgtcgatgctgcgtctgtggtggattccttacggtgaaacggcggatcacggggcgtatgtgcattacccggtggacgccctgctctctattctggcgctggaaagtaaacgtcatcgctgcatggtgattggcgaagatctggggacggtgccggtggaaatcgtgggtaaactgcgtgacagcggcgtttactcgtataaagtgctctatttcgagaatgatcatgagaagaacttccgcgcgccgaaagcgtacccggaacaatcaatggcagtcgcgacgacgcatgaccttcctacgctgcgtggctactgggacagcggcgacctgacgctcggcaaaacgctggggctttacccggatgaagtgatattgcgcgggctgtatcaggatcgtgagctggcgaagcagggtctgttggacgcgctgcacaaatacggttgcctgccgaaacgcgcggggcataaggcgtcgctgatgtcgatgacgccgatcctcaaccgtggaatgcagcgttacatcgcggacagccatagcgcattgctggggttgcagccggaagactggctggacatggcggagccggtcaatattccaggcaccagcgaccagtacaagaactggcggcgcaagttgtccacgacgcttgagaagatgtttgccgatgacaaggtgaataaactgcttaaagatttggacaagcggcgaaaagcggccgcgaagaagaagtaa

SEQ ID NO: 72757 - DNA, 2394 bp, Citrobacter koseri
atgtcacagcctaccttcaacaaagatcactttcaggctgccctgatgcgtcagtggcagcgtttcggtttactgtcggctcatgagatgacatctcgccagtggtggcaggccgttagcggcgcactggctgaattgctcagcgcgcaacctgcggcgaaaccggctaaaaaccagcgtcatgttaactacatctcgatggaattcctgattggccgcctgaccgggaacaacctgttgaatctgggctggtatcaggcggtgagcgatgtgctgaaaacgcacgacgtcaacctgaccgacctgctggaggaagaggttgatcctgcgctgggcaacggtggtttagggcgtctggcggcatgtttcctggactctatggcgacggtaggccagtccgcaacaggctatggcctgaactaccagtatgggctgttccgtcagtcttttgtcgatgggcaacagatggaagcgccggatgactggcatcgcggtagctacccgtggttccgtcacaatgaacagcttgatgttcaggtcggtattggcggtaaagtgacgaaggacgggcgttgggaaccgggttttgtgatcaccgggcaagcgtgggacttgccggtgctcggctaccggaacggcgtcgcacagccgctgcgtttgtggcaggccgcgcatgcgcatccgtttaacctgaccaaattcaacgacggcgatttcctgcgcgcggagcagcaggggatcgacgcggaaaaactgacgaaagtcctctatccgaacgacaaccacaccgcaggcaaaaagctgcgcctgatgcagcagtatttccagtgcgcctgctcggtagcggatattctgcgccgtcaccacctggcggggcgcaaactgcatgagctggcggagtatgaggtcattcaactcaacgatactcacccgaccatcgctatccctgaactgctgcgcgtgctgctcgatgagcaccagctaagctgggacgacgcctgggccatcaccagtaaaacgttcgcctacaccaaccatacgctgatgccggaagcgctggagtgctgggatgagaaactggtgaaagcgctgctgccgcgccatatgcagatcatcaaagagattaatgaccgctttaagaaacaggttgataaaacctggccgggcgataagcaggtgtgggcgaagctggcggtagtgcacgacaagcaggtgcggatggccaatatgtgcgtggtcagcggctttgcggtcaacggcgttgcggcgctgcactccgatctggtggtgaaggatctgttcccggaatatcaccagctgtggccgaacaaattccacaacgtgaccaacggcattacgccgcgtcgctggatcaaacagtgcaacccggcacttgcggcgctgctggataagtcgttgaagaaagagtgggctaacgacctcgatcagctgatcaacctggagaaattcgccgacgacgcggcgttccgcaaaacgtatcgtgagattaaacaggcgaataaagtccgcctggccgaatttgtgaaaatgcgcaccgggattgaaatcaacccgcaggcgattttcgatatccagattaagcgcctgcacgaatataagcgccagcacctgaacctgctgcatattctggctctgtacaaagagatccgcgaaaatccgaaagcagaccgcgtgccgcgcgtgttcctgtttggcgcaaaagcggcgccgggctactatctggcgaaaaacatcatcttcgccattaacaaggtggcggaaaccatcaacaacgacccgaaagtcggcgataagctgaaagtggtcttcctgccggactactgcgtttcggcggcggaaatgttgatcccggcggcggacgtctctgagcagatctctactgccggtaaagaagcctccggcaccggcaatatgaagctggcgttgaacggcgcgctgacggtcggtacgctggatggggcgaacgttgagatcgccgaacaggtcggggacgagaacatctttatcttcggtcataccgtggaagaggtgaaacggctgaaggccaagggttacgacccggtgaaatggcgtaagaaagacaaagtgctggacgcggtgctgaaggagctggaaagcggcaaatacagcaacggcgacaagcacgcttttgatcagatgctgcacagcattggcaaacaggggggcgatccgtacctggtgatggcggactttgccgcctacgttgcggcacaaaagcaggtggacgtgctgtatcgcgaccaggatgcctggacccaggcgacgatcctgaacaccgcgcgttgcgggatgttcagctcggatcgctccatccgcgattatcaggctcgtatctggcaggcaaaacgctaa

SEQ ID NO: 72758 - DNA, 2706 bp, Citrobacter koseri
atgttgattccgtctaaattaagtcgtccggttcgactcgaccatacggtggttcgtgagcgcctgttggctaaactttccggcgcgaacaatttcaggctggccctggtaacaagccctgcgggctatgggaaaaccacgcttgtttcacagtgggcagccgggaaaaacgagttaggctggttctcgctggatgaaggcgacaaccagcaggagcgattcgccagttatttaattgccgcgcttcagcaggcaacgggcgggcattgctccaccagtgaagtcatggtgcaaaaacgccagtacgtcagcctgacctcccttttcgcgcaactctttattgagttggctgagtggcatcgcccgctttatctggtcattgatgattaccatctgatcacaaacccggtgatccacgacgcgatgcgctttttcctgcgtcatcaacccgaaaatctcacgctggtcgtgctgtcgcgtaatttaccgcagctcggcatcgctaacctgcgcgttcgcgatcagctgctggaaatcggcagccagcaattagcctttaaccatcaggaagcaaaacagttctttgaccgccgtctgtcctcgcctatcgaagccgccgagagcagccggatgtgcgacgacgtcgccggttgggctaccgcgctacagcttatcgccctttccgcccgccagaacaataactccgcgcaccagtctgcgcgacgcctggcgggaatcaacgccagccatctgtctgattacctggtcgatgaagtgctggacaacgtggacgtgagtacccggcattttctgctgaaaagcgccatcctgcgttcgatgaacgatgcgctgatcgtgcgcgtgacgggcgaagagaacgggcagatgcgtctggaggagattgagcgtcaggggctgttcctgcaacgcatggacgatacgggcgaatggttcagctatcacccgctgtttggcagtttcctgcgtcagcgttgccagtgggaactggcgaccgagctaccggatatccaccgcgctgccgccgaaagctggatggcgcaaggtttccccagcgaagccattcaccatgccctggcggcgggcgatgcgcatatgctgcgcgatatcctgctgaatcatgcatgggggctgtttaaccacagtgagctggcgctgctggaagagtcgttaaaggccctgccgtgggaaagtttgctggaaaacccacggctggttctgttgcaggcatggctgatgcaaagccagcaccgctacagcgaagtgaataccctgctggcgcgcgctgagcaagaaattcagggcatgatggacggtacgttgcatgcggaattcaacgccctgcgcgctcaggtcgcgattaacgacggcaacccggatgaagcggaacggctggcaaaactggcgctggatgagctgccgatcgcctggttttacagccgtattgtcgccacctccgtacacggcgaagtgctgcactgtaaaggcgatctctcccgttcactgtcgttgatgcagcaaactgagcaaatgtcgcgtcatcatgacgtctggcattacgccctctggagcctgctccaacaaagtgaaattctcttcgcccagggctttttgcaggccgcctgggaaacccaggagaaagcgttccagctgattaaagagcaacatctcgaacagttgccgatgcacgagttcctgatgcgcattcgcgcgcagcttctgtgggcatgggcgcgtcttgacgaagcggaagcctccgcccgcagcggtattgatgtgctttccgcattccagccgcagcagcaattgcagtgtctggcgctgctggtgcagtgctcgctggcgcgcggcgatctggataatgcccgcacgcagttgaaccgtctggagaacctgctgggcaacggccagtatcacagcgactggatttccaatgccgataaggttcgcgtgatttactggcagatgacgggcgataagaaatccgccgccaactggctgcgtcatacgccgaaaccagaatttgccaacaaccacttcctgcaaggccagtggcgtaatatcgccagggcgcagatcctgctgggtgagtttgaatccgcagagattgtgctggaagagctaaacgagaacgcccgtagcctgcgtttaatgagcgatcttaaccgtaacctgctgttgcttaatcaactgtactggcaggccggacgtaaaaacgacgcccagcgggtgttgcttgatgcgctgcaactggcgaaccgtaccggtttcatcagccactttgtgattgaaggcgaagcgatggcgcagcaactgcgtcagttgattcagttgaatacgctgccggagcttgaacaacatcgcgcacagcgcatcctgcgggaaattaaccagcaccatcgacataagttcgcccattttgacgaaggctttgtggagcggctgttaaatcacccggacgtaccggagctgatccgcaccagcccgctaacgcagcgtgagtggcaggttctgggactgatttattccggctacagcaacgagcaaatcgctggcgagctggcggttgcggccacgaccatcaaaacgcacattcgcaatttatatcagaagctcggcgtcgcgcatcgtcaggacgccgtacaacatgcgcagaggcttttgaaaatgatggggtacggggtgtga

SEQ ID NO: 72759 - DNA, 759 bp, Citrobacter koseri
atgaaacagacacaacgtcatgacgctatcatcgaactggtaaaaaagcagggatacgtcagcactgaagaactggtggaacatttctccgtcagcccacaaaccattcgtcgggatctcaacgacctggcggagcagaatatgatcctgcgccaccacggcggcgcggcgttgccttccagctcggtaaacacgccgtggcacgatcgtaaagcgacgcaaacggcggagaaggaacgtattgcgcggaaagtcgccacgcaaatccccaacggttcaacgctgtttatcgatatcggcacgacgccggaagcggtggcgcatgccttgttggatcacagtaacctgcgcattgtgaccaacaatctcaacgtggcgaacacgctgatggtgaaagaggattttcgcattattctcgctggcggtgagcttcgcagccgtgacggcggcattattggcgaagcgacgctcgatttcatctctcaattccgcctggattttggcattctggggatcagcggtatcgacagcgacgggtcgctgctggaatttgattatcacgaagtacgcacgaaacgcgcgattattgaaaattcacgccatgtgatgctggttgtggatcactctaagtttggtcgtaatgcgatggtgaatatgggcagcattagcctggtggatgccgtctataccgatatgacgccgccagcaggggtattgcaggtacttaccgaccaccatattcagttagagttgtgctga

SEQ ID NO: 72760 - DNA, 831 bp, Citrobacter koseri
atgttgatgattacctcttttgctaacccccgcgtggcgcaggcatttgttgattacatggcgacgcagggcgttatcctgacgattcaacaacatcatcaaagcgatgtctggctggcggacgaatctcaggccgagcgcgtgcgggcggagttggcgcgctttctggaaaatcccgccgatccgcgttatctggcggcaagctggcagtccggtcataccggcagtgggctgcactatcgccgtttcccgtttatcgccacattgcgcgagagggcgggcccggtcacctggcttattatgatcgcctgtatcctggtgttcgttgtgatgagcatcgtcggcgcgcagagcgtcatggtgtggctggcgtggccgtttgatccgtcactgaaatttgagttctggcgctatttcacccatgcgtttatgcacttctcgttaatgcatatcctcttcaacctgttgtggtggtggtatatcggcggggcggtggaaaagcgtctgggcagcggaaaactgattgttattaccgtcatcagcgcattgctgagcggttatgtacagcagaaattcagcggcccgtggtttggtgggctttccggcgtggtttacgcgctgatgggctacgcctggctacgtggtgaacgcgatccgcaaagcggcatatatctacagcgtgggcttattgcttttgcgttgatctggattgttgccgggtggtttgatgtgtttggcatgtcgatggcgaacggtgcgcacatcgccgggctggccgtggggctggcgatggcatttgctgacacggtgaatgcgcgaaaacgaacatga

SEQ ID NO: 72761 - DNA, 327 bp, Citrobacter koseri
atggatcagtttgaatgtattaatgtcgaagaagctcaccagaaactgcaccagggaacggcggtgctggtggatatccgcgatccgcaaagctatgcgatgggccacacgccgcaggcgttccatctgaccaacgatacgctgggcgagtttatgcgcgaccatgatttcgataccgtggtgatggtgatgtgctatcacggcaatagcagcaaaggcgcggcacagtacctgctacaacagggttatgacgcggtttacagtattgatggcgggtttgatgcctggcaccgccatttcccctcagaggtggcatttggcgcttaa

SEQ ID NO: 72762 - DNA, 1509 bp, Citrobacter koseri
atggaaaccaaagatctgattgtgataggcgggggcattaacggtgcgggtatcgcggcagacgccgccggacgtggtttatccgtgctcatgctggaagcgcaggatttggcctgtgcaacctcttccgccagctctaaattaattcacggtggcttgcgctaccttgaacactacgaattccgcctggtcagcgaagcgctggccgaacgtgaagtgctgctgaaaatggcgccgcacatcgccttcccgatgcgcttccgcctgcctcaccgcccgcacctgcgcccggcatggatgatccgaattggtctgtttatgtacgatcatctgggcaagcgcaccagtctgcccggttcaaccggtttgcgttttggcgcagattcggtgctgaaaccggagatcgtgcgcggtttcgaatattctgactgctgggtagacgatgcgcgtctggttctggcaaacgcccaaatggtggtgcgtaaaggcggggaagtgttaacccgtacccgagcgacctctgcccgccgtgaaaacggtctgtggatcgtagaagcggaagatatcgataccggtaaaaagcacacctggcaggcgcgtggtctggtcaacgccacggggccgtgggtaaaacagttcttcgacgacggtatgcacctgccttcaccctacggcattcgtctgatcaaaggcagccacattgtggtgccgcgcgtgcatacgcagaaacaggcttatatcctgcaaaacgaagataagcgtatcgtatttgtgattccgtggatggatgagttctcaatcatcggcaccactgacgtggagtacaaaggcgatccgaaagcagtgaaaattgatgaaagcgaaatcaattacctgctgaaagtctataacgcgcacttcaagaaacaactaggccgcgacgatatcgtctggacctactccggcgtgcgtccgctgtgcgatgacgagtccgattctccgcaggcgatcacccgtgactacacgctggatatccacgatgaaaacggcaaagcgccgctgctgtcggtattcggcggtaagctgaccacttatcgtaagctggccgaacacgcgatggaaaaactgtcgtcctattaccagggcattggcccggcctggactaaagagtgcgtgcttcctggcggggatatcggcggcgatcgtgaagattacgcggccaaactgcgccgccgctatccgttcctgacggagtcgctggcgcgtcattattcccgcacctacggcagcaataccgagtggatactcggcgaagccacctccgttgccgagttaggtgaagatttcggtcacgaactttacgaagcggagctgaagtatctggtggatcacgaatgggtacgtcgtgcggacgacgcgttgtggcgccgcaccaaagaagggatgtggctcaacgccgagcagcagtcccgcgtgagccagtggctggcggaatatattggcaaacgtcagttgtcgctggcgtcgtaa

SEQ ID NO: 72763 - DNA, 2448 bp, Citrobacter koseri
atgaatgctccatttacttatgcatcgcccactcttagcgtagaagcgcttaagcattctattgcctacaaactgatgttcacgattggtaaagatccggtcattgccaataaacatgaatggctgaacgccacgctgttcgcggtgcgcgatcgcctcgtggaacgctggctgcgttctaaccgtgctcaactgtcgcaggaaacccgtcaggtctattacctgtcgatggaatttttgattggccgaaccctctccaatgccttgttatcgttgggtatttacgacgatgttaaaggggcgctggaagcgatggggctggatctcgaagaactgattgatgaagagaacgaccccggtcttggcaacggcggtcttggccgtctggcggcgtgcttccttgattcgctggcgaccctgggtctgccggggcgcggctatggaattcgctacgactacggcatgttcaagcagaacattgtcgaggggcggcagaaagagtccccggactactggctggaatacggcaatccgtgggagttcaaacgccataatacgcgctacaaagtgcgtttcggcgggcgaattcagcaggaaggcaagaaagcccgctggattgaaaccgaagagattctggcggtggcctatgaccagattatcccgggctatgataccgacgccaccaacacgctgcgcctgtggagcgctcaggccagtagcgaaatcaaccttggtaaatttaaccagggcgactatttcgcggcggtagaggataaaaaccactctgaaaacgtatcccgcgtgctttacccggatgactccacctattcgggacgcgagctgcgcctgcgtcaggagtacttcctggtttcctcaacggtacaggacattctgagccgccactaccagctgcataaaacctatgacaacctggcggataaaatcgccattcacctcaatgatacccacccggtgctgtcgatcccggaactgatgcgcttgttgattgatgagcacaaattcagctgggacgatgcgtttgaggtgtgctgccaggtcttctcctacaccaaccacacgctgatgagcgaagcgctggaaacctggccggtggatatgctgggtaaaatcctgccgcgtcatttgcagatcatctttgagattaacgactacttcctgaaaacgttgcaggagcagtatcccaacgataccgctctgctggggcgggcgtcgattatcgatgagtctaacggtcgccgcgtccgtatggcgtggctggcggtggtggtgagccataaagtgaatggcgtatcggagctgcactctaacctgatggtgcagtcgctgtttgctgattttgcgagtatcttcccgacccgcttctgcaacgtgaccaacggcgtgacgccgcgccgctggctggcgctggcgaacccgtcgctttctgaggtgctggacgaaaatatcgggcgcacctggcgtacggatctcagccagctaagcgaactacagcagcattgcgatttcccgctggtgaatcacgcggtgcgccaggcgaagctggaaaacaaaaaacggctggcaatactcatcgctcagcagttgaacgtggtggtcaatccgaaggcgttgtttgatgtgcagattaaacgtattcacgagtacaaacgtcagttgatgaatgtgctgcatgtgattacgcgttataaccgcatcaaggaagatcctgaggcggaatgggtgccacgcgtgaatatctttgccggtaaggcggcttcggcctattacatggcgaagcacattattcacttgatcaatgacgttgctaaggtgatcaacaacgatccgcagattggcgataagctgaaagtggtgtttatcccgaactacagcgtgagtctggcgcaggtcattattcctgccgccgacctgtctgagcagatttcgctggcgggtacggaggcgtctggcaccagtaacatgaagtttgcgctcaacggcgcgctgaccatcggtacgctggacggcgcaaacgtcgagatgctggagcatgtgggggcggagaatatctttatctttggtaatacggcggaagaggtggaagaactgcgcaagcagggctataaaccgcgcgagtattacgaaaaagatacggagctgcaccaggtgctgacgcagatcggcagcggcgtgttcagcccggaagagccggggcgctaccgtgatctggtggattcgttgattaactttggcgaccactatcaggtgctggcggattatcgtagctatgttgattgccaggataaggtggatgaattgtatcgtcatcccgaagagtggaccgcgaaagcgatgctcaatatcgccaatatggggtatttctcttccgacaggacgatcaaggagtatgccgaaaatatctggcacattgattcggtaaggttgtaa

SEQ ID NO: 72764 - DNA, 1434 bp, Citrobacter koseri
atgcaggttttacatgtatgttcagagatgttccccctgctcaaaacaggtggtctggcggatgtgattggcgcgttgcctgcggcacagattgcggatggtgtggatgctcgtgtgctgcttcctgcatttcctgatattcgtcggggtatcccggatgcgcaggtagtgacccggcgcgatacctttgcgggaagaattacgctcctgttcgggcattataacggcgtgggaatctacctgattgatgcgccgcatctgtatgaccgtccgggaagcccttatcacgatacgaatttattcgcctataccgataacgtcctgcggtttgcgctgttgggatgggtgggatgtgaaatggcctgcgggcttgatccattctggcgcccggatgtggtgcatgcgcacgactggcatgcaggcctggcgcctgcgtatctggctgcgcgcgggcgtccggcgaaatcggtgtttaccgtacacaacctggcctatcaaggcatgttttatgcacatcacatggatgacatccaactgccatggtcgttctataacatgcatggtctggagtttaacgggcagatttcattcctgaaggcggggttgtattacgccgaccatattacggcggtgagcccgacctatgcgcgtgaaattaccgagccgcagttcgcgtacgggatggaaggcctgctgcgtcagcgtcatcaggaagggcgtctgtccggcgtgctgaatggcgtggatgagaaaatctggagcccggaaacggatctgctgctggcggcgcgctatacgcgtgattcgctggaggagaaagcggagaacaagcgccagctacagattgcgatggggctgaaagtggatgacaaagcgccgctgttcgccgtggtcagccgtctgaccagccagaaagggctggatctggtgctggaggcgttgccgggattgctggagcagggcgggcaactggcgctgctgggcgcgggcgatccggtattgcaggaaggatttttagcggcggcggcggaacacccaggccaggtgggcgtgcagatcggctatcacgaagccttctctcaccgcatcatgggcggggcggatgtcattctggtgcccagccgctttgagccgtgcggcttaacgcagttatacggactgaagtacggcacgctgccgttggtgcggcgtaccggtgggcttgctgatacggtgtcggacagttcgctggaaaacctggcggacggcatcgccagtgggtttgtatttgaagatagtaatgcctggtctctgttacgggcgatccggcgtgctttcgtgttgtggtcccgaccttcgctctggcggtttgtgcaacggcaggctatggccatggattttagctggcaagtcgcggcgaagtcttaccgcgagctttactatcgcttgaaatag

SEQ ID NO: 72765 - DNA, 1296 bp, Citrobacter koseri
atggtgagtttagagaagaacgatcgtgtaatgttggcgcgccagctgccattaaaatctgttgccctgatcctggccggtggccgtggtacacgcctgaaagatttaaccaacaaacgtgccaaacctgccgtgcactttggcggtaagttccgcatcatcgattttgccttatccaactgtattaactccgggatccgccgtattggcgtgatcacgcaataccagtctcatactctggtacagcatattcagcgcggctggtcattcttcagcgaagagatgaacgaattcgtcgacctgcttcccgcccagcaaaggatgcagggcgaaaactggtatcgtggaacggcggatgccgtgacccagaacctggacatcattcgtcgctataaagcggaatatgtggtgatcctcgcgggcgatcatatctacaagcaggactactcgcgcatgctgatcgaccacttcgaaaaaggagcgcgctgtaccgtggcgtgtatgccggtgccgattgaagaggccaccgcgtttggcgtgatggcggtggacgagagcgacaagatcatcgagtttgttgaaaaaccggcgaatccgccagccatgcctggcgacgcgacgaaatctctcgccagcatggggatctacattttcaacgccgattatctgtatgagttgctggaggaggacgacaaagacgacacctccagccacgatttcggtaaagatatcatcccaaaaatcaccaaagctggtatggcatatgcgcatccattcccgctgtcctgcgtgcagtccgatcccgaatctgagccttactggcgcgatgtgggcacgctggaagcctactggaaagccaacctcgacctggcctcggtgacgccggaactcgacatgtatgatcaggactggccgatccgcacgcacatggagtctctgccgcctgcgaaatttgttcaggatcgctccggcagccacggcatgacgctcaactcgctggtctccggcgggtgcattatatccggttcggtggtggtgcagtccgtcctgttcccgcgcgtgagggtgaactcattctgtaacatcgattcggcagtcctgctgccagaggtctgggttggacgctcatgccgcttgcgtcgttgcatcatcgatcgcgcctgtgtaatcccggaagggatggtgattggcgaaaacgcggaagaagatgcccgtcgtttctaccgttcagaggaaggcattgtgctggtcacgcgtgaaatgctgcgcaaattgcaggtcaaacaggagcgataa

SEQ ID NO: 72766 - DNA, 1974 bp, Citrobacter koseri
atgacgcaactggcaaccggcaaagcgacaccgcatggcgcgacgtatgacggtcatggcgtcaacttcacgctcttttcggcgcatgcggagcgcgttgaactgtgcgtgtttgatgcgctcggcaatgagcagcggtatgacctgccggggcgcagcggcgatgtctggcacggctaccttgccgacgccagacccggcctgcgctacgggtatcgcgtacacggcccgtggcaacccgcgcaagggcaccgctttaacccggcaaaactgcttatcgatccctgcgctcgccgcgttgaaggagagctgaaggataacccgctgctgcacggcgggtacgacgagccggaccatcgtgataatgccgccgttgccctgaagtgcgttgtcaccgccgaccgctatgactgggaagatgacgccgcgccgcgcacgccgtggggcaacacggtcatctacgaagcgcatgtgaaggggctgacgtacctgcatccggcgatcccgtcagagattcgcggcacctggaaggcgctgggccatccggtgatgatcgcgtatttcaagcagttgggcattaccgcgctggagctgttgccggtggcgcattttgccagtgaaccgcgcttacagcgcctggggctgtcgaattactggggctataacccggtggcgatgttcgcgctgcatccggcttatgcctgctccccggaaacggcgctggatgagtttcgcgatgccatcaaagcgctgcataaagccggtattgaagtcattcttgatattgtgctgaaccatagtgcggagctggatctcgacgggccgctcttctccctgcgcggaatcgacaaccgtagctattattggatcaaggaggatggcgactatcacaactggaccggctgcggcaacaccctcaatctgagccatcccggcgtggtggagtttgcgtgcgagtgcctgcgctactgggttgaaacatgccatgtggacggttttcgttttgatctggcctccgtgatggggcgcaccccagcgttccgtcaggatgcgccgctgtttaccgccatcaacaattgcccggtattgtcgagcgtgaagctcattgctgagccctgggatatcggcgaaggcggctatcaggtggggaatttcccgccgccgtttgccgagtggaacgaccatttccgtgacgcggcccgccgcttctggttgcaacgcaatctgcccctcggtgagtttgccggacgtttcgccggttccagcgatgtgtttaaacgccacgatcgcctgcccaatgcgtccgtcaatctgatcaccgcgcatgacggttttacgctgcgcgactgtgtttgtttcaatcagaaacacaatgaggcgaacggtgaggaaaatcgggacggcaccagcaacaattacagtgataatcatggtaaagagggattaggcggcacgctggatctgattgaacggcggcgcgacagcattcacgccctgctgaccacgttgttgctctctcagggaacgccgatgctgctggcgggcgatgaacacggccatagccagcacggcaacaataacgcttactgccaggataacgcgttaacctggctggactggcagcaggcaaacagtgggctaaccacctttaccgctgcattgattcatcttcgccagcagataccggcattagtgggaaatcgctggtgggaagaaaatgacggcaatgttcgttggctgaataaaaatgcagagcccttaagcgcgggcgagtgggaaaacgggccgaaacagatgcagatcctgctttcagaccgcttccttatcgcgataaacgccacgcttgaggtgacagatatcgttttacctgaaggggagtggcacgctattcccccattcgctggagaggataatccggtgattacggctgtctggcagggacctgcgcacggactgtgtgtgttccagagatga

SEQ ID NO: 72767 - DNA, 2187 bp, Citrobacter koseri
atgtccgatcgtatcgatagagacgtgattaatgcgctaattgcgggccattttgcggaccctttttccgtacttggtatgcaccaaaccaccgcgggactggaagtccgcgccctattgcctgatgccaccgaagtgtgggtgattgaaccgaaaaccggacgtaaagtcggcaaactggaatgtatcgactcacgcggtttttttagcggtgtgctcccccgacgcaaaaatttctttcgctatcagctcgctgttgtctggcatggacagcagaatctgattgacgatccttaccgttttggcccgctgatccaggaaatggatgcctggttgctgtctgaaggcacgcatttacgcccgtatgaaacgctgggcgcacatgccgacacaatggacggcgttactggaacccgtttttccgtctgggcgccgaatgcccagcgcgtctctgtcgttgggcaattcaactactgggatggccgccgccacccgatgcgcctgcgcaaagagagcggtatctgggagctgtttattcccggcgcgcaacacggtcagttgtacaagttcgagatgatcgatgcgcatggcaagctgagaatcaaagccgacccgtatgcgtttgaagcgcaaatgcgcccggaaacggcctcgctgatctgcggtctaccggaaaaagtggtgcagacggaagagcgcaaacaagccaaccggttcgatgcgcctgtctccatctatgaagtgcatctgggctcgtggcgtcgtcataccgataacaatttctggctgagctaccgcgaactggcggatcagcttattccatacgtaaaatggatgggctttacccacctcgaactgcttcctgttaatgaacatccctttgatggcagctggggctaccagccgaccgggctgtatgcgccgacccgccgtttcggcacgcgcgatgacttccgctattttatcaatgccgctcatcaggcgggtctgaacgtcattcttgactgggtgccgggccacttcccgtcggatgattttggtctggcggatttcgatggcaccaaactgtatgagcacagcgacccgcgcgaagggtatcaccaggactggaacacgcttatctataactacgggcgccgtgaagtcagcaactatctggtcgggaacgcgctttactggattgagcgtttcggcattgatgcgctgcgtgtagacgccgtggcgtcgatgatttaccgcgactacagccgcaaagaaggcgagtggatccccaacgagttcggcgggcgtgagaacctggaagccattgagttcttacgcaataccaaccgtattctgggagaacaggtgtctggcgcggtgagcatggccgaggagtccactgacttcgctggcgtgtcccgaccacaggatatgggcggactgggtttctggtacaaatggaacctgggctggatgcatgacacgctggactacatgaagctggacccggttcatcgccagtatcatcacgataagctgaccttcggcatgctctacaactacaccgaaaactttgtcctgccgctgtcgcatgacgaagtggtgcatggcaaaaaatcgattctcgaccgtatgcctggcgacgcctggcagaaattcgccaacctgcgcgcctattacggctggatgtgggcgttccccggtaagaaactgctgtttatgggcaacgagttcgcccaggggcgcgagtggaaccacgacgccagccttgactggcatctgctggaaggcggcgacaactggcaccacggcgtacagcggctggtgcgcgatctcaaccatacctatcgccaccataaagcgctgcatgaacttgattttgacgcttacggttttgaatggctggtggtggatgataacgaacgttcggtgctgatttttgtccgccgcgataaagtcggcaatgaaatcatcgtcgccagcaactttaccccggtgccgcgccatgactatcgttttggcatcaatcagccagggaaatggcgggagattgtgaataccgactccatgcactaccacggcagcaataccggcaacggcgggggggtgcacagcgacgagatcgccagccacggccgccagcactcattgagtctgacgctgccgccgctggccaccatctggcttgtgcgggagggtgaatga

SEQ ID NO: 72768 - DNA, 1107 bp, Citrobacter koseri
atgaaaaatgttggttttatcggctggcgcggtatggtcggctctgtactcatgcaacgcatggttgaagagcgcgacttcgatgccattcgccctgttttcttttctacttcccagcttgggcaggcagcgccgacgttcggcggtacgcccggcggcacacttcaggatgcctttgatctcgacgcgctgaaggcgcttgatatcattgtgacctgtcagggcggcgattataccaacgaaatctatccaaagctccgtgaaagcggctggcagggctactggattgacgcggcatcctcgctgcgcatgaaagacgacgccatcattattcttgatccggttaatcaggatgtcattaccgacggcctgaacaacggcattaaaaccttcgtcggcggtaactgtaccgtcagcctgatgctgatgtcgctgggcggtctgtttgctaatgacctggtggactgggtttctgttgcgacttaccaggcggcgtccggcggcggtgcgcgtcatatgcgcgaactgctggcgcagatgggccacttgtacggtcacgtagccgatgagctggcgacgccttcttccgcgatcctcgacattgagcgcaaagtgacgaccctgacccgcagcggcgacctgccggttgataactttggcgtaccgctggcgggcagcctgattccgtggatcgacaaacagctcgataatggccagagccgcgaagagtggaagggccaggcggaaaccaacaaaattctcaatacctcttccgtgatcccggtggatggtctgtgcgtgcgcgtcggcgcgctgcgctgccacagccaggcattcaccattaaactgaaaaaagacgtgtctgttccgaccgtagaagaactgctggccgcgcacaacccgtgggcgaaagtggtgcccaacgatcgtgacattaccctgcgtgagttaaccccggcagccgttaccggcacgctcaccacgccggttggccgcctgcgtaagctgaacatggggccggagttcctctccgcctttaccgttggcgatcagctgctttggggcgcggcagaaccgctgcgtcgtatgctgcgtcagctggcgtaa

SEQ ID NO: 72769 - DNA, 534 bp, Citrobacter koseri
atgaatgaaatcatttcagcggcagttttattgatcctgattatggatccactcggaaacctgcccattttcatgtccgtactgaaacataccgaaccaaagcgccgccgggcgattatggttcgcgagctgtttattgcgcttttactgatgctcattttcctgtttgcgggcgagaaaattttggcctttctcaacctgcgggcggaaaccgtgtcgatctccggggggattattctgttcctgatcgccattaagatgattttccccagcgcatcaggcaacagcgccggactcccggcgggcgaagaaccgtttatcgtaccgctggccatccctctggtggcgggcccgaccatcctggcgacgctgatgctgttatcgcatcagtatccgaaccagatggggcatctggtcatcgctctgctgggcgagaaaggggttaacgcgctggaacgtctgatggggttgattctggtaatgatggcgacccagatgttcctggacggcgttcggatgtggatgaaaggctag

SEQ ID NO: 72770 - DNA, 1341 bp, Citrobacter koseri
gtgagtacattaacgcttgttttaacagcagtaggttctgttttactgctgctgtttttagtgatgaaggcgcgtatgcacgccttcgttgctttgatggtggtgtctattggcgctggtctcttttccggtatgccgctcgataaaatcgcggcgacgatggaaaaagggatgggcggtacgcttggcttcctggcgattgtcgtcgcactgggcgccatgttcggcaaaattttgcatgagacgggcgcagtcgatcagattgccgtcaaaatgctcaaatctttcggccacagccgcgcgcattacgcgattggtctggcggggctgatttgcgcgctgccgctgttctttgaagtcgccattgtgctgctgatcagcgtcgcattctctatggcgcgccataccggaacaaaccttgtgaaactggtcattccgctgtttgcgggcgtggcggcggctgcggcgtttctgctgcccgggcctgcgccgatgctgctggcgtcccaaatgcacgctgattttggctggatgatcctgattggcctgtgcgcggcaatccctggcatgatcatcgccgggccgctgtttggtaatttcattggccgctatgtggaactgcacgtcccggacgacattaccgaaccgcatctgggcgaaggtaaaatgccgtcgtttggcttcagcctctcgctgatcctgctgccgctggtgctggtagggctgaaaacgatcgccgcgcgctttgtcgcggaaggttccagcgcttacgaatggtttgagtttatcggccacccgttcaccgcgattctggtggcgtgcctggtggcaatctatggcctggcggtgcgtcaggggatggcgaaagataaagtcatggcgatctgcggtcaggcgctgcaaccggcgggcattattctgttggtgattggcgcaggcggcgtgttcaagcaggttctggtggattccggcgttggcccggcgctgggcgaagcgttaaccggcatgggcttgccgattgccatcacctgcttcgtgctggcggcagcggtgcgtatcattcagggttccgcgaccgtcgcgtgcttaacggcggtggggctggtgatgccggtggtggaacaactgaacttctccggcgcgcagatggcggcattgtctatctgtatcgcaggtggttctatcgtggtcagccacgtaaacgacgccggtttctggctgttcggtaaattcactggcgcgaccgaagcgcaaacgctgaagacctggacgatgatggaaaccattctcggcaccgtcggcgcgattgtcggtatgattgcgttccagcttctgagctga

SEQ ID NO: 72771 - DNA, 531 bp, Citrobacter koseri
ttgagcacgactaaccatgatcaccacatttacgttctgatgggcgtatcaggcagtggcaaatccgctgtcgccagcgaagtggcgcatcagctgcatgccgcgtttcttgatggcgattttctccatccgcgttgcaacatcatgaaaatggcctccggcgagccgttgaatgacgacgaccgcaagccgtggttacaggcgctgaacgatgcggcgtttgcgatgcagcgaaccaataaggtatcgctgattgtctgttccgcactgaaaaaacactatcgcgacctgctgcgcgacggtaatccaaacctgtctttcatctacctgaaaggggattttgacgttatcgaaagccgcctgaaggcacgtaaaggccacttctttaaaacgcagatgctggtaactcagtttgacacgctggaagagccgggcgctgacgagagcgatgtactggtggtgaatatcgatcagccgctggaaggtgtcgtggcaagcaccattgaggtcattaacaaaggcagtaagtag

SEQ ID NO: 72772 - DNA, 1050 bp, Citrobacter koseri
atgcacgtccgtggtaaactggggaaatctatcccttttatgcctttcaggacgatgaaaaagaaaagacccgtacttcaggatgtggctgaccgcgtaggcgtgaccaaaatgacggtcagccgttttctgcgtaacccggagcaggtctccgtcgcgctgcggggcaagatcgctgctgcacttgatgaactgggttacattcccaatcgtgctcccgatattctttctaacgcgaccagccgtgcggtgggcgttctgctgccgtcgttaaccaaccaggttttcgccgaggtgttacgcggaattgagaccgtcaccgatgcccacggctaccagacgatgctggcgcactacggctataagccggaaatggaacaggaacgtctggagtcgatgctgtcatggaacattgacgggttaatcctcactgaacgtacccatacgccgcgcacgctcaaaatgattgaagtcgcgggcattccggtggtggagctgatggacagcaaatcgccatgcctcgatatcgccgtcggttttgacaactttgaagccgcgcgtcagatgaccgccgcgattatcgcgcgtggccatcgtcatatcgcctatctgggggcgcgcctcgacgaacgtactatcatcaaacagaagggctatgaacaggccatgctggacgccgggctggtgccctacagcgtgatggtggagcaatcgtcgtcttactcttccgggattgagctgatccgtcaggcaagacgtgaatacccacaactggacggtattttctgtaccaacgatgaccttgccgtcggggcggcgttcgaatgccagcgtttagggctcaaaattcctgatgatatggcgattgccggtttccacggccacgacattggtcaggtgatggaaccgcgtctggccagcgtacttacgccgcgtgagcggatgggcagcatcggcgcagagcgcctgctggcgcgcatacgcggtgaagcggtgacgcctaaaatgttagatttaggtttcaccttgtcaccgggtggatctatttag

SEQ ID NO: 72773 - DNA, 696 bp, Citrobacter koseri
atgatctacttacgcaaagcaaacgaccgtggtcatgcgaatcatggctggctggattcctggcatactttttcttttgcaaactactatgaccctaactttatgggcttctcggcactgcgcgtgattaacgatgacgttattgaagcaggccagggctttgggacgcacccgcataaagacatggaaatcctgacctatgtgctggaaggcgcagtggaacaccaggacagcatgggtaacaaagagcaggttcctgccggtgagttccagatcatgagcgccgggacgggcattcgtcactcggaatacaacccgagcaataccgaccgcctgcgtttgtatcagatttggatcatgccgcaggaaaacgggattacgccgcgttacgagcagcgtcgttttgacgccgtacagggcaaacagttggtgctgtcgccggatgcgcgcgacggttcgctgaaagtgaatcaggacatggagctgtaccgttgggcgctgctgaaagacgaacagtcggtacaccagatctccgccgaacgccgcatctggattcaggtggtgaaaggtaacgtcaccattaacggcaccaaagcgtctaccagcgacggtctggcgatttgggatgagcaggcgatctccatccatgccgacagcgatagcgaagtgttgttgttcgacctgccgccagtttaa

SEQ ID NO: 72774 - DNA, 1281 bp, Citrobacter koseri
atggcgcttgtgatgccggatggcgcttatgcttatccggcctacgatctgaccgcgacgtcgacgaccgatcttgaggcttcttcttttgtaggccggataaggcaacgccgtcatccggcaatggctcttgtgacgccggatggcgcttatgcttatccggcctacgatcgtttcaccgctatttcccatatgttgtttgcgctatggtgtatgcaatcacctttcaaaaaggacactcccatgaccttacactgcgcatttattggctttggtaaaagcaccacccgctaccatctgccgtatgttcttaaccgtaaaggcagctggcatgttgcgcatatcttccgccgtcacgcgaagccggaagagcaggcgccgatctactcgcatattcacttcaccagcgatcttgatgaagtgctgaacgatccgcaggtaaaactggtgatcgtctgtacccatgcggacagccattttgactacgcccggcgcgcgctggaggcgggaaaaaacgtgctggtggaaaaaccgtttacgccaacgcttgccgaggcgaaagtgttgttcgaactggcgcggagcaaagggctgaccgtcacgccgtaccagaaccgccgctttgactcctgtttcctgactgccaaaaaagcgattgagagcggtaaactgggcgagattgttgaagttgaaagccactttgattactaccgaccggttgcggaaaccaaacctggcctgccgcaggacggcgcgttttatggcctcggcgtgcatacgatggatcaaattatttcgctgttcggacgcccggaccatgtggcttatgacatccgcagcctgcgcaataaagccaacccggatgatacgttcgaagcgcagctgttttacggcgatctgaaagccatcgttaaaaccagccatttagtgaagattgattacccgaaatttatcgttcacggcaccagaggctcgtttgtgaagtacggcatcgaccagcaggaaaccagcctgaaggccaatatcatgcccggcgaaccggggtttgcggcggatgattctgtcggcctgctggaatacgttaatgacgaaggtgtgacggtgaaagaagagatgaaaccggaggtcggcgactatggccgcgtttatgacgccctgttcgagaccctcacgcatggcgtgccaaattacgtcaaggaatctgacgttctcaccaaccttgagatccttgagcgggcgtttgaacaggcgtctccggccacagtaacccttgcgaaataa

SEQ ID NO: 72775 - DNA, 489 bp, Citrobacter koseri
atgagcgagatagtgatacgccacgcggaatcaaaagattacgacgcaattcgtcagatccatgcccagccggaggtgtatcacaacacgctacaggttcctcatccttccagtgcgatgtggcaggagcggctagccgaccagcccggcatcaaacagctggtcgcctgtattgacgatactgtcgttgggcatctcaccattgcggtcatccagcgtccgcgccgcagccatgtcgccgattttggcatcagcgttgatgcgcggtggcaaaaccgtggggtcgccagcgcgctgctccgtaccatgatcaacatgtgcgataactggctgcgcgtggagcgtatcgagctaacggtatttgtcgataatgaacccgccgtggcggtctacaagaagcatggttttgagattgaaggcaccggcaagaagtacgcactgcgtaacggtgagtatgtcgacgcatactttatggcgcggatgaagtaa

SEQ ID NO: 72776 - DNA, 1254 bp, Citrobacter koseri
atgggaaatattgtctacctgacaattgcaggggagttgcaaggtgctatttccgatggatgtggaagcactgcctcagtgggcaaccgctggcaaaccggacacgaggatgaaattttcgtgttttcactctcgaatagcataaccagtactggtaaaggttctcaactgcatggactgcgattttgtaaactgatcgataaaagcacgccattgtttgttaatgctattaacaacaacgagcagttgtatatggagttttatttctaccgcatcaatagattcggtagatgggagaagtattattatattcaactgcggggagcatttctatcaggtattcaacaccaattcagcgaaaataatttagatacagaaacaataaccatcagctatgaatatatcctctgcaaacaccttattgccaacactgaattcagctacctggcgttgcccgagaactacaaccgcctgtttatcccccgtccaaaaacacccgcagataacagcctcaaaacgttaaacagcaaaggggttggcagattgcttgccgccggaggtatctacaacgggaatatcgaaggtttcagggaaacggcagaaaagttgggaggagatgcgattaagggatatgatcacgtcctgaatgatcaaacgaaaggaaccataatagccttagcatcaatcgcttctgtctttggtatggggcggttaggattagcttcggaggtggaaaagttcggacaggcaaaagtctggaagacactatcagttccagatagcattgacaccactaccattgcaacaacaggacaaaattaccgcgcaattgccgctggtgctgaagacttgagtgttgcgcaaacaaaaacgctgacacaattgcccaaaatgggctcaagaattattgtaaccaaaggctttggacagaatgatttagcagcgcttagtgcagctacaggtgacgagtttgcaatgtttacaacaggtggtagaagattgattattcgcggaaatgcaaccggagtaccaataggtattgttgaagctgaagagcttgctactaaaggttggcgatggtccagccatgttcatccagatggaaccttaagatcttctcttggtgatagagcgattttgaagatatttaaggatcacaatttgaatagtaagagttctatatctgatccttatggacgcaggttcaacttttcacctgatggcgatttaattagcccagaatggagaccatag

SEQ ID NO: 72777 - DNA, 258 bp, Citrobacter koseri
atgaaaaaaatacctttagacattttagaacgaaaagcaaaagaaattagcagaaagacattgggtgattatatattgccagacaatatattttcacaattggcttcaggagtaattattgatggtgacgacagagtttttgtgctgttcattcctaaagagctagcaaaagatacaatagacatacttagaataagaatgaatatttattcaggagaaggttttgtagaatatattgggcttgagcggaaaaagtag

SEQ ID NO: 72778 - DNA, 228 bp, Citrobacter koseri
atgcagatactcctgtcgtcatcacactccacggaagatttacagaaggttgttttttgtttcgaatcaatggagtatctcgaaaccggagacaacgcttcccgcctggcaggaaacactcctttcatcatcgataaagatagcggtgaaatctttgatttaggtactgcctggccgctggagaaatatttaaaagactacgaagagagcaaaaaagcacgaagctaa

SEQ ID NO: 72779 - DNA, 261 bp, Citrobacter koseri
atgataactgaaactgaacttaacgtactgaaagttatggccgaaaaagatattaactggaactggatgaatctggatcgcacgctttccatgaaaagaatcccggggttcagcaatgtcgttaatattgtgaataaattggctagcgagtgtctggtaaatattgaagatagtgggcataagtccatgccttactatcgcgtatctgaaaaaggatacaggctaatcaagaatactgatactgacaataacgtaccataa

SEQ ID NO: 72780 - DNA, 1743 bp, Citrobacter koseri
atgaaaccgacgtttttgcgccgggtagccattgctgctctgctctcaggaagttgttttagtgttgttgccgcgccgcctgcgccacctccggtgtcatacggtgttgaagaggatgttttccaccctgttcgtgcgaagcaggggatggtggcatccgtggatgcgatggcgacccaggtcggcgtcgatatccttaagcaagggggaaatgccgtcgatgcggcggttgccgttggctatgcgctggcggtgacgcatccgcaggcggggaacctcggcggcgggggttttatgctgctgcgcaccaaagacgggaacaccacggcgatcgacttccgcgaaatggcgccagccaatgccacccgcgatatgttcctggatgatcagggcaatcctgacagtaaaaaatcgctgacgtcgcacctggcgaccggtacgccgggcaccgtggccggattctcgctggcgctggagaaatacggcaccctgccgctcaacaaagtgatacgcccggcgatgaaacttgcggatgagggattcgtcgtcaacgatgcgctggcggatgacctgaaaacctacggtagcgaggtgctgccgaattatgaaaacagcaaggctattttctggaaagacggcgaaccgctgaagaagggcgacaagctggtgcagaaaaacctggcgaaaagtctggagatgattgctgagaatggcccggatgccttctacaaaggggcaatagccgaccagatcgcacaggagatgcagaagaacggggggcttatcaccaaagaggatctggcggcttacaaagcggtagaacgcacgccgattagcggcgactatcgcgggtatcaggtcttttcgatgccgcctccgtcctccggcggcattcatatcgtgcagatcctcaatatccttgaaaacttcgacatgaagaaatacgggtttggtagcgccgatgccatgcagataatggctgaagcggagaaatatgcctatgccgatcggtcggagtatctcggcgacccggattttgtgaaggtgccgtggcaggcgctgaccagtaaagcgtatgcgaaatccattgccgatcagatagatatcaataaagccaaaccgtccagcgagattcgccccggtaaactggcgccgtatgaaagcaatcagaccacccatttctcggtggtggataaagacggcaacgcggtggccgtcacctacaccctgaacaccacgtttggtaccgggattgtggcgggaaacaccggaattctgctcaacaatgagatggatgacttctccgcgaaacctggcgtaccaaacgtttacggtctggtgggcggcgatgctaacgccgtagggccgaagaaacgtccgctgtcgtcaatgtcgccgaccattgtggtgaaagacggcaaaacctggctggtgacaggcagccctggcggtagccggattattaccaccgtgctgcaaatggtggtcaacagtatcgatttcgggatgaatgtcgctgaggcgaccaacgcaccgcgtttccatcatcagtggctgccggatgagctgcgcgtggaaaagggctttagcccggatacgctgaaactcctggaacagcgtgggcaaaaagtcgcgctgaaagaagcgatgggcagcacccagagcatcatggttggaccggatggttcgctgtacggcgcgtctgacccgcgctcagtcgatgatttaacggcggggtattga

SEQ ID NO: 72781 - DNA, 381 bp, Citrobacter koseri
atgaaacgactcttaattttagcggcgctactgccgttttccggctttgcgcagcccatcaacaccatgaataacccgaatcagccggggtatcagatcccgagtcaacagcggatgcaaacccaaatgcagacgcagcagacccagcagaaaggaatgcttaaccagcagttaaaaacgcagacccagcttcagcaacagcatctgcaaacgcagatgaacaataacgcgcagcgggtccagcagggccaggtgcgtgagcaggttttaccaaacaacaatggcgggatgttaagcggtggaacccgccagagcagcggtcagcaacatctgctgccccagcgacagagtggcgatatgctcaataactcgccgcagtaa

SEQ ID NO: 72782 - DNA, 750 bp, Citrobacter koseri
atgagtaactggccttatccccacatcgtcgcgcatcgcggtggcggaaaactcgcaccggaaaacacgctggcggcgattgacgtgggggcgcggtgcggacacacgatgattgagtttgacgtgaagctgtcgaaagacggtgagatctttctgctgcatgacgacaacctggagcgcaccagtaacggctggggcgtggcgggggaagtcaactggcaggatctgctgcgcgttgatgccgggagctggtttagcggcaagtttaaaggtgagccgttgccgctgttgtctcaggtagcggaacgctgccgcgagcacggcatgatggcgaatattgaaattaaaccgacgaccggcaccgggccattgacggggagagtggtggcgctggcggcgcgggagctgtggtctggaatgaccgcgcctttgctttcatcgtttgaaattgatgcgctggaagcggcgcaacaggcggcgccagagctaccgcgcggtttactgctggatgactggcgtgacgactggcatacgctgacgacccgactgggctgcgtctctgttcatctcaaccataaattgctcgatgaagcgcgggtaaaaatgctcagggcggcgggactgcgcattctggtttacaccgtcaacaaaccccagcgcgcggcggaactgctgcgctggggcgtggactgcatctgtaccgatgccattgatgtgattgggccggattttactgcggcgagttattga

SEQ ID NO: 72783 - DNA, 1071 bp, Citrobacter koseri
atggctggtttgaaattacaggcagtaaccaaaagctgggacggcaaaacccaggtcatacagccgttaacgctggatgtggcggatggcgagtttattgtgatggttgggccgtccggctgcggtaaatcgacgctgctgcgtatggtggccgggcttgagcgggtaacgagcggcgatatctggattgaccgccagcgtgttacggagatggagccgaaagacaggggcattgcgatggtgttccagaactacgcgctctacccacacatgagcgtagaggagaacatggcgtgggggctgaagattcgcggcatgggcaaagggcatattgccgaacgggtgaaagaggcggcgcggattctggagctggacggtttgctcaaacgccgtccacgcgagctttccggcggccagcgccagcgtgtggcaatggggcgtgcgattgtgcgcgatccggccgtcttcctgtttgatgagccgttgtccaaccttgacgctaaattgcgcgtccagatgcgccttgagttacaacatctgcatcgccgcctgaaaaccacctcgctgtacgtgacgcacgatcaggtcgaagcgatgacgctcgcccagcgggtgatggtgatgaacaaaggcgtagcggagcaaatcggtacgccggtagaggtgtatgagaagcccgccagccgctttgtggcgagctttatcggcagcccggcgatgaatctgctggaggggcgcatcagcgccgcaggcacccattttgagctggagagcgggatggcgctgcccgttaactggaactatcgccgctatgccgggcgggaaatgacgctgggtatccgtcctgagcatattgcgctaagctcgcaggcagaaggtggcgtaccgctggtgatggacacgctggagatgctgggggcggataacctggcgcacggacgctggggtgatcaaaaaatggtcgtgcggctggcgcatcagcaacgtccgacggcaggcggcacgctatggctgcatttgccggaaaatcatctgcatcttttcgatggcaaaacaggacaacgagtatga

SEQ ID NO: 72784 - DNA, 846 bp, Citrobacter koseri
atgattgagaaccgtcgcgggctgacgatattcagccacactatgttgattctggggattgtggtgatcctgtttcccttgtacgtcgcctttgtggcggcgacgctggacaaccgcgcggtgttcgatacgccgatgacgctcattcccggaacgcatctgctggaaaacatggcaatgatctgggttaacggcgtgggcgtgaacagcgcgccgttctggctgatgatgcttaacagtttcatcatggcttttggcattacggtggggaaaatcaccgtttctatgctgtcggcgtttgccattgtctggtttcgttttccgctgcgtaatctgtttttctggatgatctttatcaccctgatgctgccggttgaggtgcgtattttcccgacggtggaagtgattgccaatctgaaaatgctcgacagctacgcgggtctgaccctgccgctgatggcctcagcgactgccacctttctgtttcgccagttctttatgacgctgccggacgagctgattgaagcggcgcgcattgacggcgcttcaccgatgcgctttttccgcgacatcgtgctgccgctgtcgaaaaccaatctcgcggcgctgttcgtcatcactttcatctacggctggaaccagtacctgtggccgttgctgattattaccgacgttgatctcggcaccgccgttgcggggattaaaggcatgatcgccaccggggaaggcactactcagtggaatcaggtgatggcggcgatgctgctgaccctgattccccccgtcgttatcgttttagccatgcagcgcgcgtttgtacgcggcctggtggacagtgagaagtag

SEQ ID NO: 72785 - DNA, 888 bp, Citrobacter koseri
atgtcatcatcccgtccggtgtttcgctcgcgttggctgccgtatttgctggttgcgccgcaactggcgatcaccgtcattttctttatctggcctgcgggcgaagcgctgtggtattcgctgcaaagcgtcgatccgtttgggctgtccagccagtttgtcggtctggataactttgtcgccttattccatgacagctactacctcgactccttctggacgacgatgaaattcagtgcgctggtgacggtaagcggcctgttggtctcgctgtttttcgccgcgctggtggattacgtggtacgcgcaagccgcctgtatcaaacgctgatgctgctgccttacgccgttgcgccagcggtggccgccgtactgtggatcttcctgttcaaccccgggcgcgggctaatcacccattttcttgccgggttcggctatgactggaaccatgcgcaacacagcggccaggccatgtttctggtggtgttcgcttcagtctggaagcagattagttacaacttcctgttcttttttgccgcgttgcaatccattccccgctcgctgacggaagcggcagcgattgatggggcgggtccggttcggcgcttctttaaactttcgctaccgctgattgcgccggtgagtttcttcctgctggtggtcaatctggtgtatgccttcttcgacaccttcccggtgattgacgccgctaccgcaggcggaccggtacaggcgacgaccacgctgatttataagatctaccgcgaaggctttgccgggctggatctctccgcctctgccgcacagtcggtggtgctgatgttcctcgtcatcattctgacggttatccagttccgctatgtggaaagtaaggtgcgttaccaatga

SEQ ID NO: 72786 - DNA, 1317 bp, Citrobacter koseri
atgacatcgttacgacatacagcgttaggactggcgttaagcctggcattcgtgggaaacgccatggccgttaccaccattccattctggcattctatggaaggcgagctggggaaagaggttgattctctggcgcaacgtttcaatgcggccaatcctgattacaagattgtgccggtgtataagggcaactatgaacagagcctgagcgcgggtatcgccgcgtttcgtaccggcaacgctccggcgctgttgcaggtttatgaagtcggcaccgcgactatgatggcgtcgaaagcgattaaaccggtctatgaagtgttcagcgatgcgggcatcagtttcgatgagtcgcagtttgtaccgacggtgtccggttactacaccgattccaaaagcggacatctgctgtcccagccgtttaacagctccacgccggtgctgtactacaacaaagacgctttcaaaaaagccggtttagatccagagcagccgccgaaaacctggcaggatctggcggagtacaccgcaaagctgaaggcggcgggaatgaagtgcggctacgccagcggctggcagggctggattcagattgaaaacttcagcgcctggcatggtctgccggtcgccactcaaaataacggctttgacggtactgacgcggtgctggaatttaacaagccggagcaggtgaaacatatcgcgctgctggaagaactgaacaagaagggtgatttcagctacttcgggcgtaaagacgaatccactgagaagttctacaacggcgattgcgccatcaccactgcctcttccggttctctggcggatatccgccactacgccaaatttaattacggcgtaggcatgatgccttatgacgcggatgccaaagatgcgccgcaaaacgccattatcggcggggcgagtctgtgggtgatgcagggtaaagacaaagagacctacaccggcgtggcgaaattcctcgacttcctggcgaagccggaaaatgccgctgaatggcatcagaaaaccggctatctgccgatcaccaaagcggcttacgacctgacccgcgagcagggattctatgataagaaccccggcgcggatattgccacgcgccagatgctgaacaagccgccgttgccgttcaccaaaggtctgcgtctgggcaacatgccgcagatccgcaccattgtggatgaggagctggaaagcgtgtggaccgggaagaaatccccgcagcaggcgctggatgccgccgttgagcgtggtaatcagctgctgcgtcgctttgagcagtcaacgaaatcgtaa

SEQ ID NO: 72787 - DNA, 369 bp, Citrobacter koseri
atgacacttcaatttatctcagcggaagagataatccgttttcatgacaaattattgagcgtaacgcccggcgttccgggaatgccggaccctgggcgggctgaagcgctgttgtaccgtgttttaaataaatacgaatacgaaagtattaccgatgtctggatccttgcggcgatgcatctactcgctatttctcgtggacatatttttaacgatggtaataagagaacagcattattcatcacattgctgtttctcaaacgtaacggtatctttctggctgctaatcccgattatgttgatatgacagtcgaagctgccgcaggacgtctgtcgctagaggaaattgtacagcgtttgcgtcggtag

SEQ ID NO: 72788 - DNA, 222 bp, Citrobacter koseri
atgcgtacaatgaactatagtgaggtacggcagaaccttgcctctgtgcttgattctgctgccacgggtacgccggtgacgattacgcgtcgggggcataaatctgcggttatcatcagcgcagaagaatttgaacgttatcagacagcaaaactggatgctgaatttgatgccatcatgggcgttcacggcgacgaattaagggaactggccgataaatga

SEQ ID NO: 72789 - DNA, 732 bp, Citrobacter koseri
atggtggtgacgcataagatggaaaaagtcatgttgtcctttgacaaagtcagtgcccactacggcaaaatccaggcgctgcacgaggtgagcctgcatattcgtcagggagaaatcgtcaccctgattggcgccaacggcgcgggtaaaaccacgctgcttggcacgttatgcggcgatccgcgcgccaccagtggtcggattgtgtttgatggcaaagacattaccgactggcagacggcgaaaatcatgcgtgaagcggtggcgattgtcccggaagggcgtcgcgtcttttcccgtatgacggtagaagagaacctggcgatgggcggttttttcgccgagcgcgaccagtttcaggagcgcattaagtgggtttacgcgctgttcccgcgtttgcatgagcgtcgtatccagcgtgcgggcactatgtccggcggtgaacagcagatgctggcgattggtcgtgcattgatgagccagccgcgtttgctgctgctggatgaaccgtccctgggtctggcgccgatcattatccagcagattttcgataccattgaacaactgcgcgagcagggaatgaccatcttcctcgtcgagcagaacgcgaatcaggcgctgaagctggcggatcgcggctatgtgctggaaaacggtcatgtggtgctggaagataccggcgatgcgttgctggccaacgaagcggtgcgcagcgcatacctcggaggctga

SEQ ID NO: 72790 - DNA, 768 bp, Citrobacter koseri
atgagtcagccattattatccgttaacggcctgatgatgcgctttggcggtctgctggcggtaaacaacgttgaactggagttgcatccacgcgaaatcgtctcattgatcgggccaaacggcgccgggaaaaccacggtctttaactgcctgaccggtttctataaaccgaccggcggcaccattatgctgcgcgatcagcatctggaagggctgccgggtcagcagattgcccgtatgggcgtggtgcgtaccttccagcacgtccgcctgttccgtgagatgacggtgattgaaaacctgctggttgcgcaacatcagcagttgaaaaccggcgtcttttcgggcctgttgaagactccggcgttccgtcgggcgcagagtgaagcgctcgatcgcgccgccacctggctggagcgtatcggcctgctggagcacgccaaccgccaggccagcaacctggcctacggcgaccagcgtcgtctggagatcgcccgctgcatggtgacgcagccggagatcctgatgctggatgaaccggcggcgggtctgaacccgaaagagaccaaagagctggacgaattaattgcggagctgcgtaatcatcacaacaccaccattctgctgattgagcatgatatgaagctggtgatggggatttccgatcgcatttacgtggtgaaccagggaacgccgctggcgaacgggacgccggaagaagttcgcaacaacccggacgtgatccgcgcctatttaggtgaagcataa

SEQ ID NO: 72791 - DNA, 1278 bp, Citrobacter koseri
atgaaaccgatgcattttgcgatggcgctgctctctgccgccatgttcttcgtactggcgggcgtctttatgggcgttcaactggaactcgatggcaccaaactggtggtggggactgctgcggatattcgctggcagtgggtgtttatcggtactgccgtggtctttttcttccagttgctgcgaccgattttccagaaaagcctgaagggcatttccgggcctaaatttgttctgccagcgattgatggctcaaccgtgaagcagaagctgttcctgattgcgctgctggtcatcgccgttgtgtggccgtttatggtgtcgcgcggcaccgttgatatcgccacgctgaccatgatttatatcatcctcggtcttgggctgaacgtggtggtggggttgtctggtctgctggtgctgggctacggcggtttctacgccattggcgcgtataccttcgcgttgctgaaccactattacggtctggggttctggacctgcctgccgctggcggggctggttgcagcggcggcgggattcctgctcggcttcccggtattgcgcctgcgcggcgactacctggcgattgtgaccttaggctttggcgagattgtgcgcatcctgctgctcaataacaccgaagtgaccggcgggccgaacggtatcagccagatcccgaaaccgacattcttcggtctggagttcagccgtaccgcccgtgaaggcggttgggataccttcagcaacttcttcggcgtgaaatacgatccatccgaccgcgtgatttggctttacctggtggcgttgctgctggtcgtcttctcgctgtttgtgatcaaccgtctgctgcgtatgccgctggggcgggcatgggaagcgctgcgtgaagatgaaattgcctgccgttcattaggcttaagcccgacgcgcattaagctgacggcgtttaccatcagcgccgcgtttgcggggttcgccggaacgctgttcgccgcgcgtcagggctttgtcagcccggagtcgttcaccttcgccgaatccgcttttgtactggcgattgtggtgcttggcggcatgggttcgcagttcgcggttattctcgccgctatcctgctggtggtatcgcgcgagctaatgcgtgacttcaacgaatacagcatgttgatgcttggtggtttgatggtactgatgatgatctggcgtccgcagggcttgctgccgatgacccgtccgcagttgaaactgaaaaacggggaagcgaaaggagagcaggcatga

SEQ ID NO: 72792 - DNA, 927 bp, Citrobacter koseri
atgtccgagcagtttctctatttcttgcagcagatgtttaacggcgtcacgctgggaagcacctatgcgctgatcgctatcggctatacgatggtttacggcattatcggcatgatcaacttcgcccacggcgaggtctatatgatcggcagctatgtctctttcatgatcatcgccgcgctcatgatgatgggcattgataccagctggctgctggtcgctgccgggttcgtcggggctatcattatcgccagcgcctatggctggagtattgaacgggtggcctatcggccagtgcgcagttccaagcgactgattgcgctcatctccgcgatcgggatgtctattttcctgcaaaactacgtcagtcttaccgaaggttcgcgtgacgtggcgctccccagcctgtttaacggccagtggattatcggcagcagcgagaacttcgccgccagcattaccaccatgcagttggtcatctggattgtcactttcctggcgatgctggcgctgacgttgttcatccgttactcccgtatgggacgcgcctgccgcgcctgtgcggaagacctgaaaatggcgagtctgctgggcattaataccgaccgcgtgattgcgctgacctttgtgattggcgcggcgatggcggcggtggcgggcgtgctgctcggtcagttctatggcgttatcaacccgtatattggctttatggccgggatgaaggccttcaccgctgctgtgcttggcggcatcggcagtattcctggcgcgatgattggcggcctgattctgggcgtcgccgaagcgctctcctctgcgtacctgagtaccgaatataaagatgtggtgtcgtttgcgctgctgattctggtgctgctggtcatgccgaccggtatcctgggccgcccggaggtagagaaagtatga

SEQ ID NO: 72793 - DNA, 1110 bp, Citrobacter koseri
atgaaacggaatgcgaaaacgatcatcgcaggagtggttgcactggcgatgtcgcatacggcaatggcggacgatattaaagtcgccgttgtcggggcgatgtccggcccggtagcgcagtggggcgatatggaatttaacggcgcgcgtcaggccattaaagacatcaacgccaaaggcggcatcaaaggcgataagctggtgggcgttgagtatgacgacgcctgtgacccgaaacaggctgtcgcggtggcgaacaaaatcgtcaatgacggcattcagtacgttatcggccacctgtgctcctcttccacacagcccgcgtctgatatctatgaagatgaaggcatcctgatgatctccccgggcgccacaaacccggaactgacgcagcgcggctacgaacacatcatgcgtacggcgggcctggactcctcccaggggccaacggcggcgaaatacattcttgagaaagtgaagccgcagcgtatcgccattattcacgataagcagcagtacggtgaaggtctggcgcgttccgtacaggacagcctgaaagcgggcaacgccaatatcgtgttctttgacgggattaccgctggcgagaaagacttttccgcactaattgcccgcctgcaaaaagagaatatcgacttcgtttattacggcggttactacccggaaatgggccagatgctgcgccaggcgcgcgctatcggcctgaaaacccagtttatggggccagagggcgtgggcaatgcctcactgtccaacatcgctggcgcggcggcagaaggcatgctggtgacgatgccaaaacgctatgaccaggacccggcgaacaaaggcattgtcgatgcccttaaagccgacaaaaaagatcctaccggcccttacgtgtggatcacttacgctgcggtgcagtcgctggcaaccgcaatggatcgtaccggcagcaaagcgccgctcgatctggtgaaagatctgaaagcacacggggctgataccgtgattgggccgctgaactgggatgaaaaaggcgatctgaagggatttgagtttggtgtcttccagtggcatgccgacggctcatcgaccgttgccaaataa

SEQ ID NO: 72794 - DNA, 384 bp, Citrobacter koseri
atgaagctgaccatcgttcgtttagaaaactttagcgcccaggatctcatcgatctgggtaaaatctggccggaatactccgcctcgtctttaagcgtagatgatactcaccggatctacgcggcgcgtttcaacgagcgtctgttgggcgctgtgcgggtaacgctaagcggtacgcaaggcgcgctggactcattgcgggttcgcgagatcacgcgtcgtcgcggcgtggggcagtatctggtggaagaggtgatccgcaataatccaggcgtttcagcctggtggatggcagatgtcggcgtcgaagagcgaggcgtaatggcggcgtttatgcaggcattagggtttacggcgcaggcggaaggctgggaaaaacggtaa

SEQ ID NO: 72795 - DNA, 1098 bp, Citrobacter koseri
atgaagggtaaagcgttattggcaggatgtatcgccctgtctttgagcaatatggcgtttgctaaggatatcaaagtggctgttgtcggcgcgatgtccggcccggtagcgcagtacggcgatcaggaatttaccggcgcggagcaggcgattgccgatatcaacgcgaaaggcggcatcaagggcgataagctggttgccgtgaaatatgatgatgcctgcgacccgaaacaagcggtagccgtagccaacaaagtggtcaacgacggcattaaatatgttatcggccacctgtgctcctcatccacgcagcctgcgtccgatatctatgaagacgaaggcattctgatgattactccggctgcgaccgcaccggaactgaccgcgcgcggttatcagctgatcctgcgcaccaccggtctggactccgatcaggggccgacggcggcgaaatatattctggaaagcgtgaagccgcagcgcatcgccattattcacgataagcagcagtacggtgaaggcctggcgcgcgcggtgcaggatggcctgaaaaaaggcaacgccaacgtggtgttcttcgacgggattaccgccggcgagaaagatttctccaccctggtggcgcgcctgaagaaagagaacatcgactttgtgtattatggcggctaccaccctgagatggggcagatcctgcgccaggctcgcgctgctggcctgaaaacgaagtttatggggccggaaggggtagcgaacgtgtcgctgtctaacattgccggtgagtctgccgaggggatgctggtcaccaagccgaagaactacgatcaggttccggcgaacaaaccgattgtagacgctatcaaagcgaagaaacaggacccaagcggcgcgtttgtgtggaccacctacgcggcgttgcagtcattgcaggcaggtctgaatcagtccgacgatccggctgaaatcgccaaatacctgaaagcgaataccgtggaaaccgttatggggccgttgtcctgggatgagaagggcgatctgaaaggctttgagtttggcgtctttacctggcatgccgacggtacggcaaccgacgccaggtaa

SEQ ID NO: 72796 - DNA, 1266 bp, Citrobacter koseri
gtgaaaaataacgaactgaatgaaagacggttgcaggcgacgccgcgcggcattggggtgatgtgcggtttctatgccgacagagcggaaaacgccacgctgtgggatattgaaggcaatgaggtgattgatttcgccgccggaattgccgtgttgaacaccgggcaccgtcatccaaaagtcatcgcggcaattgaaaaacagctccagtcatttactcataccgcgtatcaaatcgtgccttatgcaagctacgttacgcttgccgagcgtattaacaagcgcgtgccggtcaacggcccggcgaaaacggctttcttctccaccggcgcggaggcggtcgaaaacgcggtgaaaattgcgcgcgcctgtacccgacgaccggggctgattacctttggcggcgcgtttcacgggcgaacctttatgacgatggcgctcaccggtaaggtcgcgccctacaaaactggctttgggccgttcccgggatcggtctatcacgcgcaatatccgaatcctttgcatggcgttaccacggcggatgcgctgaacagtctcgaacggatttttaaagccgatattgcgccggaccaggtggcggccattatcctggaaccggtgcagggggaagggggctttaacgtcgcgccaacggatttcatgcaggcgctgcgtacgttatgcgatacccacggcatcttgctgatcgccgatgaagtgcagaccggttttgcccgtacaggcaaactgtttgcgatggagcaccacggcgttcagccggatctcatcacgatggccaaaagtctggccggcggtatgccgctgtcggcggtatccggtcgcgccgaggtgatggatgcgcctgcgccgggcggtcttggcggcacctacgccggaaacccgctggcggtggccgccgcgcatgcggtgcttgatgtgattgaagaagacgatctctgcactcgcgccacgcagcttggtcagcatctggttgaggtgttgaacaaagcgaaagccgcctgcccgttcattgccgagatccgcgcgcagggctcgatggtggcggtagagtttaccgatccgcaaaccggccagccgtccccggaatttacccgacaggtgcaggatcgcgcattgcaggagggtctgctgctgctcagctgcggtgtttatggcaacgtgatccgcttcctctatccgctgacgatccccgatgcgcagttccgtaaagcgctggagatcattacgcgttcgctgacacgataa

SEQ ID NO: 72797 - DNA, 855 bp, Citrobacter koseri
atgaccaaagaaatgcaaaatttagctttagcccctgttggtaacctggaatcttacatccgggctgcaaacgcgtggccgatgttatcggctgacgaagaacgggcactggctgaaaagctgcattaccagggcgatctggaagcagctaagacgctgattctgtctcacctgcgctttgttgttcatgttgctcgtaactatgcgggctatggcctgccgcaggcggatctgattcaggaaggtaacatcggcctgatgaaagccgtgcgccgttttaacccggaagtgggtgtgcgcctggtttctttcgccgtgcactggatcaaagcggagatccacgaatacgtattgcgtaactggcgtatcgttaaagtcgcaaccaccaaagcacagcgtaagctgttctttaacctgcgtaaaaccaagcagcgtctgggctggtttaatcaggatgaagtggaaatggtggcgcgcgaactgggcgtaaccagcaaagacgtccgcgagatggaatctcgtatggcggcgcaggacatgacgtttgacatgtcttcggacgacgagtctgacagccagccgatggcgccagtgctgtatttgcaggataaaacctctaactttgccgacggcattgaagaggataactgggaagatcaggcggcaaacaaactgacccacgcaatggaaggtctggacgagcgtagccaggacatcattcgcgcccgttggctggacgaagacaataagtccacgctacaggagctggccgaccgctatggcgtttctgctgaacgtgtacgtcagcttgaaaagaacgcgatgaagaaactgcgcgccgctatcgaagcgtaa

SEQ ID NO: 72798 - DNA, 1074 bp, Citrobacter koseri
atggaggcctggtcagtgaataagcgtgacgctatcaaccaaatcaggcagtttggcggcagactggaccgttttcgtaaatctggcggttcgtccggcgacggcggccgcaatgcgccgagacgcgcaaaaccctcgccgaagccgaattcgcgtaaaaccaacgtctttaacgagcaggtgcgctatgcgttccagggcgcgttacaggatctgaaaagcaagccgctggcgacgtttctgacggtgatggtgattgccatctctctgacgctgccaagcgtctgctacatggtctataagaacgtcaaccaggcggcgacgcagtactatccgtccccgcagatcaccgtttatctgcaaaagacgctggatgacgacgcggccgccggggtggtcgcacagctccaggccgagcagggggtggagaaggtcaactatctctcccgcgacgatgcgcttggcgagttccgcaactggtccggctttggcggcgcgctggacatgctggaagagaatccgcttccggcagtggcggtggtgatcccgaaactggatttccagggaacggagtcgctgaacacgctacgcgatcgcatctcgcagattaacggcattgatgaagtgcgtatggatgacagctggtttgcccgtctggcggcgctgaccgggctggtagggcgcgtttccgcgatgatcggcgtgctgatggtggcggcggtgttcctcgtcatcggcaacagcgtgcgcctgagcattttcgcccgccgcgacaccatcaacgtgcagaaactgattggcgcgacggatggatttatcctgcgaccgttcctgtacggcggcgcgctgctcggtttttcaggggcatttctttcactgattttgtcagaaattttggtgatgcgcttgtcgtcagcggtgacggaagtggcgcaggttttcggcacgaagtttgatatcaatggcttatcgttcgatgagtgcctgttgttgctgctggtgtgctcgatgatcggctgggttgcggcgtggcttgccactgtgcaacatttacgtcactttactcccgattaa

SEQ ID NO: 72799 - DNA, 669 bp, Citrobacter koseri
atgattcgctttgaacatgtcagcaaggcctatctcggtgggagacaagcgctgcaaggagtcacattccacatgcagccaggcgagatggcgtttctgaccggccactcaggcgcggggaaaagtaccctgctgaagcttatctgtgggattgaacggccgagcgccgggaaaatcttcttcagcgggcatgacattacgcgcctgaaaaaccgtgaagtgccgtttctgcgtcgtcagatcggaatgattttccaggatcaccacctgctgatggatcgtacggtctatgacaacgtggcgatcccgttgattatcgctggcgccagcggggacgacatccgtcgtcgtgtgtcggcggcgctggataaagtcgggctgctggacaaagcgaggaattttcccattcaactctctggcggtgagcagcagcgcgtggggatcgcccgtgcggtggtgaacaagcctgcggtgctgctggcggatgaaccgaccgggaacctggatgatgccttatcggaagggattttacgtctgtttgaagagtttaaccgcgttggggtgacggtattgatggcgacgcacgacatcgggcttatctcccgtcgttcgtaccgtatgctcaccctgagcgaaggtcatttgcatggaggcctggtcagtgaataa

SEQ ID NO: 72800 - DNA, 1503 bp, Citrobacter koseri
atggcaaaacagaaaaaacgtggcttcttttcctggctgggctttggtgaaaaagagcaggaacaggaacaaaaaaccgaagaacaacagcgtgttgaagaacagttagcgccagaaacgccggttgagacggcggcagacgccgacgcggaaacgcacgcccacggcaaggcggagaccgacgctttcgccgaagccgtggtgaacgtcaccgaacaggttcaggaaagcgaaaaaccgcagccggttgagccagagcctgtcgtagagcctgttgttgaccccgtggttgaagaagacatcgttgagccgcaggcggtggtggaacatgaagaactgccgctgccggaagaggtgaacgtcgaagagacgtcgcctgaagagtggcaggccgaagcggaaacggtagagatcgtggaggcggtagaagaagaggcgcaaaacgaaccgcaactgaccgacgaagaacgggaagcgcaggcgctggtggtggaagcggcggaagacgcggtggttgtcgtgccggcggcagaagaagagacgccggttgaggagatgattcaggagcaagagaagccgacaaaagagggtttctttgcgcgcctgaaacgtagtcttctgaaaacaaaagaaaatctcggttcaggatttatcagtctgttccgtggtaagaaaatcgacgatgatctgtttgaagaactggaagagcagttgctgattgccgatgtgggcgtggaaaccacccgcaagatcatcgctaacctgacagagggcgccagccgcaaacagctgcatgacgccgaagcgctgtatggcctgctgaaagacgagatgggcgatatcctcgcaaaagttgacgaaccgcttaatattgaaggcaaaacgccatttgttattctgatggttggcgttaacggcgtggggaaaaccaccacgatcggtaagctggcgcgtcagttcgagcagcagggcaaatccgtgatgctggcggcgggggataccttccgtgcggcggcggtagagcagttgcaggtctggggccagcgtaacaacattccggttatcgcccagcataccggcgcggattccgcttccgttatctttgacgccatccaggcggcgaaagcgcgtaatgtggatgtgctgattgccgataccgcaggtcgcttgcagaacaaagcgcacctgatggaagaactgaaaaaaatcgttcgcgtgatgaagaaactcgacgaagatgcgccgcatgaagtgatgctgaccatcgacgccagcaccgggcagaatgcgataagccaggccaaactgttccatgaagcggttggcctgaccggtatcaccctgaccaagctggatggcacggcgaagggtggggttatcttctcggttgccgatcagtttggcattcctatccgctatattggtgtgggcgaacgtatcgaggatttacgtccgtttaaggcggacgattttatagaggcactttttgcccgagaggattaa

SEQ ID NO: 72801 - DNA, 597 bp, Citrobacter koseri
atgaaaaaaccgaatcactctggcagcggtcaaatccgcattattggcggacagtggcggggccgtaaacttccggttcccgacagcccagggctgcgcccgacaaccgaccgggttcgcgagacgctgtttaactggctggcgccggtcatggcagacgcccactgtctggattgtttcgccggaagcggcgcgctggggctggaagcgctttcccgctatgcggcgggcgcgacgttactggagatggatcgcgccgtgtcacagcagttacaaaagaatcttgctacgctaaaggcaggcaacgcccgcgtggtcaacgccaatacgctggcctttctggcgcagaccggtacgccgcacaacgtggtgtttgtcgatcccccgtttcgcaaagggctgctggaagagacgttaagcctgctggaaacgcacggctggctggctgatgacgcgtatatttacgttgaaagcgaagtcgaaaacggtctgccgcccgtcccggcaaactggtcgttgtatcgtgaaaaagtggccgggcaggtcgcataccgcctgtatcaacgggaagcacaaggagaaagcgatgctgattaa

SEQ ID NO: 72802 - DNA, 270 bp, Citrobacter koseri
atgctgattaatctgggtcgattactgatgctgtgcgtctgggcatttttaattcttaatctggtacagcctttcccgcgcccgctgaatattttcgtcaacgtcgcgctggtctttatggtgctaatgcacggtatgcagctggcactgttaaaaagcaccatgcctaaagatggcccgcagatgaccaccggcgagaaaatccgcattttcctgttcggcgtctttgagctgctggtgtggcagaagaaatttaacgttaaaaaataa

SEQ ID NO: 72803 - DNA, 363 bp, Citrobacter koseri
atgatgagtaaaccaccactttttttcattgttatcattggcttgattgttatcgccgcgtcgtttcgctttgtttcgcagcggcgagaaaaagccgataacgatgccgcgccattgcagcaaaagcaggtagtggtgagcaataagcgcgaaaagccgatcaacgatcggcgctcgcgtcagcagcaggtgacgccagcgggcaccagtatgcgctatgaagttagctttaaaccgcagcgcggcgggcttgagcagacgttccggcttgatgcccaacagtaccatgcgttaacggtcggggataaaggcacgctgagctacaaaggttcgcggtttgtcgattttgtcgcccagccataa

SEQ ID NO: 72804 - DNA, 627 bp, Citrobacter koseri
atgctttggtcgtttatcgctgtctgtctttccgcatggctatttgtggacgcatcgtatcgtgggccagcgtggcagcgctgggtctttaaacctctcaccctgattctccttcttttactcgcctggcaagcgccgatgttcgacgcgatcagctaccttgtgctggcgggcctgtgcgcctcgttgctgggcgatgcgttgacgctgttgccgcgccaacgtctgctgtacgccattggcgcattcttcctgtcgcacctgctgtacaccctctatttcgccagccagatgacgctgtcgttcttctggccattgccgttagtgctgctggtgttgggcgggttgctgattgcagtgatctggacgcgtctggaagagctgcgctggccgatatgcacctttatcgccatgacgctcatgatggtctggctggccggtgaactgtggttcttccgcccgaccgccccggcgctctctgcttttatgggcgcatcgttgttattcctcggcaacatcgtctggctgggcagccattaccgctgccgcttccgcgcggataacgctatttccgccgcctgctactttgccgggcacttcctgattgtccgctcactttatctttaa

SEQ ID NO: 72805 - DNA, 2199 bp, Citrobacter koseri
atgttgacacccgatactgatggcaaaaaagtcccacaattttcatccttcaaactggcgccagccccccggaaggtagatgactgctgctgtgagggcgcctgcgcaacggaggctctcgtccccgacaccatcgaagggacgcgttacacctggaaagtcgccggtatggactgcgccgcctgcgcccgtaaagtcgaaaacgccgtgcgccaggtcgggggcgtcaatcaggtacaggtgctgttcgccaccgagaaactggtggtggatgcgaatgccgatatccgccaacacgttgaacgcgccgtacaaaaggcgggctataccctgcgtgatgaacaggccacagcagaggcgcgcgaatcccggctgcaagaaaacctgccgctgatcacgctcatcattatgatggcgattagctgggggctggagcaattcaaccatccgttcggccaactggcgtttatcgccaccacgctggtcggcctgtatcccattgcccgtcaggcgctgcgcctgatgaaaaccggtagctggttcgccatcgaaacgctgatgagcgtggcggcgattggcgcgctgtttattggcgcgacggcggaagcggcgatggtgctgctgttatttctgatcggcgaacgcctcgaagggtgggccgccagccgcgcccgcaaaggggtcagcgctctgatggccctcaaaccggaaaccgccacgcgcctgcgcgatggcgtgcgcgaagaggtggcgatcaacaccctgcaacccggcgacattatcgaagtggcggcaggcgggcgcttacccgccgacggcaggctggtctccggtttcgccagttttgatgagagcgcgctcaccggcgagtcgattccggtcgagcgctcaacgggcgagaaagtccccgccggcgccaccagcgtggatcggctcgtcacgctggaggtgctgtcagaaccgggcgccagcgcgattgaccgtatcctgaagctgattgaagaagccgaagaacgccgcgcgcccattgagcgttttattgaccgcttcagccggatttacaccccggtgattatggccgtcgcgctgctggtcacgctggtgccgccgttgctgtttgccgcgtcctggcaagagtggatttataagggactcacgctgttgctgattggctgcccgtgtgcgctggtcatttccaccccggcggccatcacctccgggctggcggcggcggcacgtcgcggggcgttgattaaaggcggcgcagcgctggagcagctaggccgagtcactcaggtggcgttcgataaaaccggtaccctgaccgtagggaaaccacgcgtcaccgccatccatccggcaagcgggatcggcgaagcggagctgctggcgctggcggcggcggtggaacaaggcgcgacgcacccactggcgcaggccattgtgcgtgaagcgcagacgcgtgaactgaccattccgccagcgctggagcagcgcgcgctggtcggttcgggtatcgaagctcaggttaatggcgagcgcatcctgatttgcgccgcaggcaaacgcccggcggaagcctttgccgggcaaatcagcgaactggaaagcgccggacagacggtcgtgctggtgctgcgcaacgacgacgtaatcggcgtgctcgccctacaggatacgctgcgcgatgacgcccgcaccgcgatcggcgagcttaatcagttaggggtgaaaggcgtgatcctgaccggcgataacccacgcgcggcagcggccattgccggagagctgggcctgacgtttaaagcgggcctgctgccggaagataaagtccgggcggtgacggcgctcaatcagcacgccccgctggcgatggtgggtgacggcattaacgacgcccccgcaatgaaagctgccgcgataggtattgcgatgggaagcggaacggatgtcgcgctggaaacggcagacgccgccctgacgcataaccgcctgcgcgggctggtacagatgatccagctggcgcgcgccacccacgccaatattcgtcaaaacatcgcaattgccctggggctgaaagggatcttcctcatcaccacgctgctcggcataaccggtctgtggctggccgtgctggcggataccggggcgacggtgctggtgaccgccaatgcgctgcggctgttgcgtaaagggtag

SEQ ID NO: 72806 - DNA, 984 bp, Citrobacter koseri
atgaaagtgactctcaagccgctcgcggcttccctgtgcctggctaccgcgtcaatactgttttcccattccgttttcgcgcaggtcattaaagcggcggatgtccatccgcagggctatccgaatgtcgtcgccgtgcagaaaatgggcgaaaaactcaaacaacaaaccgacggtaaactggaaattaaagtgttcccgggcggcgtgctgggcgatgaaaaacagatgattgaacaggcgcaaatcggcgcgattgatatgattcgcgtatcgatggcgccggtggcggctattctgccggatatcgaagtctttacgctaccctatgtgtttcgcgacgaagaccacatgcacaaaattattgatggcgatatcgggaaaagcattggcgataagctgacgaacaacccgaaatcacgtctggtgtttcttggctggatggactccgggacgcgcaacctgattaccaaaaacccggtggaaaagccggaagatctccacggtatgaagattcgcgtgcagggaagcccggtggcgctggatacgctgaaagacatgggggcgaactcggtggcgatgggggtgagcgaggtgtttagcggtatgcagaccggcgtgattgacggtgcggaaaacaacccgccgacttttgtcgcgcataactacatgccggttgcgaagaattacaccctcagcgggcactttatcaccccggaaatgctgctctattccaaagtgaagtgggacaagctgactgcggatgagcagcagaagatcctgacgctggcgcgcgaagcgcagtttgagcagcgtaaattgtgggatgcctacaaccaggaggcattagcgaagatgaaggctggcggcgtgcagttccacgaaattgataaagcgtatttcgtgaaggccaccgagccggtgcgcgcgcagtatggcgaaaaacaccaggcgttgatgaaggcgattgccgacgtgcagtaa

SEQ ID NO: 72807 - DNA, 246 bp, Citrobacter koseri
atgaccgatctgttttcctcccccgaccatacgcttgatgcccaggggctacgctgcccggaaccggtaatgatggtgcgtaaaaccgtgcgtaacatgcaaacgggcgaaacgctgctgattattgccgacgatccggcgacaacccgcgatattcctggcttttgtacgtttatggaacatgagctgatggcgaaagagacggattcgctgccgtatcgctatttgctgcgtaaaaagcattga

SEQ ID NO: 72808 - DNA, 666 bp, Citrobacter koseri
atgaactcctttactcaaatacagcgcgtaaaagcgttgttctggctatcgctattccacctactggtgatcacctccagtaactatctggtacagcttccgatctctgttttcgggttccacacgacgtggggcgcctttagctttccctttatttttctcgcgaccgacctgaccgtgcgcatttttggcgcgccgctggcacgacggataatctttgcggtgatgatcccggcgctgctcatctcctatgtcatctcatcactgttttatatgggttcctggcagggatttggcgcgctgctgcacttcaacctgtttgtcgcgcgtatcgccaccgccagctttatggcatatgcgctgggccagattctggatgtacacgtctttaaccgcctgcgccagaaccgccgctggtggatggctcctacggcctccacgctgtttggcaacgtcagcgataccctcgccttcttcttcatcgctttctggcgcagccccgatgcctttatggccgagcactggatggaaatcgcccttgtcgattactgcttcaaggtgctcatcagcattattttcttcctgccgatgtatggcgtattgctgaatatgttgctgaaaaggctggcagataaatctgaaatctcggcattgcagacgagttaa

SEQ ID NO: 72809 - DNA, 558 bp, Citrobacter koseri
atgcgcaatctggttaaatatgtcggtattggcctgctggttatggggcttgcggcctgtgataacaacgataccaatgctccggcagagggaacctctacggaaagcaacgcaaccggacaacctgtcagcctgctggacggtaagctgacgttctcactgccagcggatatgaccgaccagagcggcaagctgggcactcaggccaataatatgcacgtctactctgacgcgacaggccagaaagcggtgatcgtgattgttggcgataacaccaatgaagacctcgccgtgctggcgaaacgtctggaagatcaacagcgcagccgcgacccgcagttgcaggtcgtgaccaataaagccatcgagctgaaaggccacacgctgcaacagctggacagcattatctctgcgaaaggccagaccgcgtactcttccgtactgctgggcaaagtggataaccaactgctgaccctgcaaatcacgctgccagcagacgatcagcagaaggcgcaaaccgccgctgaaaacatcattaacacgctggttatccagtaa

SEQ ID NO: 72810 - DNA, 1218 bp, Citrobacter koseri
atgcccgaacccgtcgctgaaccggcgcttagcggattgcgcctcaatctgcgtatcgtttctgttgtgatttttaacttcgccagttatctgacgatcggtttgccgctcgcagtcctgccgggctatgtccatgatgtgatggggtttagcgccttctgggcggggctggtcataagcttacaatattttgcgacgctcgtgagccgccctcatgcggggcgctacgctgacctgctggggccgaaaaaggttgtcgtctttggtttgtgcggctgctttctgagcggcctgagctatctcctggcgggattcgccagcggctggccgattgcaagcctgctgctgttatgcctggggcgtgtcattctgggcattggacaaagcttcgccggaaccggatcaacgctctggggcgtaggcgtggtggggtcgctgcatattggccgggtgatttcgtggaacggtattgtcacgtatggcgcgatggcgatgggcgccccgcttggcgtgttgttttacgcctggggcgggttacaggggctggcgttgacgatcatgggcgtggcgctgctggccgtgctgtttgcgctcccgcgcccggcggtgaaagccagtaagggcaaaccgctgccgtttcgcgccgtgcttgggcgcgtctggctgtatggaatggcgctggcgctggcatccgcgggattcggcgttatcgccaccttcatcacgctgttttatgacgcgaaagggtgggatggcgccgccttcgcgctcacgctgtttagctgtgcgtttgtgggcgcccgtttattgttccccaatggcatcaatcggttaggcggcttaaacgtggcgatgatctgctttagcgtggagattatcgggctgctgctggtgggcgttgcgctgatgccgtggatggcgaaaattggcgtgctactggcgggggcagggttctcgctggtcttcccggcgctgggcgtggtggcggtaaaggcggtgccgcagcagaatcagggggcggcgctggcgacctatacggtgtttatggatttatcgttgggcgtgaccgggccgctggcggggctgctgatgacctgggcgggcgtgccggttatctatctggcggcggcgggtctggtggcgattgcgctgttgctgacctggcggttaaaaaaacggcctccggcggtatcgcaggaggccgtgtcatcgtcttaa

SEQ ID NO: 72811 - DNA, 1050 bp, Citrobacter koseri
atgacaacccctcaacccgacaaaacggggatgcatattctgctcaaactggcgtcgttggtcgtcatactggcagggcttcatgccgcagcagatattattgtacagctcttactggcgctctttttcgccattgtcctcaacccgctggtaacctggtttattcgtcgcggcgttaaccgcccggtggcgattaccctcgtggtggtcgtgatgcttatcgtgctgacggcgctgatcggcgtactggctgcgtcaatcaatgaattcgtcgccatgctgccgaaatacaacaaggagctgacgcgtaaggttctgcatttgcaggagatgctgcccttcctcaacctgcacatgtcgccggaacgcctgctgcaacgcatcgactccgataaactgatgaccttcaccaccacactgatgaccggcctttccggggcgatggcaagcgtagtcctgctggtgatgacggtggtgtttatgctgttcgaagtccgccacgttccctacaaactgcgtttcgcgctgaacaacccgcaaattcacattgcgggtttacaccgggcgctcaaaggcgtgtcgcactatctggcgctgaaaacgctgctgagcctgtggaccggcgtgattgtctggctggggctggcgctgatggacatccagtttgcgctgatgtggggcgtgctggcgtttttactcaactatgtccctaatattggttcggtcatttcagcagtgccgccgatgattcaggcgctgctgttcaacggtttctacgaatgcgttctggtcggcgcgctctttctggtggtgcatatgatcatcggcaatatcctggaaccgcgcatgatgggccaccgcttgggaatgtccacgctggtggtgttcctctctttactggtgtggggatggttattaggcccggtagggatgctgctttccgttccgcttaccagcgtctgtaagatctggatggagaccaccaaaggcggcagcaagctggcgattttactggggccgggtcgcccgaaaagtcggttgcccggataa

SEQ ID NO: 72812 - DNA, 390 bp, Citrobacter koseri
atgaaacaattcattaaatggtttgccgctattgcggttgtgggtgctctggcgggttgcgcgcgtactgcgcctatcgatcaggttcactccagcgtgagcgcgggccatactcaggagcaggtcaaaaacgccattctgaaggctggcgttcaacgccaatggatcatgtctgaagtcgggcctggcgttatcaaaggacgtcagcagacgcgcaaccacgtcgctgaagtgcgcattacctactctgcaaccagctacgacatcaaatacgacagcagcctcaatttgcaggcttccggcggcaaaattcacaaaaactacaaccgctgggtacataacctggacaaagacatccaggttaacttgtccgcaggcgcgggtctgtaa

SEQ ID NO: 72813 - DNA, 1062 bp, Citrobacter koseri
atgtacgaacaggactcgctcagcgcactggatgccatcacggaagcacaacgtatcgccttcgcccccatgcttttccaggccgcattgtgtctgcgtaacgcgggtgtgctgacatatctggatcggcagggtaaacgcggcgcaacgctcgacgatatcactgaaaacagcagcatcaatgaatatgccgccagcgtactgctggatatgggattaagcggacgtattattactcacaaagaggggcattattatctcgcgaaggtgggacattttcttctgcatgacgccatgacccgcataaatatggatttcacccaggatgtttgctatcaggggctgttttatctggaaaatgcgctaaaggaaggcaaaccgtcaggactgaaaatattcggcgactggccaacgatttatcccgcgctgtcgcaattaccgcaggcggcgcgtgacagttggttcgccttcgatcattactattccgacggcgcatttgacgccgcgctgccttatgtattcgccagtcgcccggcaaccctgtacgatgtgggcggaaataccgggaaatgggcattacgctgctgccagtacgataaaaatatcgcggtcactttattagatttgccacaacaaattgcacttgcccgtaaaaatatcgaaaatgcaggattatctcatcgcatagatttccatgcagtggatatgctgggtgatacgcctttacctggagaggccgatatctggtggatgagccaatttctggactgcttttcaccggaacagattatcaccatgctcagtaacgttgcccgcgtgatgaaatccggcgcaaggctgtgcattatggagctgttctgggatgcgcagaaatttgaagcggcctcttttagcctgaatgcgtcttcgctttattttacctgtatggcaaatggcaacagccgtttctacagcgtagagaagttttatcactatctggacatggcagggttccaggtggatgaacgccatgacaacctgggcgttgggcatactttattgatatgccaaaagaaaaaataa

SEQ ID NO: 72814 - DNA, 723 bp, Citrobacter koseri
atgaaatttgcactaaacataacagactggcaggccagagccccaggacttagcgaagcgacccactggcagcagtggtcgcgggagccgtacgccatcgatcccgccgcgccgcaggcaaaactgcacgaactcccgatgatgaccgcccggcggctcagttccggcagcaaactggcggtggagtgcgggctggccatgctgcgtcgccacgatatcgacgcggtgctctataccagccgccacggcgaactggagcgtaactaccgcatcctgcacgcgctggcgatggaacaggcgctctctcccaccgatttcgccctgtcagtacacaattccgcggtcggtaatctgaccattgccgcaaaacagccggttgtctcatcctcgctttccgccgggagagacaccttccagcaagggttgtgcgaagtgatgtgcctgcttcaggcgggttatcagcgggtattgatggtcgatttcgacggcttcctgcccgagttttaccatccgcgattaccgccgcagatgccgacctggccttacgccgtcgcctttgtcattgaaacggggaattcgctgtcctgcgccacgcggcccggtgcgcctcaggatgaaacgccgcttccgcaaagcctgctgtttttacagcgttacttacaaaatgccgacgcctttacgctgccgggcgagcgggtagagtggcagtggagccgcgcgtga

SEQ ID NO: 72815 - DNA, 816 bp, Citrobacter koseri
gtgaacacgcttctggcgcgcctggattgggcatggcgactggtgatgaccggtttttgttttgccctgttcggcatcggcgggctgttgctttctgtcgtgtggttcaacttattgttactattggtatggaaccccgtcagacgccgccgcctggcccgtcgcagcattgcggccagttttcgcgcctttttaacggtagcgaaaacgcttggcgttctggactaccgcatcgaggggagcgacgtgctgcgacaggagaaagggtgtctggtggtggcgaaccatcccacgcttatcgattacgtgctgctggcttccgtcatgcccgaaaccgactgcctggtgaagagcgcactgctgaaaaacccgttcgtcagcggcgttattcgcgcggcggattacctgatcaacagccaggccgacgcgctgttaccggcctgccagcagcgtctggatcagggcgacacaatattgattttccccgaagggacgcgaacgcgacccggtgaaaaaatgacgctgcaacgcggcgcggccaatatcgccgtacgctgcggcagcgatttacgcgtagtgactatccactgtagcgagcatctgctggataagcagagcaaatggtatgacgtgcctcccgcgaaacctctgtttaccgtagaggtgcgcgagcggatcgcgatcgacccgtttaacgatgcaaatttacaagaaccggcgctggcggcaaggcagttgaaccggcatcttttgcttcaattacaaccaggtgctacacctctttcaggaattaatgatgcaagcgctctaccttga

SEQ ID NO: 72816 - DNA, 258 bp, Citrobacter koseri
atgcaagcgctctaccttgaaattaaaaatctcataataaatacgctgaatctggacgagctgtccgctgacgatatcgataccgaggcagcgctctttggtgatggtttaggactggattcgatcgatgcccttgagctggggctggcggtgaaaaaccagtatggcgtggtgctctccgcagagagcgaagagatgcgtcagcacttcttttccgtcgccacgctggcatctttcattcacgctcaacgtgcctga

SEQ ID NO: 72817 - DNA, 252 bp, Citrobacter koseri
atgacagaacaacatgccatttatgaagaagtctccgcgctgctggtcaaactgtttgaaatcgaccctcaggacatcaaacctgaggcgcgcctgtatgaagatctggagctggacagcatcgacgccgttgacatgatcgtgcatctgcaaaagaaaaccggtaagaaaatcaagccggaagagttcaaagcggtgcgtaccgtgcaggatgtcgtcgacgccgtagaacgcctgctgaaagaagcgtaa

SEQ ID NO: 72818 - DNA, 582 bp, Citrobacter koseri
atgtcaggcgctcacgcgcgtatgggtattcagttgctgaccggcctgatgctgctggcctggccatttttgatctggtttgggctgacgcataacagcctccactggctgctgccgctgatggcgttgctgctctttttacgctttcgtcagacccggcgacaggcggggccgctgcgcgtcgtcactcaggtggcggcggtggcgggcatagcgctttgcgtcgccagctatctgcttaaaacacatcaactgctgctgttttacccggtcgttgttaacggcgtcatgcttgccgtttttggcggctcgctgtggacatccatgccgattgtcgaacgtctggcgcgactgcgtgaacctgcgctgccggaagccgcagtgcgctacacccgtcgcgtaacacaaatctggtgcgcctttttcatcggcaacggcggtattgcgctctttaccgcgctacacggcgacatggcgctatggaccgcctggaacggcatgattgcctatctgctgatgggcgcgttgatggcgggcgagtggctggtgcgccgccaggtgattaaacgagaaacacaatga

SEQ ID NO: 72819 - DNA, 1362 bp, Citrobacter koseri
atgaagcagacccttccgctctcccgctggctcaccgcgccacgcccggatgaaacgcctgttgcctggctgggtgaggacacctggacgctgggccacctgcgccatgacgtcgcgcagctggtgaaacacctgcaacagcaggagggcgagcgctgggcgctgtgttttgagaacagctatctgtttattgttgcgctgctggcaacgctgcatagcggaaaaacgcccgttattccggggcataaccgcgtctctctgctggatgagcagcgcgcgctgttcaacggcgtgctcagcgataagacgtctggctggcacggcccgctgctggtggtcaatacatcacgacagttcagcgcagaagccttcacattcgacgatattgccgccgatgccttcgttgaattgtttacctctggctccaccggtcagcccaagcgcatcatcaaacccatcgcgcggctggattgcgaggccgaactgctggcgatgcgttttgccgaccgtctggcaggctgtcgcgtcgtggcgtcagtcgttcctcagcatctgtacggtctgactttccgtattttcctgccgatggcgctcggcctgccgcttcatgccgcaatgctctactacgcagagcagcttgccgcgctaagccacgaccaccgctatgcgtttatcagcagtccggcgttcctgaaacgcctcgaccaccggctcacgccgccgccagtcaacatgatcctttccgcaggcggtatgctgccctggggcgatgtcacgcaaaccgccgcctggctcaatatctggccggatgaaatctatggcagcaccgaaaccggcattctcgcctggcgctaccgccagcaggaggagatcgcctggctccccttccccggcgtacatttccagccggagggcgaagcatttcgcgccttttcgccgctgatcgtgcagcaggacggtctgttgctcgacgatatcctccagtttgatgagaacggccagttccgcctgatgggacgccgggggcgcgtcgtcaaaattgaagagaaacggatctcgctcagcgaagttgaacagcggctgctggagctgaagggcatccgcgaggcggtcgcgttgcctgtttcacgcggcggtcgtcagggcattggcgttctgctggtgctggatgacgaaacccgccaacaatggcagcgctgcggcggcaaagcccaggagctgacctggcgtcgctcgctgctgccgtggctggagccggttgccgtacctcgctactggcgcgtgatcgacgagatcccggtcaacagtatgaacaagcgtgtctatgcgcaattacaggagttatttcatgataccccatga

SEQ ID NO: 72820 - DNA, 354 bp, Citrobacter koseri
atgataccccatgaaattgagcgccatcaggcacaaccccaacagcttgagatcgtcctgcatctcgacccttccctgttctggttcagcggccactttaccgtgcagccgctgttgcccggcgtcgcgcagctggactgggtgatgcattacgccaccacgttgctcacgcccggctggcgttttcacagcatccagaacgtcaaattccaggcgccgctgctgcctgaaaccacggtgacgctgatcctgagctggcaggaaacgcgccagctcctgacgtttagctatcagcgccacgatggcgacgcgcggcataccgccagcagcgggaagatccggttatgccgttga

SEQ ID NO: 72821 - DNA, 1692 bp, Citrobacter koseri
atgccgttgaccttcactccctgcgtgctcatcccctgctacaaccacggcgcgatgatggcgcgggtgctggcgcggctacagccgtttaatctgccctgcattgtggtggatgacggcagtgacgaaacaacacgtcggcaattagcacagctggcggctcaggaaccgaacctgacgctgatccgcctgccggaaaacgcgggcaaaggcgctgcggtgattcgtgggctacaggcggcctcagacgcgggatttacccacgcggtgcaggtagacgccgacggccagcatgccattgaggatattccgaagctgctcgaactggcgcaggaaaacccagccgcgctgatctccgggcagccgatctatgacgattccattccccgttcgcgcctgtacggtcgctggataacccacgtctgggtatggattgaaacgctttcgttccagttgaaagacagcatgtgcgggtttcgcgtgtatccggtcgcccctgtgctgcaactggcgcagcgcgtcacgctcggcaaacggatggacttcgacaccgaagtcatggtgcgcctctactggcagggcaacaccagctattttgtcccgacccgcgttacctatccgctggatggactgtcccattttgacgcgctaaaagacaactgccgaatttcactgatgcacacccgcttgttcttcggcatgctgccgcgcatcccgtctttgctgtttcgccgctcgtcgccgcactgggcgcgccagcaggaagttaaagggctgtggggaatgcgtctgatgctgctggtctggcgtctgcttgggcgtaaggcgttctcgctgctgctttatccggtggtcggcgtctactggctgatggcagcgcacgcccgcaacgcgtcgcaacactggctggcccgcgtgcagacacagctgacgtcacgccagcgccccgttccgtcccggctgaccagcttccaccactttctgcgttttggcgaggcgatgctggataaaatcgccagctggcgcggggagctacagtttggccgcgatgtggtctttgcgccgggcgcagaagcgacgctcaacatcacggcgccaacgggcaaactgctgctggcctcgcatctgggcgatgtcgaagcctgccgcgcgctggcgcaattgcagggcagcaaaaccatcaacgctctggtgttcagcgacaatgcccaacgttttaaacagatcatggacgagatggcgccgcaggccgggctgaacctgatgcccgtcaccgacatcggcccggacaccgccatcctgctgaaagagaagctggaacgcggcgagtggatcgccattgttggcgaccgtattgcggttaacccacagcgtggcggcgagtggcgcgtctgctggagccgttttatgggccagcccgcgccgtttccgcaggggccatttattctggcctccatcctgcgctgcccggttcagcttattttcgctctgcgccagaacgggaaacggcatatccactgtgaaccgttcgccgacccgctgctgttgccgcgcgccggacgccagcaggcattacagcaggccatcgaccgctacgccgaacgccttgagcactacgcgctacagtcgccgctcgactggtttaattttttcgatttctggcagttgccggatgccaaaaacaaggagtaa

SEQ ID NO: 72822 - DNA, 423 bp, Citrobacter koseri
gtgcttaacgatccccgttttactgctgaagtagagctgaccattccgttccacgacgtcgatatgatgggcgtcgcgtggcacggcaactatttccgctacttcgagattgcccgtgaggcgctgctcaaccagttcgactacggctaccgccagatgaaagcgtccggctacctgtggcccgtggtcgatacccgcgtgaagtaccgcaacgcgctgacattcgaacaacgcattcgggtgcgcgcccgtcttgaagagtacgaaaaccgcctgcgcatcggctacgaaatttttgatgcgcagacgggaaaacgcgccacgacgggctacaccatccaggtggcggtagaagagaaaagccgcgagatgtgcttcgtcagcccggatattttgtttgaacgtatgggagtaacgccatga

SEQ ID NO: 72823 - DNA, 606 bp, Citrobacter koseri
atgagattcctgccgctgctggcgctgatcatcagcccgttcgtgagcgctctgacgctcgacgatctgcaacagcgctttaccgaacagccggttgtccgcgcccacttcgatcaaacccggacgattaaggatctgccgcagccgctgcgatcccagggcaggatgctgatcgctcgcgaccaggggctgctgtgggatcaaaccgccccgttcccgatgcagctgctgctggacgacaaacggatggtgcaggtgatcaacggccagccgccgcaggtcatcaccgccgaaaacaacccgcagatgttccagtttaatcacctgctgcgcgcgctgttccaggctgaccgcagcgtgctggagcagaacttccgcgttgatttcgccgataaaggcgagggacgctgggcgctgcgactgacgccgatcaccacgccgctggacaagattttcgccacgattgacctggccggacaaacgtatctggagtcaatccaactgaatgataaacaaggcgatcgcacgaatatcgcactcactcaacaccaactgacgcccgctcaactgaccgatgacgaacgccaacgttttaccgcgcaataa

SEQ ID NO: 72824 - DNA, 2325 bp, Citrobacter koseri
atgacgaacgccaacgttttaccgcgcaataaccgtaaaagcctcgcgctgctatggggtgtcgcctgcctgattatgttgggtgcattgctgacgctgctgccccagtcacggctgaacagcagcgtgctggcaatgctgccaaaacaggctttagggaacattccgcctggcctgaacgacggtttcatgcagcgcctcgaccaacagctggtctggctggtaagcccgggtaaacaggccgatccgcaggtggcgcgcgactggctcgcgctgttgcaaaaatcccacgcgctggcggacgtcaaaggcccgatggacgccgacagccagcaggcatggggcgcctttttctggcagcatcgcaacggcctgatcgatgaggccacccgcgctcgtctgcaaaacggcggcgacgcgcaggcgcagtggattctgtctcagctgtattccgccttctccggggtgagcggtaaagagctgcaaaacgatccgctgatgctgatgcgcggttcgcagctggcgatggcgaaaaacggccagcgtctgcggctgatggacggctggctggtcactcaggatgagcaggggcactactggtatctgctgcacggcgagctgtccggttcgtcgtttgatatgcagcagacgcaccagctcgtcaccacactcagcgcgctggaaggtgaactaaaaacgcgttatccgcaggcgcagctgctgtcgcgcggtacggttttttacagtgattacgccagccagcaggcgaaacaggatatctccacccttggcgtggcgacggttctgggcgtgattctgctgatcgtggcggtctttcgctcgctgcgcccgctgctgctgtgcctgatatcgattggcgtcggcgcgctggccggaaccgtcgtcaccctgctgattttcggcgagctgcacctgatgacgctggtgatgagcatgagcatcatcggcatttcggccgactatacgctttattacctgaccgagcgcatggtgcacggcaacgacgcgtcgccgtggcagagcctcgccaaagtgcgtaacgccctgctgctggcgctgctgaccaccgtcgcggcgtatctgatcatgatgctcgcccctttccccggcattcgccagatggcggtatttgccgccgtgggattaagcgcctcctgcctgacggtcattttctggcatccgtggctgtgtcgcgggctgcctgtgcgccccgttccggcaatggtgctgatgttgcgctggctggcggcgtggcggcgcaataaaaaactgtccatcggcctgcccgtggcgctggcgatcttctcgctggcgggcatcgcaacgctgcatgtggatgacgatatttcacagctacaggcgctgccgcagcagattctggcgcaggaaaaagcaatcaccgccctgaccgggcagagcgtcgatcagaaatggtttgtggtttacggtcagtccgcacagcaaacgctggagcggctggaagcctttaccccagcgctggaacaggcaaaacgtgacgggctgctcagcggctatcgcacgcttccgatcaactcactcgcccgtcagcagcaggatctgaagctactgaaaaacgctgctccggcggtgagccgcgcgctacagaatgccgggctttccacggttaacccggatctgaacgccatgccggtaacggtggacgcctggcttgccagcccggccagcgaaggctggcggctgctgtggctgacgcgggaaaatggcgaaagcggcgtgctagtgccggtagacggcgtgaagcggagcgccgcgctgaacgccctcgccacgcaatattccggcgtggcgtgggttgaccgaaaaagcaccttcgacgcgctgttcgccctctatcgcaatgtgctgacgggactgctgtttgtggcgctggcggtcattgcctgcggcgcgatgatcaggcttggctggcgcaaagggctggtaagcctggtgccgtcagtgctgtcgctgggctgcggtctggcggcgctgacattgagcggccatgcggtcaatctgttctcgctgttagcgctggtgctggtgctggggattggcatcaactatacgctgtttttcagcaacccacgcggaacgccgctgacctcgctgctggcgattacgctggcgatgatgaccacgctgctgaccctcggcatgctggtctttagcgccacccaggccatcagcagtttcggtatcgtactggtcagcgggattttcaccgcatttctgttatcgcctctggcaatgcccggtaaaaaagagaaaaaaagaagatga

SEQ ID NO: 72825 - DNA, 678 bp, Citrobacter koseri
atgatcaaacaaacagcgcgctggttgagacaccttttgccggatggcggctttgccttatccggcctacgccagcgcacaaaccgcaggccggataagcatagtgccatccggcagtttctgctgatgaccgcagcgctcattctgaccggatgcagccactcgcagaaagcgccggaaggccgcccgcaggcgtggctggaacccggcgcgcgcgtcacgctgcctgcgccgggcatctctccggcggtcagttcgcaacaactgctcaccggcagctttaacggcaaaacccagtcgctgctggtgatgctcaatgccgacgagcaaaaaatcacccttgccggactgtcgtcggttggcatccgcctgttccttgtcacctatgatgagaaagggctgcacaccgagcagtccatcgtggtgccgcagctgccgcccgccagccaggttctggccgacgtaatgctcagccactggccgattagcgcctggcagccgcagttgccgacgggatggacgctcaccgacaacggcgacaaacgcgagctgcgcaatgccagcggtaagctggtgacggaaattatctatctgaaccgcaaaggcaaacgcgagccgatcagcattgagcagcatgtgttcaaataccacatcaccattcaatatctgggtgactga

SEQ ID NO: 72826 - DNA, 1170 bp, Citrobacter koseri
atgatctatatttctgcggtcggtatgatcaacgcgctgggcaacgatacggatgagatcgccacgaacctgacgcgcggcgtggcgcctggtatgcgccctcgttccggctggctacaggggcatccacaggcggtgctcgccggtgttgacggcgaactgcccgccatccccgatgactttgccgctcaccgttcgcgcaacaatcagctgctgctggccgcgctcgcgcagatccagccccgggtggatgaagccatcgcgcagtatggccgcgatcgcgtcgccgtggtgctcggcaccagcacctccggcctcgacgagggtgatgcccatgtcaacctgacgctaaacggccaggaaagcctctcctggcagtacccgcagcaggagctgggcgatccgtcgcgctttctcagccactggctggcgcttgatggcccggcattcaccctttccaccgcctgttcctccagcgccagagcgatcatcagcggacgccgactgatcgaagctggtctggcggacgtggcgattgtcggcggcgcggacaccttaagccggatgccgattaacggcttccacagcctggagtcgctctctccaacgcgatgcctgccgttcggccgggatcgcagcggcattaccatcggcgaaggggccgcgctgatgctgctgacccgcgaaccgcagcctgtcgcgctgctgggcgtcggcgagtccagcgacgcgtaccatatttccgcgccgcatccgcaaggtgaaggcgcgattcgcgcgattacccaggcgctcaatgacgcaggcatcacgccgacgcaggtgggttatatcaacctgcacggcaccgccacgccgctcaacgaccagatcgaatcgaaagtcgtgagtgaactgtttggcgagaatgtgccctgtagctccaccaaacatctgaccgggcacacgctgggcgcagcaggaatcaccgaagccgccctcagcatgttgattctgcaacgcgacttgccgctgccgccgcaggatttcagcgattcgccgcgtgacccggcgttgccgcgctgcggcatcatcgaacaaccgcgcgcgcttgaacgcccggtgatcttatctaactcgttcgcctttggcggcaacaacgccagcattctgctcgggagggtttcatga

SEQ ID NO: 72827 - DNA, 477 bp, Citrobacter koseri
atgagtcgctatttatcacccggcgagtatctgccgcatgacgcccccatgttgctgctcgaagacgtcgagtgcgtcacggacgagtccgccgcctgccgcgtcaccgtggcgccaggcggcgtgctggccccgtttcttgacccgcagggcaatctgcccggctggttcgcgctggaactgatggcgcaaaccgtcggcgtctggtcaggctggcatcgtcatcaacagggtcagagcgccatctctttgggcatggtgctcggcgcgcgtgaactcgtctgcgccgcaggcgccctccccgccggggaaacgctgaccatcagggccacattactcatgcaggatgagcgtttcggcagctttgaatgcacaatcgacgtgggggataacacgctggcgacaggccgcgtaaatacgttccagcccacgcaggaagaactcaccacgctatttcaacagggagctgcaacatga

SEQ ID NO: 72828 - DNA, 732 bp, Citrobacter koseri
atgagtcgttccgttctggttaccggggccagcaaaggcatcggtcgcgccatcgcccgtcaactggcggctgacggctttgttgtcggggttcactatcaccgtgacgcacagggcgcgcaagaaacgctggatgccattctcgccgtcggcggcgcaggccgtctgctcagttttgacgtcgccagtcgcgagcaatgccgcgaggtgctggagcaggatatcgacgcgcatggcccgtggtatggcgtggtcagcaacgccgggatcacccgcgacgccgcctttccggcgctgagcaacgacgactgggatgccgtgatccacaccaatctcgacagcttttacaatgtgattcagccgtgcatcatgccgatgattagcgcacgtcagggtggacggatcattaccctgtcatccgtttccggcgtgatgggcaaccgtggtcaggttaactacagcgccgcaaaagcgggcattatcggtgcgacaaaagcgctggcgattgagctggcaaaacgtaaaatcaccgtcaactgcatcgcgccggggctgattgacaccggcatgatcgcaatggaagaggccgcgctgaaagaggcgatgtccatcatcccaatgaaacgtatgggccaggcagatgaagtggcagggctgaccagttatttaatgtcggatattgcgggttacgttacccgccaggtcatatccatcaatggagggatgttatga

SEQ ID NO: 72829 - DNA, 1230 bp, Citrobacter koseri
atgacgcgtcgcgttgtgattacaggcatgggcggcgtcaccgcgtttggcgagaactggcaggacgtttccaccagactgaacgcttacgaaaacgccgtgcgccagatgccggaatggcaggtttatgacggactgcatacgctgctcggcgcgccagtcgatgatttcaccctaccggcacactatacccgcaagcgtattcgggcgatgggccgcgtgtcgctcatgtccacccgcgccaccgaactggcgctagagcaggcagggcttatcgacgatgcggtgctgaccaacggcgaaaccggaattgcctatggttcttctaccggcagtaccggcccggtgagcgaattcgccaccatgctgacggaaaaacacaccaacaacatcaccggcaccacttacgtgcagatgatgccacacaccaccgccgtcaacaccgggctgttctttggcctgcggggccgcgtgatcccgacgtccagcgcctgcacctccggcagtcaggcgattggttatgcctgggaagcgattcgtcacggctaccagacggtgatggtcgcaggcggcgcagaagagttatgcccgtctgaagcggcggtttttgacacgctgttcgccaccagccagcgcaatgacgaaccgaaaacgacgccttcgccgttcgatgaaaagcgcgacggtctggtgattggcgaaggcgcaggaacgctgattctcgaagagctggaacatgccaaagcccgaggggcgaccatttacggcgaaatcatcggctttgccactaactgcgacgccgcgcatatcacccagccacagcgtgaaaccatgcagatttgcatggaacaatcgctgaaaatagcaggcttaagcgcacgggatatagggtacatttccgcccacggcacggcgaccgatcggggcgatatcgcagaaagtcaggcaacggccgcaatttatagcgataatgtgccgatctcctcgctaaaaagctactttgggcatacccttggcgcctgcggggcactggaagcctggatgagtctgcaaatgatgcgtgaaggttggtttgcacctacgctaaacttgagtcagccggatacccaatgcggcgcgctggattacatcatgggtgaagcccgcaagattgattgtgaatttttgcaaagcaacaactttgcgtttggcggcatcaatacttctatcattattaaacgttggccctga

SEQ ID NO: 72830 - DNA, 588 bp, Citrobacter koseri
atgtaccggattgttctgggaaaagtttcgacactgagcacaggcacgctgccgtcgccactgtacgcacaggcgccgcagggcgctcgccgcgcgcgctggctggccggtcgcgtgctgctttcccacgccctttcgccattgccggagattgtgtatggcgaacagggaaaacctgctttttctcctgacacccggctctggtttaacctgagtcatagcggggacgatatcgccctgctgctgagcgacgagggcgaagtcggctgcgacattgaagtgatccgcccgcgagataactggcggtcgctggccaacgcggtgttcagccttggcgaacatgcggaagtagaagccgaacatcccgaacaacagctgacggcgttctggcgcatctggacgcgcaaagaggctatcgtaaaacagcgcggcggcagcgcctggcaaatcgtcagcgtggacagcacgctcaactcggcgttgtcggtcagccagtgccagctcgataccctgagtctggcggtctgcacgccgacaccgttcacgctgaccgccgattgcgtgcagcgcctggaatccatcgcgtaa

SEQ ID NO: 72831 - DNA, 327 bp, Citrobacter koseri
gtgaacgtgcaagggaggctcgccgccgcctcccttgcaacccaggctctccggcagggaaaatcgccgctgcgcggtttattcgccttattccgtctgcctttcgggtcggggccgagcctgcgtcccggcaggccgtcccctccgcccgcgtccctgcgggcggacccggtcagccgtcaacgtctcatcgattttcagccggaacaggggcattgctgcaatgctctgattttcagccgcaccggttttgctgttaaaaaacaaaccgcagaaatggtcaggtgtgggcaggtccggctgaaaattgccgacgtgtttccgtaa

SEQ ID NO: 72832 - DNA, 1572 bp, Citrobacter koseri
ttgtccagactacgccgcacactttttgcgctgctggcctgtgcgtcattcctcgcgcatgccgccgcacctgacgagatcaccaccgcatggccggtaaacgtagggccgctaaacccgcacctttatacgcctaaccagatgttcgcccagagcatggtgtatgaaccgctggtgaagtatcaggcggatggttcagtaaaaccctggctggcaaaaagctggacccactcggcagatggcaaaacctgggtgtttacgctgcgcgatgacgtaaccttctctaacggcgaagcgtttaacgcccaggccgcagcagagaacttccgcgcggtgcttgataaccgccagcgccatgcctggctggagctgacgaaccaaatcaccgacgtcaaagcgctgagtaaaaccgaactgcaaatcaccctgaaaagcgcctattatcctttcctgcaagaactcgccctgccgcgccctttccgctttatcgccccgtcccagtttaaaaacaacgaaacgatgaacggcattaaagcgcctgtcggaaccgggccgtgggttctgaaagcgtcgaagctcaaccagtacgacgtgctggtacgcaatgaccactactggggcgaaaaacctgcgatccgccagataacgattaaagtgatcccggacccgacgacccgcgcggtggcctttgagaccggcgatattgacctgctgtatggcaatgaaggactgctgccgctcgataccttcgcccgtttcagccagacgccggaataccgtacccagctttccgcgccagttgagaccgtcatgctggcgctgaactccgccaaagcgccaaccaacgagctggcggtgcgtgaagcgctgaactatgcggtaaataaaaaatcgctgatcgataatgccctgtacggcacccagcagatcgccgatacgctgtttgccccctccgtgccttacgccgacattggcctgaaaccacgccagtacgatccccaacaggctaacacgctgctggaaaaagcgggctggacattgcctgccgggaaaaccattcgtgaaaaagccggtcagccgctacacgttgagctggcctatatcggcaccgacgcgctgagcaaatcgatggcggaaatcatccaggccgatatgcgcaaagtgggcgtcgatgtgtcgctggtaggcgaggaagagagcagtatttatgcccgtatgcgcgatggccgtttcgggatgattttctcccgcacctggggcgcgccatacgatccgcatgcgtttatgagctcaatgcgcgtaccgtcccacgccgattatcaggcgcagcttgggctgccggacaaagcgcaaattgataaagaaattggcgaggtgctcaccaccaccgatgaggcgcagcgtaagtctctgtatcgcgacatcctgacgcgtctgcataacgatgcggtgtatctgcccatcagctatatgtcgatgatggtggtggcgaaacccgagctggggaacattccttatgcgcccatcacctccgagatcccatttgaacagatcaacccggtgaaaccctga

SEQ ID NO: 72833 - DNA, 945 bp, Citrobacter koseri
atgctgcgttatattgtgcggcgcattttgctgctgatcccgatgattttcgccgcgtcggtgattatctttttgatgctgcgcatgggcaccggcgacccggcgctcgactatctgcgactctctaacttaccgccaacgccagagatggtcgcctccacgcgggttatgctggggttggatcaaccgctggtcgtgcagtacggctcctggctgtggaaagcgctgcatctggattttggcatctctttcgccactcagcgcccggtgctggaggacgtactgaactttctgcccgccacgctacagctggcgggcgcggcgctggtgctgatcctgctcacgtctgtaccgctggggatctgggcagcgcgccatcgtgaccgtctgccggacttcatcgtgcggctgatcgcgtttctcggcgtatcaatgcccaacttctggctcgccttcctgctggtgatgttcttctcggtgtatttaaagtggctaccggcaatgggctacggcggctggcagcacatcattctgcctgcggtgtcgattgcgtttatgtcgctggcgattaacgcccgcctgctgcgcgccagcatgctggaagtcgccggtcagcgccacgtcacatgggcgcgtctgcgcggcctgaacgcgaaacaaaccgagcgccgccatattctgcgtaacgcgtcgctacccatgattaccgccgtcgggatgcacattggcgaactgattggcggcacgatgattatcgaaaacatcttcgcctggccgggcgtcgggcgctatgcggtgtcagccatttttaaccgcgactacccggtcattcagtgctttacgctcattatggtggtggttttcgtggtctgtaacctgattgttgacctgctgaacgccgcgctggacccgcgcattcgtcgccatgaaggagcgcattcgtga

SEQ ID NO: 72834 - DNA, 834 bp, Citrobacter koseri
gtgaatttttttctctctgcacgctggccggtgcgcctggcgctcctcattatcgctttgctggcgatcatcgcgctcaccagccagtggtggttgccgtacgatccgcaggcgattgatttaccgtcacgtttactgtcgccggacagccagcactggctgggcaccgaccatctggggcgcgatattttctcccgcctgctggcggcaacccgcgtctcgctcggttccgtaatcgcctgtttgctgctggtgttagcgctggggctgatcgtcggcggcagcgccggactgatgggcggtcgcgtcgatcagttcaccatgcgcgtcgcggatatctttatgacgttcccgacctccatcctctcttttttcctcgtgggcgtgttggggacggggttgaccaacgtcatcatcgcaatcgccctgtcacactgggcctggtatgcgcggatggtgcgcagcctggtgatctccctgcgccagcgtgaatttgtgctcgcctcgcgcctttccggcgccgggcatgtgcgcgtgtttatcgaccacctggccggggcggtgatcccctccctgctcgtgctggcgacgctggatatcggccatatgatgctgcacgtcgccgggatgtcgttcctcggcctcggcgtcactgcgccaacgccggaatggggcgtaatgattaacgatgcgcgccagtatatctggactcagccgctacagatgttctggccgggactggcgctgtttatcagcgtgatggcctttaacatggtgggtgacgccctgcgcgatcacctcgaccctcatctggtgacggagcatgcccactga

SEQ ID NO: 72835 - DNA, 765 bp, Citrobacter koseri
atgccacaacaaattgaattacaaaacattgtgttgcaagcagacagaccgttggtgcacggcgtgtcgttagcgttcaggcgcgggcgcgtactggcgctggtaggcggcagcggcagcggtaaatcgctgacctgcgcggcggcgctgggcatcctgcccgcaggcgtgcgtcagacagcgggcgccattctggccgatggtcagccgatttccccctgcaagctgcgtggaattaaggtcgcgaccatcatgcagaacccgcgcagcgcctttaatccgctgcacacgatggcggcccacgcaaaagaaacctgcctggcgtcaggtaaaccggcggatgacgccacgcttatcgcggcgctggaggcggtaggtctggaaaatgccgcgcgggtgctgaagctttacccgttcgagatgagcggcggcatgctgcaacgcatgatgattgcaatggcgctgctgtgtgacgcgccgttcatcatcgcggacgaaccaacaaccgacctggacgtagtcgcccaggcacgaatcctcgatctcctggaaagcattatgcacagccgcgcgcccggtatgctgctggtcactcatgatatgggcgtcgtcgcgcgactggcggacgatgtggcagtaatggacaacggcaagatcgtagaactgggtgacgttgaaacgttattccgcaccccgcagcatagcgtgacgcgtaatctggtttcggcgcatctcgcgctgtacggtatggagttagcctcatga

SEQ ID NO: 72836 - DNA, 807 bp, Citrobacter koseri
atgacgttactgacggtaagcggtatttcccatcaatacacgcacgctaacctcagcggcaaacatcagcatcacacggtgctgaaagaggtgtcattaagcctgaaaagcggcgaaaccgtggcgttattggggcgtagcggctgcgggaaaagcacgcttgcccgcctgctggtcgggctggaatcgccgacgcagggccgcgtctgctggcagggcgagccgctctccacgcttaaccgggccagacaaaaagcgtttcgccgtgatatccagatggtgtttcaggactcaatcagcgcggtaaacccgcgtaaaaccgtacgcgagatcctgcgtgaaccgatgcgccatttgctgtcgctttccagagccgaacaaatcgcgcgcgccagcgagatgctgcgggcggtggatctggacgacacgcttctggataaacgtccgccacagctgagcggcgggcaattacagcgcgtctgcctggcgcgggcgctggcggtcgaacccaagttactgattctggatgaagcggtctccaacctcgatctggtattgcaggcgggcgtcattcgtctgctcaaaaagctgcaacagcagttcggcaccgcctgtctgtttatcacccacgatttacgtctggtggaacgtttttgccaccgggtaatggtgatggatgaagggcagattgttgagacgcgaaccgtaggtgacacattaaccttttcctctgacgccgggcgtgtgttacaaaatgcggtacttcccgcatttcccgtgcgccgtcgcgcgacagaaaaggtttaa

SEQ ID NO: 72837 - DNA, 402 bp, Citrobacter koseri
atgcaacgtgtcactattactctcgatgacgatttactcgaaacgctggatagcctgagccagcgtcggggttacaacaaccgctccgaagcgattcgtgacattctgcgcggcgcgctggcgcaagaggccacgcaggagcacggcacccagggtttcgcggtgctctcgtatgtttatgagcatgagaaacgcgatttagccagccgcatcgtttccactcagcatcatcaccatgatttgtcggtggcgacgctgcatgtacacattaatcacgacgactgtctggagatcgccgtactgaaaggcgatatgggcgacgttcagcattttgccgatgacgtcatcgcccagcgcggcgtgcgccacggtcatttgcagtgtttgccgaaggaagagtga

SEQ ID NO: 72838 - DNA, 1125 bp, Citrobacter koseri
atgcgccgattacgcaatatttataacctcggcatcaaagagttacgcagcctgctgggggataaggcaatgctgacgctgattgtctttgccttcacgatttcggtgtactcctccgccaccgttctgccgggctcgctgcaccttgcgccaatcgcgattgccgatatggaccagtctcagctgtcgaatcgcattgtgaacagcttctatcgcccgtggttcctgccgccggagatgatcaccgccgatgagatggacgccggactggatgccggacgttacacctttgccgtcaatattccgcccaatttccaacgggatgtgctggcggggcggcagccggatattcaggtgaacgtcgatgcgacgcgcatgagtcaggcgtttaccggcaacagctatatccagaacattatcagcggcgaggtgaacagctttgtggcgcgttaccgcgacaatagcgagccgctggtctcactggaaacccggatgcgcttcaacccgaatctggacccggcatggttcggcggcgtaatggcgattattaataacatcaccatgctggcgattgtgctgaccggctcggcgctgatccgcgagcgggagcacgggacgattgaacacctgctggtgatgccgattaccccgtttgagatcatgatggcgaaggtctggtcgatggggctggtggtgctggtggtttccgggctgtcgctgatgctgatggtgaagggggtactcggcgtgccgattgagggctccattccgctgtttatgctgggtgtcgcgttaagcctgttcgccaccacgtctatcgggatttttatgggcaccctggcgcgttcgatgccgcaactggggttgctgatgattctggtgctgctgccgttgcagatgctctccggcggttccacgccgcgtgaaagtatgccgcagatggtgcaggacatcatgctgacgatgccgaccactcactttgtcagcctcgcgcaggcgatactttatcgcggcgccgggtttggcatcgtctggccgcagtttctgacgctgctggcgatcggcagtgctttcttcctgatagcactgctgcgtttcagaaagacgattggcacgatggcgtaa

SEQ ID NO: 72839 - DNA, 2748 bp, Citrobacter koseri
atgacgaacctggcgcgtcttcccattcctcccgtggcgcaccttgacggcgtgagtcagcattacggggcaacggtggcgctgaacaacatcacgctggatatccccgctcgctgtatggtggggctgattggcccggatggcgtcggtaagtcgagcctgctgtcgcttatctccggcgcgcgcgttatcgagcaaggcaatgtgcgggtgctgggcggcgacatgcgcgatgcgacgcaccgccgcgatgtctgcccacggatagcctggatgccgcaggggctgggaaagaacctctaccatacgctgtcggtgtatgagaacgtcgatttcttcgcgcgtctcttcgggcatgataaagcggagcgtgaagcgcgaattaccgatctgctgaacagcaccgggctggcgccgtttcgcgatcgcccggcggggaagctctcgggcggcatgaaacaaaaactggggctgtgctgcgcgctgatccatgacccggaactgctgattcttgatgagcctaccaccggggttgacccgctttcccgcgcccagttctgggcgttgatcgacagcattcgtcagcggcagactaacatgagcgtgctggtcgccacggcctatatggaagaagccgagcgtttcgactggctggtggcgatgaacgcaggtgaagtgatggcgacgggcagtgcgcaagaactgcgggacaaaaccggcagcgccacgctggagcaggcgtttatcgccctgttgccagaggcgcagcgccaggcgcacaaacccgttgttatcccgccttatgatgcgacgcaggaagagatcgccattgaggcgaaagatctgaccatgcggtttggcaatttcgtcgccgtcgatcacgtcaatttccgcatcccgcgcggagagatttttggttttctgggctcgaacggctgcggcaagtccaccaccatgaaaatgctcaccgggctgctgcctgccagcgaaggggaagcctggctgttcggacagtcggttgacccgaaggatatcgaaacccgccgccgggtgggttacatgtcgcaggcgttttcactctacagcgagctgaccgtgcggcaaaacctggagctacatgcccgcctgttccacatcccggacgcagagattccgcagcgcgtagcgcagatgagcgagcgttttatgctctctgacgtcgaagatatgctgccggaagcgctgccgctcggtattcgccagcgcttgtcgctggcggtggcggtgatccatcgcccggaaatgctgattctggatgagccgacctccggtgtggatccggtcgccagggatatgttctggcagttgatggtggatctgtcgcgccaggataaggtgaccatttttatctccacccactttatgaacgaagcggaacgctgtgaccgtatgtcgctgatgcacgccggaaaggtgcttgccagcggcacgccgcaggaactggtagagcggcggggcgcagccagtcttgaagaggcgtttatctcctggttacaggaagccgcagggccagcgcctgtatcaccgctgccgccagcggacgcgccagacgcgcataaaacgagtaaaccgccgcgccagggctttagtctgcgacgcctgttcagctacagccgccgtgaagcgctggagctgcgccgcgatccggtgcggtcaacgctggccttgctggggacggtcattttgatgctgatcatgggctacggtatcagcatggatgtggaaaatctgcgctttgccgtgctcgatcgcgatcggaccgtcagcagccaggcctggtcgttgaacctggcggggtctcgctattttatcgagcagtcgccgctcaccagctatgacgatcttgaccgacgtatgcgctcgggcgaggtggcggtcgcgatagaacttccgcccaattttggacgggatatcgcccgcggcacgccggtgcagattggcatgtgggtggatggcgcaatgcccagtcgcgcggaaacggtgaggggatacgtacaggcgatgcaccagagctggctacaggatgtagcgagccgtcagccgaatgccagcagccagggcgggctgatgaccattgaaacgcgctatcgctacaacccggatgtgaaaagcctgccagcgattgtgccggcggtgattccgctgctgttgatgatgatcccgtcgatgctcagcgccctgagcgtggtgcgtgaaaaagagctgggatcgattatcaacttgtatgtgacgccgaccatccgcagcgaatttttactcggtaaacagttgccgtacatcgcgctggggatgctgaacttcctgttgctctgtgcgctgtcggtgtttgtttttggcgtgccgcataagggcagcttcctgacgctcaccctggcggcgctgctttacgtcaccatcgccaccgggatggggctgctgatttcgacgtttatgaaaagccagatcgccgcgattttcggcacctcgatcattacgctgatcccggcgacccagttctccgggatgatcgacccggtggcgtcgctggaagggccggggagatggatcggcgagatctacccgaccagccattttctgacgatcgcgcgcggtacgttctcgaaagcgctggatctgatggatctctggccgctgttcgtgccgttggcgatcgccattccgctggtgattggcctgagcgtattgctgctgaaaaaacaggaggggtga

SEQ ID NO: 72840 - DNA, 1068 bp, Citrobacter koseri
atggacaaaataaagcgtcatctggtgtggtggagtgttggcatcctggtggcaatagcagccgtagcgtggtggatgctacgtcctgctggcgtaccggatggctttgccgccagcaacggcagaattgaggcaacagaagtcgatattgccaccaaaatcgccggtcgaattgacaccattctggtgtcggaagggcagtttgtgcgccagggcgaggtgctggcgaagatggacacccgcgtgttgcaggaacagcggctggaagccatcgcgcaaatcaaagaggctgaaagcgcggttgccgccgcgcgcgccctgctggagcaacgccagagcgaaacgcgcgccgcccagtcggtggtgaagcagcgtgaagcagagctggattcggtctccaaacgtcatgtgcgttcccgctcgctgtcgcagcgcggtgcggtttccgctcaacagctggatgacgatcgcgccgctgccgaaagcgctcgcgccgcgctggaatccgccaaagcccaggtctctgcgacgaaagcggcgattgaagcggcccgcaccagcattattcaggcgcagacccgcgtagacgcggcgcaggctaccgagcgacgcattgtggcggacatcgatgacagtgaattaaaagcgccgcgagatggccgcgtccagtaccgcgttgccgaaccgggagaggtgctgtctgcgggcggtcgggtgctgaatatggtcgatctcagcgatgtctacatgaccttcttcctgccgaccgagcaggccggcctgctgaaaattggcggagaagcgcgcctggtgctggatgccgcgcccagcctgcgcattccggccaccatcagttttgtcgccagcgtcgcgcagttcacgccgaaaaccgtcgaaaccagcgatgaacggctgaagctgatgttccgcgtgaaggcgcgtatcccgccagcgctgttacagcagcatctggaatacgttaaaaccggtttgccgggtatggcatgggtgcggctggatgaacagcgtccctggcctgacgatctggcggtgaggctaccgcaatga

SEQ ID NO: 72841 - DNA, 1014 bp, Citrobacter koseri
atgtcatccatccacgtttgcaacgcacatcacccggctccggcttttgacggcgatgctatcgcgcaatatatgcgtaccgattttattacgctgccggatcatctcagcgttcatgaggcgcgtgaattctttgtgtcgcaactcacctcagatgatattcccggccaggtgtttgtggttgcggaaaaacagctgcgcggggttttatccatcaagaaacttttgcaggcaagcgacacggcgcaatctatccgcgccttaatggacagttgcctgtttcgcgtcaaacccgacgacgaacgtccacacatcattgccgagctgaccgaacgccagctcgatctggtgccggtcgtcgataaaggcgagctggtcggctgcctgatggaaaaagagattgcccatcttctggaagatgacgtcactgaagacgtgcagcgccagggggcgacgctgccgctggagaaaccgtatctggacatcagcccgtggacgctgtggaagaaacgttctgtgtggctgctgttgctgtttgtagcggaagcctataccagtagcgtactgcaacatttcgaagaggcgctggagtcagcgattgcgctggccttcttcattcccctgctgattggcaccggcggcaacagcggcacgcaaataacctctacgctggtgcgcgcaatggcactgggcgaagtgcgactgcgcgacatggggcgggtcattcgcaaagaggcatcgacctcgctgctgatcgccataacgctgggcctggcgggttgtctgcgcgcctggatgatgggtatcggcgtggaaatcacgctgatcgtcagcctgacgctggtatgcattacgctgtggagcgcggtggtgtcatcggtgatcccgatggtgctcaagcgcatcggcatcgaccctgcggtggtctccgcgccgtttatcgccacgctgatcgacggcaccggactgattatctactttaaaatcgcccagtattttcttggcctgaactga

SEQ ID NO: 72842 - DNA, 1194 bp, Citrobacter koseri
gtggaaaggtttgatgccgttattataggcgctggcgcggcgggtatgttctgtgcggcgcaggccggtcaggcggggcgccgcgtgctgctcgtcgataatggtaaaaaaccggggcgtaagatcctgatgtccggcggcgggcgctgcaacttcacgaatctgtatgtcgaacctgctgcctatctgagccagaacccccatttctgcaaatcggcgctggcgcgttacacccagtgggactttatcgatctggtgggcaaacacggcatcgcctggcatgaaaagacgctcggccagctgttctgcgacgactctgcgcagcaaattgtcgatatgctggtggcggaatgcgaaaagggcaacgtgacgatgcgcctgcgcagtgaagtgctcagcattgcgcgtgatgacgaagggtttaccctggaactgaacggcatgacggtcgcggcgaaaaaagtggtgatcgccacgggcggtctctccatgccgggtctgggtgcgtcgccgttgggttataaaattgccgaacagtttggtctggatgtcctgccgacccgcgccgggctggtgcccttcacgttgcataaaccgctgctggagcagcttcaggtgttatccggcgtttcggtgcctgcggtgatcgcggcgcaggacggtacggtattccgtgaaaatctgctctttacccaccgtgggctgtcaggcccggcggttttacaggtttcgagtttctggcagcccggcgaatttgtcagcatcaatttgctgccggaggtcgatcctgatgatttcctcaatgaacaacgttgcgcgcacccgaatcaaagcctgaaaaatacgctggcgatgcagttgccgaagcgcctggtggaatgtttacagcagcttgggcagatcccggatgtttccctgaaacagttgaacgcacgcgagcagcaggcgctgattgaaacgctgaccgaatggcgcgtacagcctaacggtacggaaggctatcgcacggcggaagtgacgcttggcggcgtgaacaccgatgaactttcttcgcgcacgatggaggcccgaaaagtgccgggactttattttatcggcgaggtgatggatgtcaccggttggctggggggctataacttccagtgggcctggtcgagcgcgtgggcatgcgcgcaggcgctgagcgaaggataa

SEQ ID NO: 72843 - DNA, 1497 bp, Citrobacter koseri
atgctacatttgtttgctggcctggatttacataccgggcttttattattgcttgctctggcttttgtgctgttctacgaagcgattaacggcttccatgatacagccaacgcagtggcaaccgtgatttatacccgtgcgatgcgttcgcaactggcggttgttatggctgcggtctttaacttctttggcgttctactgggcggtctgagtgtagcctatgccatcgtgcatatgttgcctacggatttgctgcttaacatgggttccgcacatggcctcgctatggtgttctctatgttgctggcggccattatctggaacctcggtacatggtactttggtctgcctgcctccagttcccatacgctgattggcgccatcattggtatcggtttaaccaatgcaatgatgaccggcacttcagtggtggatgcgctaaatatacctaaagttatcaatatctttgggtcattgattgtctcccctatcgtaggcctggtgtttgctggcggtctgatctttttgctgcgtcgctactggagcggtactaaaaagcgcgcacgtatccacctgacccctgctgaacgtgaaaagaaagacggtaagaaaaagccgccattctggacgcgtatcgcacttatcctctcggctattggcgtggcgttctctcatggcgctaacgatggtcagaaaggcattggtctggtcatgctggttctgattggcgtggcgcctgcgggcttcgtcgtcaatatgaacgcatccggctatgaaattacccgtacccgcgacgccatcaacaacgtcgaaacgtacttccagcagcaccctgatctgctgaaaaaagtcaccggcgtggatcagctgattcccgcaccggaaccgggcgcgacagaacccgcagagttccattgccacccggcgaataccatcaatgcgcttgatcgcgcgaaaggtatgctggcgaatctggaaagctacgacacgttaagcgttgaccagcgtagccagctgcgtcgcattatgctgtgcatctccgacacgaccgataaagtcgtgaagctgcctggcgtaagcaatgacgatcagcgtctgctgaaaaaactgaaaaccgatatgctgagcaccattgagtacgcgccgatctggatcatcatggccgtcgcgctggcgctgggtattggcaccatgatcggctggcgccgcgtggcgaccaccatcggtgagaagattggtaagaaaggcatgacctatgcgcaagggatgtcggcgcagatgacggccgcagtctctatcggtctcgccagctacaccggtatgccggtatccaccacgcacgtcctttcttcctccgtcgcggggacaatggttgtggacggtggcggtctacagcgcaaaacggtcaccagcattctgatggcctgggtgtttaccctgccagcggcgattattctgtccggcgtgctgtactggatctcgctaaagattatctaa

SEQ ID NO: 72844 - DNA, 336 bp, Citrobacter koseri
atgataagcaccgtcgcattattctgggctttatgtgtcgtttgcattgttaatatggcgcgctatttctcatcgttacgcgcgctgttagtggtactgcgtggttgcgatccattgctctaccaatatgtggatggaggtggcttctttacctcacatggtcaacccaacaaacagatgcgtctggtgtggtatatctacgcgcaacgttatcgcgatcaccacgatgatgaattcatccgccgttgtgaacgcgttcgcggccagttcatcctcaccagcgcattatgcggtctggtgctgatcagtatggttgcgctgttgatttggcactga

SEQ ID NO: 72845 - DNA, 435 bp, Citrobacter koseri
atggcttacaaacacattctcatcgcggttgacctttccccggaaagtaaagttctggtagaaaaagcggtttcaatggcgcgtccttacaacgcgaaagtctctcttatccacgttgatgtcaattactctgacctgtacaccggcctgatcgacgtgaatctgggcgatatgcaaaaacgcatctctgaagaaacacaccatgcgctgaccgaactttccaccaatgccggttatcctatcaccgaaaccctgagcggcagcggcgatctgggtcaggtactggttgacgcgatcaaaaaatacgatatggatctggtcgtttgcggtcatcatcaggacttctggagcaaactgatgtcttcagcacgccagctgattaataccgtgcatgtcgacatgctgattgttccgctgcgcgacgaagaagagtaa

SEQ ID NO: 72846 - DNA, 1473 bp, Citrobacter koseri
atgaatacaactgcacctacgggcttgctacagcaaccccgtccgttcttcatgatcttttttgtagaattatgggagcgattcggctattacggcgtccagggcatcctggcggttttctttgttaaacagcttggcttctctcaggaacaggcatttatcacctttggcgcatttgccgcactggtgtacggcctgatatccattggcggctacgttggcgatcacctgctgggaactaagcgtaccctggtactgggggcgattgtcctggcgatcggctacttcatgaccgggttatcgttactgaaaccgaacctgatttttatcgcgctggggacgattgccgtcggtaacgggctgtttaaagccaaccctgcgagcctgctgtccaagtgttacctgcccaaagacccccgtctggacggcgcgttcaccctgttttatatgtcgattaacatcgggtcgctgctgtcgctctccctcgccccggtcatcgccgacaaattcggctatgccgttacctataacctgtgcggcgccgggctgattgtcgcgcttctggtctacttcgcctgtcgcggcatggtgaaagatatcggttcagagccagaccataagccgctgagcttccgtaatctgctcgccgtactgatcggcaccgtcgccatgattttcctctgcgcctggctgatgcataacgtaaaaatcgccaacctggtgctgatcgtcctgtcgattgtggtcatcattttcttcttccgtgaagcgtttcgtctggataaaaccggacgcaacaaaatgttcgtcgcttttatcctgatgcttgaagcggtgctgttttatattctgtacgcacagatgcctacatcgctgaatttcttcgcaatcaataacgtacatcacgatattctcggttttaccattaacccggtcagcttccaggcgctgaacccgttctgggtggtggttgccagtccggtactggcggcgatttacacgcgtctggggagcaaaggcaaagatctgaccatgccgatgaagtttacgctgggcatgttcctctgttcgctgggctttctgaccgccgccgccgcaggcatgtggttcgccgatgcgcaggggctgacttcaccgtggtttatcgtgctggtgtacctgttccagagtctgggtgagttgctgattagcgccctggggctggcgatggttgccgcgctggtgcctcagcacctgatgggctttattctcgggatgtggttcctgacgcaggcggcggctttcctgctgggcggctatgtcgcaaccttcaccgccgtaccggaaaacatcaccgacccgctccagacgctgcctatctacaccggcgtgttcagcaaaataggcctcgtcacactggcggtcaccgttgtgatggcgattatggtgccgtggttgaaccggatgattaatacgccggatagcagtaaataa

SEQ ID NO: 72847 - DNA, 348 bp, Citrobacter koseri
atgaccatgaactacattgaatttattgagacttctgtctttgcccgccagcgggaagccctgctcaccgaggatgaatatcgcgcatttcaggaaatgctcattataaacccgctggaaggtgatttaattcagggtacaggtggttgcaggaaagttcgttttgctccagcgagccactgtaagggaaaaagcggcgggattcgtagtatttactattttcaaaatagcgaagggcgtatctggcttttcatggcttaccctaagaacaaaaaggatagtctgagcggcgaagaaaaaaacgccctcaaatccatcattcaccaactaaaagagggctcgttatga

SEQ ID NO: 72848 - DNA, 288 bp, Citrobacter koseri
atgaacgatttctttaaagagctgatggaatctgcaagcgaggccgttgaaatcagccagggtcgcaaacctgctgcccgaatcacccgatatgaacttccagatgtcaaagctatcaggaagaaagccaatatgaagcagaatgagtttgcacaggcaataggcgtctcatcttccctgattcaggcctgggagcagaaaaggcgtatccctaccggaacttatcttaaggttcttcgggtgatagagcgtaatccagagatggttaatcttttcaaaacagtctaa

SEQ ID NO: 72849 - DNA, 504 bp, Citrobacter koseri
atggcattctacagttccggggttgagtacggcatccatagcctgatgtgtatggtggacagcaaaggcgacgcccgcgatatgagcgttcgcgaaattgctgacctgcaaagcgtgccctacgactatctggccaagatttttacccgtctgtcgaaagcgggcctggtgcgcagcatcgaaggcaaaggcggtggttttcagctcgccaggcctgccgaacacatcacggtgctggatgtggtcaacgccattgacggtgacaagcgcatctttgaatgccgcgaaattcgccagcgtctggctgtttttgatgagcagcctccggcgtgggcctgcgaaggtatctgcggcgtgcgctcggtaatggacatggcgcagcagcgtatggaagaagcgttagggcagcataccattctcgatctggcgcgtaagatgtaccgtaaagcgccagagacctttgtggttgaagtgcaggaatggattgacgcgcgtaaagggtaa

SEQ ID NO: 72850 - DNA, 1203 bp, Citrobacter koseri
atgcgtaaacaaattctgatcgttggtgcaggtttttccgggatgtgggccgcgctgagcgccgcccgtctggcagataaacaccagaatgacacaattgatatcaccgttatcgccccacaacccgaacttcgcgtacgccctcgcttttatgaaaatgccgtccagacgctggtcgctcccctgcaaccgctgttcgacgaaaccggcgtcaacttcctgcgcgggacggttgcgcagatccttcccgactcaaaagaggtgagctgggcagatgcctccggcaaaacgcacttacatcgctacgaccgtttgattctggcaagcggcagccacgttaaccgttcactcgtaacgggcgcagatgcgcatgcgttcgatctggatcaactggaaagcgccgccgtactggagcagcacctgaaggatctggcgaacaaagaagaaagcgacgcgcgcaataccgttgttgtttgcggcggcggctttaccgggatcgagatggcgctggagttgcctggccgtttacgtgatattctcggcgctgatgctaagaccagagtagtcgtagttgaacgcggcccgcagcctggcgctcgctacagcgaagaactgcgcaacgtgattatcgaagcgtcggcagagctgggcgtggagtggctggtgaatacggaagtggaaagcgtggacgcaacgggcatcacgctgaaagacgggcaaaccatcgcgtcgcaaaccgtcatctggaccgtcggcgttcaggcgaacgatctgaccgggcagattgacgctccacgcgaccgtcaggggcgtttacatgtgaatgctcagcttcaggtggtgggtcacgatgacatttatgccactggcgatgtggcgtacgccgcaaccgatgacaaaggcaatcatgcgttaatgacctgccagcacgctattctgctgggcaagtttgccgggaataacgcggccgctgacctgctggaggtcgctcctctgccgtatcgtcaggaaaactatgtcacctgtctggatcttggcgcatggggcgcggtctacaccgaaggctgggatcagcaggtaaaactgacgcgtgcggaagcgaaaaaactcaagctgtcgattgtcagcgagctgatctatccaccgaaggccgacagagccgtggcgtttgagattgccgatccgctggcgccatttgtttag

SEQ ID NO: 72851 - DNA, 759 bp, Citrobacter koseri
gtgaagatctgcttagttgatgaaacaggcgccggagacggcgccttatctgttcttgccgcccgctgggggttagagcatgacgaaaacaacccgatggcgctggtgctgacgactgcgcatctggaactgcgtaagcgcgatgagccgaagcttggcggcatctttgtcgattttgtcggcggggcgatggcccatcgccgcaagttcggcggcggtcgcggcgaagcggtcgcgaaagcggtcggcattaaaggcgattacctgccggatgtggtcgatgcgacggcgggactggggcgcgatgcttttgtgctggcttccgtggggtgtcgagtgcgcatgctggagcgcaacccggtggtcgcggcgttgctggatgacggtctggcgcgcgggtatgccgacccggaaatcggcccgtggttgcaggagcgcttgcagttgatccatgcctccagcctgacggcgctgacggatatcacgccgcgcccgcaggtggtttatctcgatccgatgttcccgcataagcagaaaagcgcattggtgaaaaaagagatgcgggtgtttcagtcgctggtcgggccggatcttgatgccgatggtttgctggcgccagcgcgccagctggcgaccaaacgggtcgtggtgaagcgcccggattacgcgccaccgttagcggatgtcgccacgccgaacgcggttgtcactaaaggccaccggtttgatatttatgccggtacggcgttggtggagtaa

SEQ ID NO: 72852 - DNA, 2043 bp, Citrobacter koseri
atgaccaatccattactgacgcctttctcgctaccgccgttttcccaaatccagcctgagcatgtggtgcctgccgtgacaaaggcgctgaatgactgccgtgaaaacgtggagcgggtagtggcgcagggcgcgccgtacacctgggaaaatctctgccagccgctggcggaagtggacgacgtgctggggcgcattttctctccggtcagccacctgaattccgttaaaaacagcccggaactgcgcgaagcctatgagcagacgctgccgctgctgtctgaatacagcacctgggttggtcagcacgagggtctgtacaatgcgtaccgcgacctgcgcgatggcgaccattacgcgaccctgaacctcgcgcagaaaaaagcggttgataacgcgctgcgcgattttgagctttccggtattggtttgccgaaggaaaaacagcagcgctatggtgaaatcgccactcgcctgtccgagctgggtaatcagtacagcaacaacgtgcttgatgccacgatgggctggacgaagttagtgactgacgacgcggaactgtcgggcatgccggaaagcgctctggccgccgcgaaagcgcaggcggaagcgaaagaacaggaaggctggctgctgacgctggatattccaagctatctgccggtgatgacctactgcgacaacccggcattgcgtgaagagatgtaccgcgcctatgtgacgcgcgcctccgatcaggggccgaacgcgggtaaatgggacaacagcccggtgatggaagagatcctcgcgctgcgtcatgaactggcgcagttgctgggtttcgacagctatgcctttaaatcgctcgccaccaaaatggcggaaaacccgcagcaggtgctggatttcttaaccgatctggcgaaacgcgcgcgtccgcagggcgagaaagagctggcgcaactgcgcgccttcgcgaaagcgacgttcggcgtcgatgaactgcaaccgtgggacatcgcgtactacagcgagaaacagaagcagcacctttacagcatcagcgatgagcaactgcgcccgtacttcccggaaaacaaagccgtgaacggcctgtttgaagtggtacaacgcatttatggcattacggccagagagcgtaacgatgtggatgtctggcatcccgacgtgcgcttcttcgagctgtatgacgaaaacaacgaactgcgcggcagcttctacctcgatctgtatgcgcgtgagcacaagcgtggcggggcgtggatggatgactgcgtcggccagatgcgcaaagccgatggctcgctgcaaaaaccggtcgcctacctgacctgtaactttaaccgtccggttaacggtaaaccggcgctgttcacgcatgatgaagtgatcaccctgttccacgagttcggccacggtctgcaccacatgctgacccgcatcgaaacggcgggcgtttccggcatcagcggcgtgccgtgggatgcggtcgaactgccgagccagtttatggaaaactggtgctgggagccggacgcgctggcgtttatctccggtcactacgagaccggcgaaccgctgccgaaggaactgctggataaaatgctggcggcgaagaactaccaggcggcgctgtttattctgcgtcagctggagtttggcctgttcgacttccgtctgcatgcggaatttaacccggaacaaggggcgaaaattctggaaacgctttctgagatcaaaaaacaggtcgccgtggtgccggggccgtcatggggccgcttcccgcacgctttcagccatattttcgctggggggtatgcggcaggttactacagctatctgtgggccgatgtactggcggcggatgccttctcgcgctttgaggaagaaggcattttcaaccgcgataccgggcagtcgttcctcgacaacatcctgactcgcggcggttcggaagagccgatggagctgttcaagcgcttccgtggtcgtgaaccgcagctggacgcgatgctgacgcactacggcattaaaggctga

SEQ ID NO: 72853 - DNA, 843 bp, Citrobacter koseri
atgctcagttatcgccacagctttcacgcaggcaaccacgccgacatcctcaaacacactgttcagagcctgattatcgagtcgctcaaagagaaagagaaaccgtttctttatctggacacgcacgctggcgctggccgttatcagctgagcggcgaacacgccgaacgcaccggtgaatatatggaagggatcgcccgcatctggcagcaggacgatttaccggccgagctggagccttatatcggcgtggtagagcactttaaccgtaacgggcaactgcgttactacccgggttccccgctcatcgcccgccagctgctgcgtgagcaggacagcctgcaactgacggagctgcattcaagcgattttccgctgctgcgttctgagtttcaaaaagacagccgcgcccgcgtggagcgtgccgacggctatatgcagttgaagtccaaactgccgccggtttcgcgtcgcggcctgatcctcatcgacccgccttacgaaatgaaaaccgattatcaggcggtcgtcagcggcatcagcgaagggtataagcgctttgctaccggcacctatgcgctgtggtatccggtggtgttacgccagcaaattaaacgcatgattcacgacctggaagacactggaatccgcaaaatcctgcaaattgagctggcagtacgcccggacagcgaccagcggggcatgaccgcctctggcatgattgtcattaacccgccgtggaagctggaacagcagatgaacaacgtgctgccgtggctgcacagcaagctggttccagcgggcaccgggcacgcttccgtcagctggatcgtgccagagtaa

SEQ ID NO: 72854 - DNA, 1353 bp, Citrobacter koseri
atgaccaaacactatgattacatcgcgatcggcggcggaagcggcggtattgcctcgattaaccgtgccgctatgtacggtcagaaatgtgcgttgattgaagccaaagagctgggcggcacctgcgtcaacgtcggttgcgtccctaaaaaagtgatgtggcatgccgcgcagattcgcgaagcgatccatatgtacggcccggactacggctttgacaccaccatcaacgcgttcaactggaacacgctgattgccagccgcacggcctatatcgaccgtattcacacctcgtacgacaacgtgctgggtaaaaataacgtggatgtgatcaaaggcttcgcccgcttcgtggatgcccgaacccttgaagtgaatggggaaacgatcaccgccgatcacatcctgatcgccaccggcggtcgcccgagccatccgtccattccgggtacggaatacggtatcgactccgacggtttctttgcgctgcctgcgctgccggagcgcgttgcggtggtcggcgcgggttacatcgccgtagaactggctggcgtgattaacggcctgggcgcccaaacgcacctgttcgtgcgtaaacacgcgccgctgcgcagctttgacccgatgattaccgaaacgctggttgaagtgatgaacacagaaggcccgacgcttcacacccacgcgatcccgaaagcggtggtgaaaaacgccgacggcagcctgaccctgcaactggaagacggtcgcagcgaaacggtggattgcctgatttgggcgattggccgcgaaccggcaaccgacaacgttaaccttgccgccaccggcgtgaaaaccaacgaaaaagggtacatcgtcgtcgataaattccagaataccagcgtggaaggtatttatgcggtgggcgataacaccggagcggttgagctgacgccagtcgccgtggccgcaggtcgtcgtctctccgaacgtttgttcaacaacaagccgaacgagcatctggactacagcaatattccgaccgtggtctttagccacccgccgatcggcaccgtgggcctgaccgaaccacaggcgcgcgaacagtacggcgacgaccaggtgaaagtgtacaaatcatcgttcacagccatgtacactgcggtgacgtctcaccgtcagccctgccgtatgaagctggtgtgcgtcggcgaagacgagaagattgtcggtattcacggcatcggcttcgggatggatgaaatgttgcagggcttcgcggtcgcgctgaaaatgggagccaccaagaaagacttcgacaacaccgtggcgattcacccaacggcggcggaagagttcgtgacaatgcgttaa

SEQ ID NO: 72855 - DNA, 1395 bp, Citrobacter koseri
atgaaaatcattacccgtcttaccgcgatagccatagcaggcattgcgatttgttatttaggattatctggttacgtctggtatcacgataatcaacgtagtaaagaagctgatgtgcaagcctcaacgctggaagacaataataaaatcctgggttttttgcgggaaaagggatgcgattattgtcataccccctctgctgaactgcctttttattcctcttttcccgttgctaagcagttgatgaattatgacattcaactgggctataaatctttcaaccttgaagcagtacgcgccgcgttggtcgcggataaacccgtcacgcaaagcgatctgaataagattgaatgggtgatgcagtacgaaacaatgccgccaacgcgctataccgcgctgcactgggccggtaaggtcagtgatacggagcgggaggagattctcggatggatcgctaaacagcgcgaacgttactacgccagcgcggatacggcggcggcgcaccgtaatgagccggttcagcctgtccccgaaaaactgccggttgacgatcaaaaagtcgcactgggttttaccctctatcacgatgcccgtttatcgggtgacagcaccatctcctgcgcgcattgccatgcgctgaatgcgggcggcgtggacggcaggaaaacctccatcggcgtgggcggcgcggtagggccaatcaacgcgccaacggtgttcaactcgatctttaacgttgagcaattctgggatggtcgcgcgccgacgttgcaggcgcaggctggcgggccgccgttaaacccgattgaaatggcctctaaatcctgggatgaaatcattgggaaactcgataaagatccggtgctaaaacagcagttcacggcgatatatccgcagggcttcagcggagaagcgattacggatgccattgccgagtttgagaagacgctgattacgccaaattcgcctttcgataagtggttacgaggggatgaaaatgcgctgacggcgcagcagaaacatggctatgagctgttcaaagagaataaatgcgcgacctgtcacggcggtattattctcggtgggcgttccttcgagccgttgggtctgaagaaagactttaatttcggcgaaattaccgctgcggacattggacgtatgaacgtcaccaatgaagttcgcgataaattgcgtcagaaagtgcccggattacgtaacgttgcgctgaccgcgccgtatttccaccggggggatgtgccaaccctcgacggagcggtgaaactgatgttgcgttatcaggtggggaaagagattccgcagaaagacattgatgatattgtcgcgttcctggaaagcctgaacggggtgtatacgccgtatatgcaaggaaaataa

SEQ ID NO: 72856 - DNA, 1650 bp, Citrobacter koseri
atgctcaaccagaaattacaccccgccccatccgacgaattaacgatcgaaatcgatctgctttatgaaacggatccgtgcgagttaaagctggatgaaatgatcgaggcagaaccggaacctgagatgattgaggggctacccgcctccgacgcccttaccccagccgatcgctatcttgagctgttcgagcatgtgcaatcatcccggctttttgccgacagtaaaactttccccgactgcgcgccaaaaatggacccgctggatattctgatccgctaccgtaaggtcagacgacaccgtgactttgacctgctgcgctttgttgaaaatcacttctggctaccggaaacctggtccagtgaatatgtctccaacccggaaaactcactgaaagagcatatcgatcagctctggccagtgctgacgcgtgagccgcaggatcacattccctggtcctcgctgctggcgctgccgcaatcctatatcgtgccgggcggacgttttagcgaaacctactactgggactcctatttcaccatgctgggcctggcggaaagcggccgggaagacctgctgaaatgtatggcagacaacttcgcgtggatgattgaaaattacggccacattcccaacggaaaccgcacatattatttgagccgctctcagccgccggtctttgcgctgatggtcgagctgttcgaagaggatggcgtgcgcggggcgcggcgctatctggatcatctgaaaatggagtacgccttctggatggacggcgcggaatctctggtgctcaaccaggcctatcgccacgtcatcagaatgccggacggttccctgctcaaccgctactgggacgatcgcgacaccccccgcgacgaatcgtggctggaggatgtggaaaccgccaaacattcgggtcgcccggccaatgaggtataccgggatctccgtgctggcgcggcctccggctgggattactcatcacgctggctgcgcgatgcaagccggctggccagcatccgcacaacccagttcatccccatcgacctgaacgctttcctctacaaactggagagcgcgattgccaacatttccgccctgaaaggcgaccgtgaaaccgaagcggcatttcgccagaaagccagcgatcgccgcgtcgccgtaaaccgctatctgtgggatgacgagaatggctgctatcgggattacgactggcggcgcgagcaaatggcgctcttttccgccgccagtatcgtgccgctgtacgtcggcatggcgactcacgaacaggcagaccgcctcgctaacgccgttcgcagccgtctgctgacgcctggcgggatcatggcgacagagtatgaaaccggcgagcaatgggataagcctaacggctgggcgccgctacagtggatggcaatccagggcttcaagctgtacggcgacgatatgttgggggatgaaattgcccgcaactggttaaaaaccgtcaatattttttaccagcagcaccataaactgatcgaaaagtaccatattgcctgcggcacgccgcgtgaagggggcggcggggaatatccgttgcaggatgggtttggctggaccaatggcgtggttcgccgtttgattggtttatacggcgaaccatag

SEQ ID NO: 72857 - DNA, 1590 bp, Citrobacter koseri
atgacgaataacgcttcgcaggcgatgcattcgccttttgaacactgtctgggcatcatccgtcaggcgtcagtggagatcctgctgctgctgggcgtacatgttgcggaaggaaaagaaccgcgctggtttatggaacaactggatcaagcccgccttaatttaggcggctggagcgtggtggcaaaaaaattacatataaacgatgcgcaactgagccagtttatgctgcatttgcgacatctccagcagtatgttccgcaatatgacagcgggaaggatgtcagtgaaaaccaactgcttgccgccctgcgttttgtggcgtcgctggaacaactgcgccagcggcagccgcttctcacttatcaaactgatattgatgcaggcaatcaggacgcgcaaatacaggcccggcgtcagctgcgggcgattgaactcacgctgaaagcgcttatttcgcaggtgtggccagatcgtcatcagttgaatagctacctgaagctgcattttggcgccgatcgtctgcgacgctggttaaaactcagcgaaggacaggatgcgctcagcgcgatgctgttcagcgagctggcattgatggtggtcgataaaaagtcgtttgcccgtcactattccgcatttttcaaagacgcgtctgcgctgacgctgtttgttgagccgcgtacgaccctgcgtatgttccttgaggattgccgtcaggcgcgtaacggcatcatcgccgggcagccgctcagttccgtacagttgtcgctactggattgtcagttccgccagatcacccgctcggtacagcgggcgtttaatgaaaaacgcacccgcataaatccggcttcgtttatggcgtccgatgagggcgtggtggagaaattctgggaggaggcgcgagaaaaagacgcgctggcggggggagataaccaggaaattggcgagagtattgaaccgcctcacaagcgacagcagcggacggctgaagagcgtgagcagctgatttccggggcgttgtggggcggggttggcgcaatggtgctggcgattctggtgggggcgttttggttgttcagctcgccgcctccttctgccgcgcccgtacaacgcgacgaggtcatgcaggatgacgcccggcttgaggcgccctccgcgcgggaaaccatgagccgcatggggatcacctgggacccgtttaatatgcgctcggcgatcgaccgtaatgatacacgcgttacggcgttgttcttacagggcgggatgaactggcagctggcctggaccgaacaggcgttttcggcgggcaatgccgatgtgctgcaactgctgctgcgctacccttcgctgatggatgaggtaaaaccctgccgacgcttcctgacgtcgctgagccacgccatgctgaacggagcgtcgctgacgtcgctgcataaaaagtatctgcaaagtttttgtaccgttccggcggtggtgatgcgccagcagcatgatatggagcaggcccggctgcgtgttcaggccgagcccagcgtggaaaacaaaaaatggttaaagattcagaccgccatttataacgtgattcggtaa

SEQ ID NO: 72858 - DNA, 759 bp, Citrobacter koseri
atgacgcaacgtatcgcattagtgaccggcggcagccgagggctcggtaaaaacgcggcgcttaagctggcgaacaaaggaatcgggatcattctgacgtggaacagcaatgaaaaagaggcgcagcaggtcgtgcatgaaattacgcaatcaggcgggaaagccgcagcattgcagttgaatgtcggggatatttcgggattcccggcgtttgttgaaaaggtgcgggaaaccctgaaagcggagtggcagcgtgattcgtttgattatttattgaacaatgccggaatcggcatcaacgcgccgtattcgaccttcactgaagcgcagtttgaccagcttttgaacattcagtttaaagggccgtttttcctgactcaggggctgttacccctgctgaagaatggcggcaggatcctcaatgtgtcaacggggctggcccgttttgcgttgcctggctacagcgcttatgccgcgatgaagggggcgatggaagtgctgacgcgttatcaggcaaaagagctgggcgaacgcggcattagcgtgaacattatcgcgccgggagccattgaaactgattttggcggcggcaatgtgcgggacaatgaacaactgaatgcgtatatcgcgtcacaaaccgccctgggacgggttggtttgccggacgatattggtgatgccatcgccgcgttgctcagcgatgaactgggctggatgaccgcgcagcgtatcgaagtgtcgggcggcatgttcttataa

SEQ ID NO: 72859 - DNA, 900 bp, Citrobacter koseri
atggataaaattcacgcaatgcagttgttcattcgcgtcgctgaactggagagtttttcccgcgccgccgaaacatcaggccttcctaaaggtagcgtatcccgccagatacaggcgctggaaaaccacctcggtacgcagttgctgcaccgcaccacccggcgggttcagcttactcaggacggaatggtgtattacgaacgtgcgaaagatctgctgacgaacctggacgagctggacggtttattccagcacgacccggccagcatcagcggcaagctgcgggtcgatatgccggttggggtcgccaagaacctggtgataccgcgcctgcccgcatttttacagcagtatccgggtattgagctggagctcagcagtagcgatcgcctggtggatttgatacgggaagggttcgactgcgtggtgcgggtcgggacgctaaaagattccgggttgattgcccgcccgttgggaaagctgtcggtcattaactgcgccagtccgcagtatctggcgcgttttggctacccagaaggcctggacgatctggcctcgcatgcggtggttcattattccgtcaatctgggcacgcgtccgcaaggcttcgaagtggcaacggcaaacggcacgcagtggattaaaaccggcggcattctgacggtcaacagcaccgagacctaccatgccgcctgcctggcggggctgggaatcattcaggtgccgcgcatcggcgttcgcgaagcattgcgcgccgggacgctcatcgagatcctgccgcagtatcgcgctgacccaatgccggtgtccctgctctacccgcatcgccgcaacctctcccgccgggtacacctgtttatggagtggctgaccggcgtaatgaaagactacgtggactga

SEQ ID NO: 72860 - DNA, 1029 bp, Citrobacter koseri
atgacgcaggaaaaagacgtaaaacgccctattcaggaactcgaccatgcgccggtgcccaaagtggagacgcacgatcgtgacgaaccagaaacaaacaacaaggccacccaggcgctcaaaacggtctccacgacggcagcgagaatccagcgtcagccggtgattgcccacctgatccgcgccgcagagcgttttaacgatcggctgggcaaccagtttggcgccgctatcacctatttctcgtttctgtcgatgatccctgtcctgatggtgtcgtttgccgccgccggttttattctcgcgtcgcatcccacgctattagaggacattttcaataaaatcctgatgaacgtcagcgaccctacgctggcgtccacgctgaaaagcactatcaacaccgccgttcagcagcgaaccaccgtcggcctggtggggctgggcattgcgctctattccgggatcaactggatgggcaacctgcgtgaagcgattcgcgcccagtcgcgggacgtgtgggagcgcaccccgcaggatcaggaaaaaatctggataaaatacctgcgcgattttgtctcgctgattgggctgttggttgcgctgattatcacgctgtccattacctcgattgccggttctgcgcagcagatgattatctccgcgctgtatctcgacagcattgagtggctaaaacccgcctggcggttgattgggctggccatttcgattttcgccaactacctgctgttcttctggattttctggcggctaccgcgccatcgaccacgcaagaaggcattgattcgcggtacgtttatcgccgcgatcggttttgaggtgatcaaaatcatcatgacctacacgctgccttctctggtgaaatccccgtccggcgccgcattcggttccgtgcttggcctgatggcgttcttctacttctttgcccgcctgacgctgttttgcgcggcctggatagccaccgccgaatacaaagacgacccgcgtatgccagggaaaacccaccgctag

SEQ ID NO: 72861 - DNA, 1323 bp, Citrobacter koseri
atgcaagcaaccgccaccacactcgacaacgaacaggaacacgttccggtaaactcgcgcaataaagtcgtcgttgcctccctcatcggcaccgccattgagttcttcgacttctacatttacgcgactgccgcggtaatcgtgttcccccatattttcttcccgcagggcgatccggcagcggcaacgcttcagtccctcgccaccttcgccatcgcctttgtcgcgcgcccaattggctctgcgctattcggccacttcggcgaccgcgtcgggcgtaaagtgacgctggtggcgtcattgctgacgatggggatctccaccgtcgtgatcggcctgctgccgggctatgccaccattggcattttcgccccgctgctgctggcgctggcgcgctttggccagggtctgggtctcggcggagaatggggcggcgcggcgctgctggcgaccgaaaacgccccgccgcgcaagcgcgcgctgtacggctctttcccgcagcttggcgcgcctatcggcttcttcttcgccaacggcacgttcctgctcctctcctggctgctgaccgatgagcagttcatgacctggggctggcgtttaccgttcattttctctgcggtgctggtcattatcggcctgtacgtccgcgtctcgctgcatgaaacaccggtattcgctaaggtcgctgcggcgaaaaagcaggtaaaaatcccgctgggcaccctgctgacccggcacgtacgcgtaacggtactcgggacattcatcatgctggcgacctatacgctgttctacatcatgacggtctattccatgacgtacagtaccgcagccgctcctgcggggctcggtttaccgcgtaacgaggtgttgtggatgttgatgctggcggtgatcggctttggcgtgatggtgccggttgcgggcctgctggcagacgcttttggtcgccgtaagagcatggtcattatcacgacaatgatcattctgttcgcgctgtttgcctttaaaccgttgctcggttccggtaatccggcattgatattcgttttcctgctgctggggctgagtctgatggggctgaccttcggcccgatgggcgcgctgttgccggagctgttcccgacagaagttcgctacaccggcgcatccttctcgtataacgtgtcgtcaattcttggcgcgtccgtagcgccatatattgccgcatggttgcaggggaactacggtctggcggcggtcggcacctatctggcgtcaatggccgccctgacgctgattgcgctgctgttgacccacgagacgcgccaccagtcgttgtga

SEQ ID NO: 72862 - DNA, 159 bp, Citrobacter koseri
gtgtcggatgattttgtcgcagatgaagaaatgatgatagtgccggatggcggtgtaaacaccttatccggcctacgggtgatggcggtcaaatcacaacgactggtggcgcgtctcgtgggtcaacagcagcgcaatcagcgtcagggcggccattga

SEQ ID NO: 72863 - DNA, 2061 bp, Citrobacter koseri
atgacgaaagcaggcaaaataaccgctgccgtatcagggactttgttgttgttgatcgtcgtacttatcgtcctgattgcgacatttgactggaatcgcctcaaaccgaccatcaaccagaaagtctctacagaactcaaccggccattcgccattcgcggcgatctgggcgtggtgtgggaacgtcaaaaacaggaaaccggctggcgaagctgggtgccctggccgcacgttcatgccgaagacattatcctcggcaatccgccggatatccccgaagtcacgatggtgcatctcccgcgcgttgaagccacgctggcgccgctggcgttgctgaccaaaaccgtctggctgccgtggatcaaactggtgaagcctgacgcccgcctcatccgcctctcggagaaaaacaataactggaccttcaatcttgcggctgacgagaaaaacgatcccaatgcgcagccgtccgcctggtcgttccgtctggatacgattttgttcgatcaggggcgcatcgccattgacgataaggtcagcaaagccgatatcgagatcctggttgatccgctgggtaaaccgctgccttttagcgaagtcacgggagccaaaagcaacaacgacaacaacaacgtgggggattatgttttcggccttaaggcgcaggggcgttataacggggaaccgctgaccggcacgggcaaaatcggcggcatgctggcgttacgcagtgaaggcgtgcctttcccggtgcaggctgacttccgctcgggcaatactcgcgtggcctttgccggggtggtcaacgatccgctgaacatgggcggcgtcgatctccagcttaagttttccggcgactcgctgggcgaattgtacaacctgaccggcgtactgctgccggacacgccgccgtttgaaacggacggtcgcctggtggcgaaaatcgatacggagacatcctcggtttttgactaccgcaattttaatggtcgcgtcggcgacagcgatattcacggctctcttgcttacaccaccggcaagccgcgccccaaactggaaggggatgtggagtcgcgccagcttcgcctggctgacctggggccgctgatcggcgtggattccgggaagggggcgcaacagtcgaaacgcgccgagcaaagcaagggcgaaaagagcatccagcctgccgacaaagtgctgccttatgaccgctttgaaaccgataaatgggacgtgatggatgccgatgtgcgctttaagggcgggcgcattgagcacggcagcagcctgccggtcagcgatctctctacccatatcatcctgaaaaatgccgatttacgtttgcagccgctgaagtttggcctggcaggcggcagcattgtctccagcattcatctggaaggggataaaaagccgatgcagggaagggcgaatatccaggcgcgtcgtcttaaactgaaagcgctgatgccggatgtcgaactgatgcagaaaacattgggcgaaatgaacggtgacgcggatatccggggaagcggcaattcagtggcggcgctgttaggtaacagtaatggcaacctgaagctgctgatgaacgatggcgtgatcagccgcaacctgatggagattgtcggcctgaacgtgggcaactttattgtcgggcagatatttggcgacgatgaggtacgggtcaactgcgcggcggctaatcttgacatcgttaatggcgttgcgcgcccgcaaatctttgcttttgatacggaaaatgcgctggttaacgtcaccggaaccgcgagtttcgcctctgagcaactggatttaactatcgatccagagagcaaagggattcgtattattacgctgcgttcgccgctgtatgtgcgcgggtcgtttaaaaacccgcaggcgggggtgaaagccgggccgctgatcgcgcgaggcgcggtcgctgcggcgctggcgacgttagtcacgcctgccgccgcgcttctggcgttgatttccccgtcagaaggcgaggcgaatcagtgtcggatgattttgtcgcagatgaagaaatga

SEQ ID NO: 72864 - DNA, 768 bp, Citrobacter koseri
atgataaagcaggttatccagcagctaagcattcctgaggcaagcattgaaagcttgcaggagcggcgcttttggttgcagtgcgaacgtgcttacacttatcagccaatctaccagaccaacgggcgattgatggccgtggaactgctgacggttgtggtacacccggataacccttcccggcgcgttgccccggatcgctattttgccgaactggcggtaagacaccgcgtggatgtggtgaaagaacagctccagtttctggagcagaaagccgattttttcatgcgtcatgacctgctggcctcggtcaatgtcgatggcccgacgctgatcgcgatgcgtcagcagccagaggtattgaaaacgattgagcgtctgccctggctgcgattcgaactggtggaacatattcgtttaccgaaagactcttcgttcgcctcaatgtgtgaattcggcccgctctggctggatgatttcggcaccggcatggcgaatttctctgccctgagcgaagtgcgttacgactacatcaaagtggcgcgggatctgtttgtgatgctgcgccagacgccggaagggcgaaacctctttacgctgctgctgcaactgatgaaccgctattgccgaggcgttatcgtcgaaggcgtggaaacgctggaagagtggcgcgatgtacaacgttcgcccgctttcgcggcgcaggggtattttctgtcgcgtcctgttccgctggagaaccttgaacaggtgatcctgatgctgtaa

SEQ ID NO: 72865 - DNA, 930 bp, Citrobacter koseri
atgtccaaaaagattgccgtgattggcgaatgcatgattgagctgtcacagaaaggcgcagacgttcagcgcggtttcggtggcgacacgttgaatacatccgtttacatcgcccgtcaggtcgattctgcggccttgtccgtacactacgtgacggcgctgggcactgacagcttcagccagcaaatgctggattcatggcaaggcgaaaatgtcgatacctccctcacgcagcgcatggaaaaccgtctaccgggcctctattacatcgagacggacagcactggcgaacgcactttctattactggcgcaacgaggcggcagcgaaattctggctggagagcgagcagtctgcggcaatctgcgaagagctggcgaccttcgactacctctacctgagcgggatcagccttgccattttaagcccgtccagccgcgataaattactgtcgctgctgcgcgaatgccgtgccaacggcgggaaagtcatttttgacaacaactatcgcccgcgcctgtgggcaagcaaagaagagacgcagcaggtatatcagcagatgctggaatgcacggatatcgcgttcctgacgctggatgatgaagacgcattgtggggtgaaaagccggttgccgaggtcattgcccgcacgcacgacgcaggcgtccaggaagtggtggtgaaacgcggcgcagattcctgcctggtttccatcaaaggcgaagaggtgattgacgttccggcggtgaaattgccaaaagagaaagtgatcgacaccaccgcagcgggcgactcctttagcgccgggtatctggcaatacgtttaaccggcggcgacgctgccgaggccgcacagcgcgggcacctgaccgccagcacggtcattcagcatcgcggggcgattatcccgcgcgatgcaatgccgcaataa

SEQ ID NO: 72866 - DNA, 1494 bp, Citrobacter koseri
atgcagggcacaaaaattcgactcttagcgggcagtctgctgatgatggctactgtcggctatgtgcaggcagatgcgctccagcctgacccggcatggcaacaggggacgctggcaaatggattacagtggcaagtattagctaccccgcagcgcccaagcgatcgtattgaggttcgtctgctggtcaataccggttcgctcaccgaaagtacgcaacagagcggtttcagccatgccattccccgtatcgcgctgacgcaaagcggcggccttgacgccgcgcaagcacgttcactctggcagcagggctttgaccccaaacgccctgtgccgcccgttatcgtttcttatgattccacgttatataacctcagcctgcccaacacccgtaacgatctgctaaaagaggcgctctcttatctggcgcatacctccggcaaactgtccatcacgccagagacggttgcgcatgcagtcaatagtgaagatatggttgccacctggcctatggacaccaaagagggctggtggcgctatcgtctgaaagggtctgcgctgttaggccacgatccggccgagccgctgaaacagcctgtggatgtggagaaacttaacgcgttttaccagaaatggtacaccccggacgcgatgacgctgattatcgtcggcaacgtggacgcgcgttcggtttctgagcagatcaacaaaactttcggcgagttgcaaggcaagcgtgaaacgcctgcgccggtgccgacgctttcccctctgcgcgccgaagcggtcagcattatgactgacgccgtgcgccaggatcgtctctccatcatgtgggatacaccgtggcagcccattcgcgagtccgccgcgctgctgcgctactggcaggcggatttagcccgtgaagccctgttctggcatgttcagcaggcgctcagcaagaacaacgccaaagagattggtctcggctttgactgccgggtgctgttcctgcgtgcgcagtgcgcgatcaacgttgaatcccccggcgataagctaaatctgaacctggggctggtggcgcgtgaactggcgaaagtccgtgataacggcttgccggaagaggagtttaacgcgctggtggcgcagaagaatctggagttgcagaagctgttcgccacttatgcgcgtaccgataccgatatcttgatcagccaacggatgcgctcgttgcaaaatcaggtggtcgatattgccccggaacagtaccagcgtttacggcagaacttcctgaataacctgaccgttgagatgttgaatcaaaacctgcgtcagcagctatcgcaagatatggcgttgattctgcttcagccgaagggcgaaccggagctgaatatgaaggacctacaggcaacgtgggatcaaatcatggcgccagtgacagcagcagcaacaagcgcagaaaccgatgatgtccacccggaagtcacggatatcccggctgcgcagtag

SEQ ID NO: 72867 - DNA, 1287 bp, Citrobacter koseri
atgaaaacctctctgttcaaaagcctttactttcaggtcctgacagcaattgccattggtatcctccttggccattactaccctgaattaggcgcacaaatgaaaccgcttggcgacgcgttcgttaagctgattaagatggtcatcgcaccggttattttctgtactgtcgttaccggcattgcaggtatggaaagcatgaaagcggtgggccgcaccggtgcggttgcgctgctttactttgagattgtcagtacgattgcgctgatcattggtctcattatcgtcaacgtcgttcagcctggctccgggatgaacgtcgatccggcgacgctggatgctaaagcggtggcgatctacgccgaacaagcaaaagaccagggaatcgtgggcttcctgatggatatcatcccgggcagcgtcatcggcgcgttcgccagcggtaatatcctacaggttctgctgtttgcggtgatgttcggctttgcgctgcatcgtctgggcagcaaaggccagctgattttcaacgtgattgaaagcttctcgcaggtcattttcggcatcatcaacatgatcatgcgcctggcgcctatcggtgctttcggtgcgatggcctttactatcggtaaatacggcgtgggtacgctggtgcagttggggcagctgattgtctgcttctacatcacctgtattctgttcgtggtggtggtgcttggctcgattgcccgcgcagctggcttcagcatttttaaatttatccgctacatccgtgaagaactgctgattgtgctggggacgtcctcctccgaatccgtgctgccgcgtatgctggataagatggaaaagctgggctgccgtaagtcggtggtggggctggttattcccacaggctactcgtttaacctggacggaacctcgatctatctgacgatggcggcggtgtttatcgcccaggcgaccaacagtcatatggatatcttccatcaggtaactctgctggtggtgctgctgctctcctcgaaaggggcggccggggtaacggggagcggatttatcgtgctggctgcgacgatctccgcggtgggccacttaccggttgcgggtctggcgctgatcctcggtatcgaccgctttatgtctgaagcccgcgcgctgactaacctggtcggtaacggcgtggcaacggtcgttgtggcgaagtgggtgaaagaactggaccacaaaaagctggatgatgtgctgaataatcgtgcgcctgatggcaaaacgcacgaattatcctcttaa

SEQ ID NO: 72868 - DNA, 2007 bp, Citrobacter koseri
ttgcgcgtcagccgctcgttaacaattaagcagatggcaatggttgcggccgttgtcctggtgtttgtatttattttttgcaccgttttgctgtttcatttagtacagcagaaccgctataacacggctacgcaactggaaagtatcgcccgttctgtccgcgaaccgctgtccgccgcaatcctgaaagcggatatccctgaagcggaaaccatcctggcgcgcattcagcctgcgggcgtggtcagccgcgccgacgtggtgctgccgaaccaattccaggcgctacgaatgagttttattcctgagcgctctgtcccggtgacggtgacgcgtctgtttgaactgccggtgcagatctcgctgccggtctattcccttgagcggccagccaacccacagccgctggcgtatctggtgctccaggcggactcgttccgcatgtataagttcgtgatgagcacgctctcgacgttagtgaccatttacttacttttatcgctgatgctgacggtggcgataacctggtgtatgaaccgcctgattgtgcatcctctacgcaaaatcgcccgggagcttaacgatatcccgccgcaggagctgacaggccatcagctggcgctaccgcgtctgcatcatgacgatgagattggtatgctggtgcgtagctacaacctgaatcagcagattgcccagcgtcacagcattgagcaaaacgatcatgcgatgcgctttccggtttccgagcttcccaacaaggcttttctgatggggcttctggaacaggttgtgacgcgtcagcagacgacggcgttaatgattgtcacctgtgaaacgctacgcgataccgcaggcgtgctcaaagagacgcagcgggaaatcctgttgcttacgctggtggaaaaactgaaatcggtgctggcgccgcgaatggtgctgacgcaggtgagcggctttgatttcgccatcatcgcgcacggcgtaaaagaaccgtggcacgcgattacgttaggtcagcaagtgctcactgtcattaatgaacggctgccgatcgaaagcatccagctacgccccagttgcagcattggggtggcgatgttttacggcgacctgacggccgaggcgctttatggtcgcgccgtctccgccgcctttaccgcccgccgcaaaggtaaaaatcagattcagttctttgacccggcgcagatggaagccgcgcagcagagattgacggaagagagcgatattctcaacgcgctggataaccaccagttcgctatctggctgcaaccgcaggtggagatgtccagcggtaaggtactgagcgcagaagcattattacgcgtgcagcagccggatggcagttgggaactcccggaagggttaattgaccgtatcgaatcctgcggtctgatggtgacggtcgggtactgggtgctggaagagtcctgtcgccagctttccgcctggcaggagcgcggcgtgatgatgccgctctcggtgaatctttccgcattgcagctcatgcacccgaatatggtgtcggatctgctggagctgctaagccgctatcgtattcagccggatacattgattctggaagtaacggaaagccgacgtatcgacgacccgcatgccgccgtcgccatcctgcgcccgctgcgcagcgcgggcgtacgcatcgcgctggatgactttggtatgggatacgcagggttgcgtcagcttcagcacatgaaatcgctgccggtcgatatactaaaaatcgacagaatgtttgttgagggattgccggaagatgacagcatggttacggcgattatcctgatggcgcgcagccttaacctgaaaatgatcgcggaaggcgtggagaccgaagcgcagcgcgactggctggcgcaggcaggggtggacgtggcgcaaggtttcttgtttgcccgcgcggttccgccggatgtgtttgaagaacgttacctgaagaacgcgcagcctgattacaaaacttaa

SEQ ID NO: 72869 - DNA, 3585 bp, Citrobacter koseri
atgcgcaagttcaaattaagtctcatccatctccttttgccgggtggcggtaacgccttatccggcctacgggatgccgctgattgtaggccggataagacgctaaagcgtcgccatcgggcagtgctcggcctgacgctcggcatcgcctggatgccgtttgccgaggcggcgccttccgcgcaacagcagttgctgcaacaggttcggttaggcgaagcctcgcaccgtgaggatttggtgcgccagtcgctttatcgcctggaactgatcgacccgaacaacccggaagtggtcgccgcccggtttcgctacctgctgcgccagggcgacaatgacggggcgcagaaacagctcgacaggctttcccagttagcgccgagttccagcgcgtatcagtcctcccgcacgacgatgatgctttccacgccggaagggcgccagtccttgcaggaggcgcgtttacaggcgaccaccggtcataccgaagaagcgattgccgcttacgacgcgctgtttaaaggtcatccgccgcaaggcgatctggcggtggaatactggacgacggtggcaaaatctcccgcgagacgtaacgaggcgattaatcagcttaaaagaattaacgccagtacgccgggcaataccgccctgcaaaacacgctggcgcagttgctgtttgacggcgggcgacgcgatgagggatttgccgtattagagcagatggcgaaatccagcgacgggcgcacgacggcttccgctctctggtatcagcagattaaagatctgcctgccagcgacgccagcgtaaaagcgctgcaaaaatacctgacggtgtttagcgaaggcgacagcgtcaatgccgcgcgcagcaagttgagtgaacagcagcaacagctttccgacccggcgttcagagccagagcgcaaggcctggcggcggtggaagccggacagggcgggaaagccgtaacggaattgcagcaggcggtaagcgcggatcaccgcgacagcgaagccgtcggcgcgctggggcaggcctattcgcagcgcggcgatcgtgcccgcgcggtggcgcagttccagaaagcgcttgcgatggacccgaacagcagcagtcgcggtaaatgggaaagcctgctgaaggtaaaccgctactggctggcgattcagcagggcgacgccgcgctgaaagcgaataacccggaccaggcggaacgcctctaccggcaggccaggagcatcgacaataccgacagctatgccgtgttggggctgggcgacgtggcggtggcgcgtaaagattatcccgccgccgagcgctactatcagcagacgctgcgaatggacagcggcaacagcaacgccgtgcgcggcctggcgaatatctatcgtcagcagtccccggagaaagcctcggcgtttatcgcgtcgctctccagtcgtcagcggcaaagtattgatgatattgagcgtagccttgaaaacgaccggctggcgcagcaggccgaagcgctggaaaaccaggggaactgggcgcaggcggcggaactgcatcgtcgcaggctggcgctggaccccggcagcgtctgggtaacgtatcgtttgtcccgcgatctgtggaacgccgggcagcgcagccaggccgatgcgcacatgcgcgcactggcgcgtcagaaaccgaacgacccggatcaggtgtatgcctatgggctgtacctcgcgggcaacgatcaggatcgcgcggcgatggcgcatatcaataatctgccgcgtagccagtggaacagtaacattcaggaactggcggacaggctgcaaaataatcaggtgctggaaaccgccagccgcctgcgtgatagcggcaaagagcgggaagcggaaacgctgcttcgccaacagcccgcctctacgcgcattgatttaacccttgccgactgggcgcagcagcggcgcgattattcttcggcgcgcgccgcctatgatgcggttctggcgcgggagccgggtaatgtcgatgcccgacttggcctgacggaagtctatattgcgcagggtgataacgcggcggcgcgggcggagctggcgaaacttcccgccccggcgaccggggagccgctgtccatcaatatgcagcgccgtatggcgcgggcccaggcgcaactgggcgataccgtcgcggcgcagcagaccttcaacacgattgtgccgcaggcgaagtcacagccgccttctatggaaactgcgatggtgctgcgcgacgcggcgggctttcaggcgcaaaacggcgaaccgcagcaggcgcttgagacgtacaaagacgcgatggtggcttccggcattacgccgacccgcccgcaggataatgacgcctttactcgcctgacccgtaatgacgtgaaagatgactggttaaaacgcggcgtgcgcagcgatgcggcagatttataccgacagcaggatctgaacgttacgctggagcatgattactggggatcgagcggcaccggcggctactccgatctgaaagcgcataccaccatgttccaggttgacgcgccgttgtcagatggccggatgttcttccgtgctgacctggtgaacgtggatgtcggcagtttctcgacccgtgcggacggcacctgggataagaactggggcacctgtacgctgcatgactgtagcggcaaccgcagccagtctgataccggcacgagcgtggcggtcggctggaaaaacgaaacctggagctgggatatcgggaccacgccgatgggctttaacgttgtcgatgtggttggcggcgtgagctacagcaatgatatcgggccgctgggctatacgctgaacgcgcaccgtcggccaatctccagctctctgctggccttcggcgggcagaaagacgcgccgagcaacacgggcacaaaatggggcggcgtgcgtgcggacggcggcggtgtgagcctgagctatgacaaaggtgaagccaacggcgtctgggcttcgctgagtggcgatcaactgaccggtaagaacgtcgcggataactggcgcgtgcgctggatgacgggctattactataaaatcatcaatgagaataaccgtcgcgtcaccgtcggcctgaacaatatgatctggcactacgacaaagacctgagcgggtattcgctggggcatggcggttattacagtccgcaggagtatgtgtcgttcgccgtgccggtgatgtggcggcagcgtacggaaaactggtcgtgggagctgggcggttcggtatcctggtcgcattcacgcaccaaaaccatgccgcgttatccgctgatgaatctgatcccgacggattaccgcgaagaggcggccacgcagacgaatggcggcggcagcagtcagggctttggttatacggcgcgggcgctgatcgagcgacgggtgacgtctaactggttcctcggaacggcaattgatattcaggaagcgaaggattatacgccgagccatttcctgctgtatgtgcgttattccgctgcgggatggcagggcgatatggatttaccgccgcagccgctggtgccgtacgcggactggtaa

SEQ ID NO: 72870 - DNA, 1107 bp, Citrobacter koseri
atgaacgcgctgcgtggatggatgttaactgccctgatgctggcgaccgtcagcgtgcaggcggcctgtacgtggccggcatggatacagttcaaaaaggactatatcagtcaggaaggacgggtgattgaccccagcgacgcgcgcaaaatcacgacgtcggaagggcaaagctatgcgctgttctttgccctcgccgccaacgatcgtccggcatttgacctgatcctcgactggacgcaaaacaacctggcgcagggttccttacaggcgcatctgcctgcctggctgtgggggcagaaagacccctcgacctgggaggtgctggatgcaaactccgcttccgacggcgatatctggatggcctggtcgctgctggaagccgggcgcttatggaaaacgtcgcgctataccgacactggcgccgcgctgctaaaacgcattgcgcgtgaagaggtggtaacggtgccggggctggggtcaatgctgctgccggggaacgtgggttttgcggaaaagacgcgctggcgctttaatccgagctatttacccccgcagctggcgcaatattttacccgctttggcgcgccctggaccacgctgcgtgaaaccaatatgcgtttgctgatggaaaccgccccgaaagggttctcgccggactgggtgcgctatgaaaaagacaaaggctggcagctgaaaccggaaaaaacgctggtcagcagttacgatgccatccgcgtttatttatgggcggggatgatgcacgacggcgatccgcaaaaagcgcggctgctgacgcgcctgaaaccgatggcgacgctgacgacaaaaaacggcgttccgccagagaaggtggatgtcgccagtggtaaagctcagggcgacgggccggtgggcttttcggcttctttattgcctttcctgcaaaaccgtgatgctcaggcggtgcagcgacagcgcgtggcggacaattttcccggtagcgatggctactatagctatgtgctaacgcttttcggacaaggatgggatcagcatcgttttcgcttcaccgctaaaggtgaattactacctgactggggccaggaatgcgcaagttcaaattaa

SEQ ID NO: 72871 - DNA, 2316 bp, Citrobacter koseri
atggggataagcgctttccccactttcatgacgaatgcgacgcctgcaacgcaaccattgatcaatgctgagccagcgcaagcgccgacagcgcctgcgccagaaacgccggagcagccggtcggccaggtaatgccgggcgtgccgggcgccgatgcgcccgtggtggcgcaaaacgggccttcccgcgatgtgaagctgaccttcgcgcaaatcgcgccgccgccgggcagcatggtgctgcgtggcgtgaacccgaatggcagcattgagttcggtatgcgcagcgatgaggtggtgtcgaaagcgatgctgaacctggaatacaccccgtcgccgtcgctgctgccgatccagtcgcagctgaaggtctacctcaatgatgagctgataggcgtgttgccggtcacgaaagagcaactgggcaaaaagacgctggcccagatgccgatcaacccgctctttatcaccgattttaaccgcgtgcggctggagttcgtcggacactatcgcgatgtctgcgaaaacccggccagcagtacgctctggctggatgttggccgcagcagcgtgctggatctgacgtaccagaccctgccggtgaaaaacgatctgtcgcacttcccggtgccgttcttcgatccgcgggacaaccgccaggttacgctgcctgtggtctttgccggttcgccggatctgatgcagcagcaggcggcatccattgtctcttcatggttcggttcgcgcgcaggctggcgcggccagcatttcccggtgatgtacaacacgctgccggatcgtaatgccatcgtctttgccacgaacgacaagcgccctgatttcctgcgcgatcatccgccggtaaaagcgccggtgattgagatgatcagccacccggacaacccatatgtgaagctgctggtggtctttggccgcgacgataacgatctgttgcaggcggcaaaaggcattgcgcaagggaatatcctgttccgtggcgacagcgtggtggtggatgaggtgaagcctctgctggcgcgtaaaccttatgatgcgccgaactgggtacgtactgaccgtgcggtgacgttcggcgagctgaaaacctataaagagcagctccagtccaccgggctggaacctgcggcgatttcgctgtcgctgaatctgccgccggatctctatttgctgcgcagcaacggtattgatatgaacctcaactaccgttacaccacgccgccgagcaaagacagctcgcgtatggatatcagcctgaacgatcagttcctgcaagcgttcagtctgaacagcacccaggaaagcaatcgcctgctgctgcgtttgccggtattgcaggggctgattgacggtaaaacggacgtgtcgatcccggcgctgaagctgggggcgatgaaccagctgcgctttgacttccagtacatgaacccgatgccgggcggctcggtggataattgcgtgacgttccagccggtacaaaaccatgtggtgattggcgacgactccaccattgatttctcgaaatattatcactttatcgcgatgccggacctgcgcgccttcgccaacgcgggcttcccgttcagccggatggctgacctttcagaaaccattgctgtgatgccgaaaaacccgaacgaagcgcagatggaaacgctactggatgtgaccgggacgattggcgcgcagaccggtttcccgtcgattaacctgaacatcaccgacgatagccgccagattcagggtaaagacgcggatattatggtgatcgggacaatcccggacgcactgaaagatgacaaacgcgtcgacctgctggtacaggcgacgcaaagctgggtgaacacgccgatgcgccagacgaccttcccgagcatcatgccggatgaggccgaccgcgcgccggatgcgaaatccaccatcacctctgctggcgcgatggcggcggtagtgggcttccagtcgccgttcaacgaccagcgtagcgtggtggcgttgctggcagacagcccgcgcgggtatgaactgctgaccgaagcgatgaacgacagcggaaaacgcgccgccatgtttggctccgtgtcggtgatccgcgagtctggcgtcaacagcctgcgggtgggcgatatttactacgtagggcatttaccgtggttcgaacgcctctggtacgcgttatcgaatcatccggtgctgctggcgatactggcggcggttagcgtcgtgctgttggcctgggttctgtggcgtctgctgcgcattatcagccgtcgtcgactcgatcccgataacgagtaa

SEQ ID NO: 72872 - DNA, 2607 bp, Citrobacter koseri
atgaacatcctgacccggtggcttctcattccgccggtcggcgcgcgcctgagcgagcgctatcaagggtatcgccgtcatggtgcgtcgccgtttagtgcgatgctgggctgcctgtgggtgattctggcgtggacttttattccgcttgagcatccgcgctggcagcgcattcgcgcgcagcataaagcgctctatccgcacattaacgccaaccgaccgcgtccgctggacccggcccgctatgccattcaaacgctctggttgatggccttctcgccgcgtaaagagaagaaggtcgaaccgcgctggcggtcgctctcccgcctgctgggcgtgcgcggtcgctatcatcagtggatggacacgctgcccgaccgcgtcagtaaaaagaccacgcacctggaaagcgaaaaagagctgggccatcttagcaacggggtgcgccgctttatcctcggcgtcatcgtcactttttccctgattctggcgatcatctgtattacccagccgtttaacccgctgtcgcagtttatcttcctgatactgctgtggggcgtcgcgctgctggtgcggcggataccggggcgtttctccgccctgatgctgatcgtgctgtcgctgacggtgtcatgccgttatatctggtggcgttatacctcgacgctaaactgggatgacccgctgagcctggtttgcgggctgattttgctgtttgcggaaacctacgcctggattgtcctggtgctggggtatttccaggtcgtctggccgcttaaccgccagcccgtgccgctaccgaaagagatggcgcagtggccgacggtggacatttttattccgacttacaacgaagacctcagcgtggtgaaaaacaccgtttatgcctcgttgggcatcgactggccgaaagacaagctgagcatctggattcttgacgacggtgggcgcgaagagttccgccagtttgcccagaccgttggcgtacagtacatcgcccgtaccacgcatgaacacgccaaggccggcaacatcaataacgcgctgaaatacgcgaaaggcgagtttgtctcgatctttgactgcgaccatgtcccgacacgctcgttcctgcaaatgacgatgggctggttcctgaaagagaaaaagctcgccatgatgcagacgccgcaccactttttctcgccggacccgtttgagcgcaacctcggtcgtttccgtaaaacgccgaacgaaggcacgctgttttatgggctagtgcaggatggcaacgacatgtgggatgcgacgttcttctgcggatcgtgcgcggtgattcgccgtaaaccgctggatgagattggcggcattgccgttgagaccgtgaccgaagatgcgcatacctcgctgcgcctgcaccgtcgcggctacacctcggcctatatgcgcattccacaggcggcaggtctggcgacggaaagcctgtccgcgcacatcgggcagcgtattcgctgggcgcgcggcatggtgcaaatcttccgtctggataacccgctgttcggcaaaggcttaaagctggcgcagcgtctgtgttacgtcaacgccatgttccactttttatcgggtattccacggctcatcttcctgacggcgccgctggctttcctgctgctgcacgcctatatcatctatgcgcccgcgctgatgattgcgctgtttgtgttgccgcacatgattcacgccagcctcaccaactcgaagattcaggggaaataccgccactccttctggagtgagatctacgaaacggtgctggcctggtatatcgcgccgccgacgatggtggcgctgatcaacccgcataaagggaaattcaacgttaccgcgaaaggcgggctggtagaggaagagtatgtcgattgggtgatttcccggccctatatcttcctggtgctgctcaacctgctgggggtcgtggtgggcgtctggcgttactactacggccccgccaacgaaatacttacggtgatcgtcagcctggtgtgggttttctataacctgatcattctgggcggcgcggtggcggtctctgtggaaagtaagcaggtacgccgggcgcaccgcgttgaaatctccatgccggcggccattgcccgtgaagatggccacctgttctcatgcaccgtgcatgacttctccgacggcggcctggggattcggatcaacgggcaggcgcaggtgctggaagggcaaaaggttaatttattgcttaaacgcggccagcaagagtacgtctttcctactcaggtcgtgcgtgtgctgggcaatgaggtcgggctgcaattgttgccgatgaccacgaaacaacatatcgactttgtgcagtgcacatttgcccgcgcggatacgtgggcgctctggcaggacagcttcccggaagacaaaccgctggaaagcctgctggatattctgaagctgggcttccgtggctaccgccatcttgcggaatttgctccgtcttccgtcaaagtaattttccgttctctgacgacgctggtttcctggattgtgtcgtttattccgcgtcgcccggagcggcagccggatcaggtgatggctcaacaatga

SEQ ID NO: 72873 - DNA, 753 bp, Citrobacter koseri
atgtccattctgggattgcagggcgtgcgcggcggtgtaggcaccacatcaatcacttcggcgctcgcctgggcgctgcaaatactcggggaaaatgtgctggtcgttgatgccagccccgataacctgctgcgtatgtcattcaatgtcgattttgtccatcgcgacggctgggccagggcgctactggacggtaaagactggcgcgatgccggactgcgttataccacccagctcgatctgctgccgttcggacagcttacggtggaagagcgggagaatcctcaggaatgggcggaaaagctgggagctatttgcgctggcctgcgcgaactgaaagagagccgacgctattcgtggattttgctggatcttccccacggcgtctcaccgctgacgcaacagttggtcagtctctgcgatcatacgctggcggtggtaaaagcggacaccaattgccatatccggctgcatcaacaggcgctgcccacgggcgcgcatatcctgattaacgatttacgcattgccagccagttgcaggacgatctgtaccaggtctggctgcaaagccagcgtcgtttgctgccgatggtgatccatcgcgatgaagcgatggcggagtgtatggcttcgaaacagccgctgggcgagtaccgtggcgattcgctggcggcagaagaggtgctgacgctggcgaactggtgtttgctgcactatgcgggcaatcgcgcccctgccgggagcgcatcatga

SEQ ID NO: 72874 - DNA, 195 bp, Citrobacter koseri
atgtataacaacaacgaacctgactctcagtttgattcagcattgggctatacctttcaaaatgattttctggcgttaagtcaggctttctccttgcccgaaatagactataccgatatttcccaacgcgaacagctggctgcggcgattaaacgttggcctttattggctgaatttgcgcaacaaccatcataa

SEQ ID NO: 72875 - DNA, 1560 bp, Citrobacter koseri
gtggaccccgtattttctatcggcatctcatcattatgggatgaactacgccacatgcctgccggcggtgtctggtgggttgacgctgatcgcaatgaagatgccatcagcctggtgaatcaaacgattgcctcgcaggcagggaacgcgaaagtcgcggtcatttgtatgggctgcgatccgggtgaattaatcaaattagatgaatctcacggcccggaaaaaatccagttattttcaatgccggattctgaaaaggggttatactttttgccccgcgatttgctttgttctgttgatcctacacattactttttcattcttctttgcgcgaataacgcctggcaaaatatatcaggggaacgccttcatcagtggctggaaaaaatgaataaatggacccggttccatcactgttcgcttctggttattaaccctggaaataataatgacaaacagttctccctgttgatgggggagtaccgttcgcttttcggccttgccagcttacgttttcagggcgaccagcatctgttcgacatcgcgttctggtgcagcgaaaaaggggtcagcgcccggcaacaactgacgctgcgccataaagatgcgcactgggagctggcccacaaggaagaggcgaacattcagccgcgcagcgacgaaaaacgcatcctcagcaatatcgccgttcttgaaggcgctccgccgctgtcggaacactgggcgctttttgataataaccaaaccttgttcaacgaggcgcgaactgcgcaggcggcgacgatcatcttctccctgacgcaaaatagccaaatcgaacccatggcgcggaatatccatacgctgcgccgccagcgcggaagcgcgctgaaaattatcgtccgcgaaaatctcgccagtttgcgggcaaccgacgagcgactgctgttaggctgcggcgcgaatatggttattccgtggaatgcgccgctttcccgctgcctgacgctgattgaaagcgtgcagggacagcaattcagccgctacgtcccggaagagatcgccacactcctgtcgatgacgcagcccatgaagctgcgcggtttccagacatgggacgtcttctgcgaagccgtacataacatgatgagcaacacgctgctgcccgctgacgggaaaggcgtgatggtcgcattgcgcccggtgccgggtatccgcatcgagcaggcgctgacgctctgccgcccaaaccgtaccggcgatatcatgactatcggcggcaaccggctggtgctgtttttatcattctgtcgggtcaacgatctggacactgcgctgaaccatatcttcccgctgccgaccggcgatatcttttccaaccgcatggtctggttcgaagataaccaaatcagcgctgaactcgtgcaaatgcgcctgctgtcgcctgaactgtggggcacaccgctgccgctgactcaggggccgaaccctgtgctcaatgccgagcatgacgggcgggtctggcgacgtattcccgaacccttacgactgctggatgacagcgtggagcgcccacaatga

SEQ ID NO: 72876 - DNA, 192 bp, Citrobacter koseri
atgatgaacgtcaacgatatcatccagatcatcgtcttttgcgcgctgatcttttttcctctgggctatctggcgcgccattcgcttcgccgcatccgtaacacagcccgactgttattcgccagaccccgttatgtaaaacccgccggaaccttgcgccgtgcaacaaacgtcaaggcagacaaaaaatga

SEQ ID NO: 72877 - DNA, 1680 bp, Citrobacter koseri
atgactcagcatactcaaacctcatccatgccttcaccactctggcaatactggcgcggcctttcgggctggaatttctactttctggtaaagtttggcctgctctgggcgggatatctcaacttccatccgttgcagaacctggtcttcatggcctttttgttaatgccagtccccaaactcagcctgcaccgtctgcgccattgggtcgctatcccaatcggctttgcgcttttctggcatgacacctggctgcctggcccacaaagcattatcagtcagggctcgcaggtcgcgggttttagcgcggactatatgctcgatctggtgactcgctttatcaactggcagatgatcggcgccgtgtttgtgctgctcgtcgcctggctgtttttatcgcagtggattcgggtcactctttttgttgtcgccattatgatctggctgaacgtgctgacgctgacagggccagtctttacactgtggcctggcggccagccgaccgacacggtgacgaccaccggcggctctgcggcggcgacggtcgcaacggcaggagacaccccggtggtcggcgatatcccggcgcagaccgcgcctccgacctcagccaatctgaacgcgtggctgaacaccttctataacgcagaagaaaaacgaaaaacgccgttcccgacggcgctgccggccgatgcgcagccgtttgaactgctggtgatcaacatctgttccctctcgtggtctgatgttgaagccgcaggcctgatgtcacatccgttatggtcgcatttcgatattctgtttaagcactttaactccgccacctcctacagcggcccggcggcgatccgcctgctgcgcgccagctgcggccagtcgtcgcacacgaatctgtatcaaccggcaggcaacgactgctacctgtttgataacctgtcgaagctgggcttcacgcagcatttgatgatgggtcataacggcgaattcggcggcttcctgaaagaagtgcgtgagaatggcggtatgcagacggagctgatggatcaaaaagggctgcccgtcacgctgttgggctttgacggttctccggtttatgacgacaccgccgtgctcaatcgctggctggaaaccaccgagaaagatcagaactcgcgtagcgcaacgttctataacacgctgccgctgcacgacgggaaccacttccctggcgtcagcaaaacggcggattacaaaattcgcgcgcaaaagctgttcgatgagctggacgccttctttaccgaactggagaaatcgggccgtaaagtgatggtggtgatggtcccggaacacggcggcgcgctcaaaggcgacagaatgcaggtttccgggctacgcgacatccccagcccgtcgatcaccaacgtaccggcagcggtgaaattcttcggtatgaaaacgcctcatcagggcgcatcgattgagattgaccagccgagcagctacctggcgatttccgaactggtggtgcgcgcccttgacggcaaactgtttgtcgaagacaacgtcaactgggatcagctcacccgtgggttgccgcagaccgcgccggtcgctgaaaacgccaacgcggtggttatccagtatcagggtaaaccgtatgtgcgtctgaacggcggcgactgggtgccttatccgcagtaa

SEQ ID NO: 72878 - DNA, 1197 bp, Citrobacter koseri
atgtctgactgtcgtacttacggattcaacacccagatcgttcacgcggggcaacaacccgatccttcaactggcgcgctcagtacgccaatcttccagacgtcgacgtttgttttcgacagcgccgaacagggggccgcccgctttgcgctcgaagagtccgggtacatttacacccgcctgggcaaccccacgacggacgcgctggagaaaaagctggcggtactggaaagaggcgaagcggcgctggcgaccgcgtccggcatttccgccatcaccaccacgctgctgacgctctgtgagcagggcgatcacattgtctcagccagcgcgatttatggctgcacgcacgcatttttgtcgcacagcataccgaagttcggtattgacgtgagtttcgttaatgccgccaacccggatgagatccgcgaagccatccgcccagaaaccaaagtggtgtacatcgaaacgcccgccaacccaacgctctccctggtcgatatcgaaacggtcgccgggatcgcccatcagcggggcgtgctgttggttgtggataacacctttatgtcgccgtactgccagcaacccctgctccagggagccgatatcgtggttcacagcgtcacgaaatacatcaacggacacggggatgttattggcggagtcatcgtcggcaagcaggagtttgtcgatcaggcgcggtttatcgggctgaaggatatcaccggcggctgcatgagcccctttaacgcctggctgacgctgcgcggcgtgaagacgctggggattcgcatggaacgccactgcgagaacgcgctgaaaatcgcccgtttcctggaaagccatccgaagattacccacgtctggtatccggggcttccttcgcacccgcagtatgaacttggcagacgccagatgagcctgcccggcggcattatcagcttcgaaatcgcgggtggcctggaggctggcagacgcatgatcaattcggtagaattgtgcctcctcgcggtcagtctcggtgataccgaaaccctcattcagcaccctgcgtctatgacacattcgcctgttgcgccagaggaacggcttaaagcaggtattaccgacgggctaatccgtctttctgtgggtcttgaagatccagaagatattattaacgaccttgaacacgccatcagaaaggcgacattctga

SEQ ID NO: 72879 - DNA, 1299 bp, Citrobacter koseri
atgcaggacaacacattacaattaagcaacagtaaagcgaccaccgcagcgttctcaggaaaactaccgtttacgaaatacgattttggctgggtgctgttatgtatcggcatggccattggcgccggaacggtgctaatgccggtacagattgggctaaaaggaatttgggtctttatcaccgcgtttattatcgcctaccccgcaacctatatcgtgcaggatatttacttaaagacgttatcagaaagtgaaacctgtaatgactacaccgatattatcagtcattacctggggaaaaactggggcgtcttcctcggcgtgatctactttttgatgattatccacggcatttttatctactctttatccgtggttttcgacagcgcgtcgtacattaaaactttcggtctgaccgatgccgatctctcgcagtccatcctctataaagtggcgatcttcgccgtactggtcgctatcgcctccggtggagaaaaactgctgtttaaaatctccggccctatggtggtggtgaaagtaggcatcatcctgatcttcggtttcgcgatgattccgcactggaacttcagcaatattacggccttcccgcaggcgtcggtcttcttccgcgatgtgctgctcaccgtccccttctgttttttctcggcggtgtttattcaggtgctgaacccgatgaacattgcctaccgcaaacgagaagccgacagggtgctggcgacgcgtatggcaattcgtacccaccgcatcagctatatcacgctgattgccgtgatcctgttcttctcgttttcgtttaccttctccatcagccacgaagaagccgtttccgcctttgagcagaatatctccgctctggcattggctgcgcaggtcattcccggacagatcattcatttcacctcaacggtactgaatatctttgcggttctcaccgccttcttcggtatttacctgggttttcatgaagcgattaagggcatcattctcaacgtgctgagtcgggttatcgacgtggagaagatcaatccgctggtactgacgcttggcatctgtacctttatcgttatcacgctggtcatttgggtatcgttccgcgtctcggtgctggtgttcttccagttgggcagcccgctgtacggcattgtgtcgtgcatcatcccttttttcctgatctataaagtcacgcaactggaaaaactgcgcggcctgaaaacctggctgattctgctgtatgggattttgctgtgcctgtcgccgctcctgaagctgattgaataa

SEQ ID NO: 72880 - DNA, 1203 bp, Citrobacter koseri
gtggtcacgatacgctgggatattaaaacaatcgatcgtctgtctatggttgaggatgtcctcaaggagttttcctgccgcgatattaatattatctccatgaaggtcacgccgggtcggattctgattaaatcctggtgccgccatttgcaggatatttccagcgtccagacctgcctcaatcaacatgccgacattattaatgtcgcttacctctcagagaatctttctgaactgaccacgcccgaactgacgcgaccgcgctatttctccgacattatctgtagcagccagagtatgcaggtgctgattgaaaaagcgctaaaaatcgctgacagcaaatataccgtcctgatccgtggtgagaccggcacgggtaaagagttgctggcgcgcgccattcataattccgggcagcggcgcttttatccgtttatccccgtcaactgctcaacgctgcctgaggcattgatggagagcgaactttttggttatgaaaaaggggcgttcagcggtgcggacggcagagggaaaaaagggttgtttgaaatggcggataagggaacgctgtttcttgatgaatttggcgaaatgccgctgaatttacaggccaagctgctgcgggtgcttcaggacggcggcatccgccgcgtcggcggggcgcaggtgatcccggttaacgcgcgtattattgtcgccaccaacgcgaacctggaagagatggtcgaacagcgcctgctgcgcgccgatctctggtatcgcattaacgtactgacgctcacgattccgccgttgcgcgagcgcccttcggatatcactttactgatccgccattttgtacagaaatatgccaaagagtttcaacggcggctgatactggacaaagcctgttttgagtcactgcgtcaccaccactggccgggcaacgttcgcgaactggagaacaccattatccgtctgatgctgatgtcagaaagtgatgtcatcacctgcgatgatttggggctttcaacggtgtcacaagcgttgccggggcatcccgaccgccccttcaaagagcaggtgcaacatgctgagcggcagttgattgagcagatggtggaagagaatgtctcctcccggcatatcgcgaaagcgttgggggtttcgcacacgacggtgctgaataaaatacgcagctaccaactggagggggtgagttaa

SEQ ID NO: 72881 - DNA, 1005 bp, Citrobacter koseri
atgagtacgcacgaggccaccttgcaacagccgctgttgcaggccatcgatttgaaaaaacactacccggtgaagaaggggctgtttgcgcccgagcgcctggtaaaagcgctggatggcgtatcgttcacccttgagcgcggtaaaacgctggcggtcgtgggcgagtccggctgcgggaaatccacgctgggccgcctgctgacgatgattgaaacgccgaccggcggagaactgtattatcaggggcaggatctgctcaggcacgatccgcaggcgcaaaaactgcgtcggcagaaaatccagattgtgttccagaacccgtatggttcgctgaacccgcgtaagaaagtggggcagattctggaagagccgctgctgatcaacacctcgctcagcaaagagcagcgtcgtgaaaaagcgctggcgatgatggcgaaagtcggccttaaaaccgagcattacgatcgctacccgcacatgttttccggcggccagcgtcaacgtattgctatcgcccgcggtctgatgcttgacccggacgtggtgatcgccgatgaaccggtctccgcgctggacgtttccgtgcgcgcgcaggtgttgaacctgatgatggatttgcagcaggagctggggctgtcttacgtctttatctcgcacgacctgtcggtggtcgaacacattgccgatgaggtgatggtgatgtatctcggccgctgcgtggagaaagggacgaaggagcagatctttaccaacccgcgccatccgtatacgcaggcgctgctctccgcgacgccgcgtttgaacccggatgaccgccgcgagcgcatcaagctgaccggcgagctgccaagcccgctgaatccgccgccgggctgcgccttcaacgcccgttgccgccgtcgctttggcccctgcacccagttgcagccgcagcttaaagattacggcggccaactggtggcctgtttcgccgtcgatcaggatgagaaccgacagcaataa

SEQ ID NO: 72882 - DNA, 984 bp, Citrobacter koseri
atggcgttattaaacgtagataaattatcggtgcacttcggtgacgaaggtacgccgtttcgcgcggtagaccgcgtaagctacagcgtaaatcagggcgaagtcgttggtattgtcggtgagtccggctccggtaaatcggttagctcgctggcgattatggggctgattgacttcccgggccgcgtgatggcggaaaaactggaattcaacggccaggacttgcagcgcatctctgagaaagagcgccgcaacctggtgggcgcggaagtggcgatgatcttccaggacccgatgaccagtctgaacccgtgctacaccgtaggtttccagattatggaagcgattaaggtgcatcagggcggcaacaggaaaacccgtcggcagcgggcgattgacctgctgactcaggtggggattcccgatccggcgtcgcgtctggatgtctatccgcaccagttgtccggtgggatgagccagcgcgtgatgattgccatggcgattgcctgtcgtccgaaactgctgattgccgatgaaccgaccactgcgctggacgtgaccatccaggcgcaaatcatcgaactgctgctggaattgcagcagaaagaaaatatggcgctggtgctgattactcacgatctggcgctggtggcggaagccgcgcataaaatcatcgtaatgtatgccggacaggtggtagagacaggggcggcgcacgatatcttccgcgcgccgcgtcatccgtatacgcaggcgttgctgcgcgcactgccggaattcgcgcaggataaagctcgcctggcgtcgctgccgggcgtggtgccgggaaaatatgaccgcccgaacggttgtctgttgaacccgcgctgcccgtatgccacggataaatgccgtagcgaagagccggatctgaatctgctcggcgacggccgccagtccaaatgccactatccactcgatgatgccgggaggcccacactatga

SEQ ID NO: 72883 - DNA, 903 bp, Citrobacter koseri
atgtcacaggttactgaaaataaagttatctctgcaccggtgccgatgaccccgttgcaggagttctggcactattttaaacgcaacaagggtgcggttgtcggtctggcgtatgtcgtcatcatgatcctgattgcggtattcgcgaacgtcatcgcgccgtataacccggcagatcagttccgcgatgtgctgctggcgccgcctgcgtggcaggaaggcggcagtatcgcgcacctgctgggaacggatgatgtcggtcgcgatgtgctgtcgcgtctgatgtatggcgcacgtctgtcgctgctggtgggctgcctggtggtggtgctgtcgctggtgatggggattgtgctcggcctggttgcgggttacttcggcggcattgttgataacatcatcatgcgcgtcgtcgatatcatgctggcgctgccaagcctgctgctggcgctggtgctggtggcgatctttggcccctctatcggtaacgccgcgctggcgctgacctttgtggcgctcccgcactacgtgcgtctgacccgcgccgccgtgctggtggaggtgaaccgcgattacgttaccgcttcccgcgtggcgggcgcaggcgcgatgcgccagatgttcgtcaatatcttcccgaactgccttgcgccgctgattgttcaggcgtcgctcggtttctctaacgccattctcgatatggccgccctgggcttcctcggcatgggtgcgcagccgccgacaccggagtggggcaccatgctctccgacgtgttgcagttcgcacaaagtgcctggtgggtcgtgaccttcccgggtctggcgatcctgctgacggtgctggcatttaacctgatgggtgacggtctgcgtgacgcgctcgatcccaaactgaagcagtaa

SEQ ID NO: 72884 - DNA, 1020 bp, Citrobacter koseri
atgttgcagttcatcctccgacgtttgggactcgtcatccccacgtttatcggtatcacccttctcacctttgccttcgtccatatgatcccgggcgatccggtcatgatcatggcaggtgagcgtggtatctctcctgagcgtcatgctcaactgctggctgaactcggtctggataaaccgatgtggcagcagtacctccattatatctggggggtgatgcatggcgatttgggcatctcgctgaaaagccgtttgccggtgtgggacgagttcgtgcctcgctttaaagcgacgctggaacttggcgtctgcgccatgattttcgccaccgcagtagggattccggtcggcgtgctggccgccgtgaagcgcggttccattttcgatcataccgctgttggcctggcgctgaccggttactctatgcctatcttctggtggggcatgatgctgatcatgctggtatcagtgcaatggaacctgacgccggtttccgggcgcgtcagcgatatggtgttccttgacgacaccaatccattaaccggctttatgctgattgacacggctatctggggcgaagagggcaactttattgatgctgtcgcgcacatgatcctgcctgcgatggtgctcggtacgataccgctggcggttatcgtgcgtatgacccgctcctccatgctggaagtgctgggtgaagattatatccgtaccgcgcgcgccaaaggtcttacaaggatgcgcgtcatcatcgtacacgcgctgcgtaacgcgatgctgccggtcgtgaccgtgatcggtttgcaggtagggacgctgctggcaggggcgatcctgaccgaaaccatcttctcgtggcctggccttggccgttggctgattgatgcgctgcaacgacgcgattatccggttgtacagggcggggtgttactggtagcgacgatgattattctcgtcaacctgctggtcgacctgctgtacggcgtggtgaacccgcgtattcgtcataagaagtaa

SEQ ID NO: 72885 - DNA, 1608 bp, Citrobacter koseri
atgagtatttccttgaagaagtcagggatgctgaagcttggtctgagcctggtggccatgaccgtcgcagcaagtgtacaggctaaaactctggtttattgttcagaaggttctccagaaggcttcaacccgcagctgtttacctccggcaccacctatgacgccagctcagtacctatctataaccgtctggtggaatttaaaatcggtacaaccgaagttattccaggcctcgctgagaagtgggatgtcagcgaagacggcaaaacctacaccttccacctgcgtcagggcgtgaagtggcaggacagcaaagactttaaaccgacgcgcgatttcaacgccgatgacgtggtgttctcgttcgatcgtcagaaaaatgccgaaaacccgtaccacaaagtgtctggcggcagctatgaatacttcgaagggatgggtctgccagacctgataagtgaagtgaagaaagtggacgatagcaccgttcagttcgtgctgacccgtccagaagcgccgttcctcgctgacctggcgatggacttcgcctccatcctctctaaagaatatgctgacaacatgctgaaagccggtacgccggagaaagtggatctgaacccaatcggtacggggccgttccagctgttgcagtaccagaaagactcccgcattctgtataaagcgtttgatggtttctggggcaccaagccgcagatcgaccgtctggtgttctccattacgcctgacgcgtccgtgcgttacgccaagctacagaaaaatgagtgccaggtgatgccgtacccgaacccggcggacatcgcgcgcatgaagcaggacaaaaacatcaacctgatggagcaggcgggtctgaacgtcggctacctctctttcaacaccgagaagaaaccgtttgatgacgtgaaagtccgtcaggcgctgacctacgcggtgaacaaagaggcgatcattaaagcggtttatcagggcgcgggcgttgaagccaagaacctgattccgccgaccatgtggggctataacgacgacgttaaagactacaactacgatccagaaaaagccaaagcgctgctgaaagaagcgggccaggataaaggcttcaccgttgaactgtgggcgatgccggtacagcgtccgtacaacccgaacgctcgccgtatggctgagatgattcaggctgactgggcgaagattggcgtacaggccaagattgtcacctacgagtggggtgaatacctcaagcgtgcgaagtcaggcgaacaccaggcggtgatgatgggctggaccggtgataatggggacccggataacttcttcgcgaccctgtttagctgcgctgcggcgaaagacggttctaactactctcgctggtgttacaagccgtttgaagacttgattcaaccggcgcgcgccactgacgaccacaacaagcgtgttgaactctacaaacaggctcaggtggtgatgcatgaccaggcgcctgcgctgatcatcgctcactccaccgtgtacgaacctgtgcgtaaagaagtcaaaggctatgtggttgatcctctgggcaaacaccacttcgaaaacgtctctgtcgaataa

SEQ ID NO: 72886 - DNA, 1692 bp, Citrobacter koseri
atgaaatacattaaatcgatgacgcagcagaagctgagcttcttgcttgcgctctatatcggcctgtttatgaattgcgcagtgttttaccgccggttcggcagctatgcgcaggaatttaccgtctggaaaggcctctcggcagtggttgaacttggggccacggttctcgccacgttcttcttactccgtctgctttccctgtttggtcgccgcgtctggcgggttctggctacgctggtggtgctgttctccgcgagcgccagctattacatgaccctcctgaacgtggtgatcggctacggcattattgcctccgtgatgaccacggatatcgatttatcgaaagaggtcgtcggctggcacttcattttgtggctggtggtggtgagcattctgccgctggtctttatctggagtaaccgctgtcgttacaccctgctgcggcagttacgcacgccgggccagcgcgttcgcagcgtggcggcggtggttctggctggggtgatggtgtgggcgccgattcgcctgctcgacgttcagcaaaagagtgttgaacgaacaacgggtatcgatttgccgagctatggcggcgtggtggcgaactcttatttaccgtcgaactggctgtcggctttagggctgtacgcctgggcgcaggtggatgagtcgtcggataataactcgctgatgaacccggcgaagaagtttacctatgttgcgccagaaggcattgatgacacgtatgttgtgtttatcatcggcgaaaccacgcgttgggatcatatgggcatcttcggctacgagcggaacacgacgccgaagctggcgcaggaaaaaaatctcgcggcgttccggggtgagtcgtgtgataccgcgaccaaactttcgctgcgctgtatgtttgtgcgcgagggtggcgcgtcggagaatccgcagcgtacgctgaaagagcaaaacatttttgcggtgctgaagcagttagggtttagcgccgatctgtatgcgatgcagagcgaaatgtggttctacagcaatacgatggcggataacattgcctaccgtgagcaaatcggcgcggagccgcgcaaccggggtaagacggttgatgatatgttgctggtggatgaaatgcagcgttcgttagcgcaaacccctgacgggaaacacctgatcgtgatgcataccaaagggtcgcattataactatacgcagcggtatccccgcagctttgcgcagtggacgccggagtgtgtcggtgttgacgatggttgcacaaaagcggagatgatcaactcttacgataactcggtgagctatgttgatcactttattacccgcgtgttcgatcagctgcgcgataagaaagccattgtgttttacgccgccgatcacggcgagtcgatcaatgagcgcgagcatttgcacggcacgccgcgcaagatggcgccgccagaacagttccgggtgccaatgctggtgtggatgtcggataagtatctggagaacccgcagcatgcgcagatgcttgcgcgcctgcaacaggcggcggcgatgaaaacgccgcgccgtcatgtggagctgtatgacacggtgatgggatgtctcggctacacctcgccagatggcggaattaacgaaaacaacgactggtgccatattccggctgaacagaatgcagcggtgcagtaa

SEQ ID NO: 72887 - DNA, 1203 bp, Citrobacter koseri
atgaaaacttctgattatcagcgtacccgttggctgacgcttatcggcaccatcatcacacaatttgcgttaggttctgtttacacctggagcctgtttaatggcgcgctctctgcgaaactggatgagcccgtcagccaggtggccttttcatttggcttgttgagcctgggactggcgatctcctcttccgtggcgggtaaattacaggaacgtttcggcgtaaaacgcgtcacgatggcatcaggtgttttactgggcatcggcttctttttaacagcgcattccaacaaccttatgatgctgtggctgagcgccggggtgctggttggcctggcggacggggcgggatacctgttaacgctgtctaactgcgtaaaatggttcccggaacgtaaagggctgatttccgccttcgcgattggttcttatggcctcggtagcctcggcttcaaattcatcgacagccagctgctggcgacggtcggtctggaaaagacatttatgatctggggcgcgattgtgctggtgatgattgtctttggttcaacgctgatgaaagacgcgccgaatcaggatgttaaagcggtaaacggggtggtggaaaacgacttcaccctggcgcagtccatgcgtaaaccgcagtactggatgctggcggtgatgttcctgacggcctgcatgagcggtctgtatgtcatcggtgtggcgaaagacattgctcaggggctggcgcatatggatgttgcttcggcggccaacgcggtcacggtgatttccatcgctaacctgtcaggccgcctggtgctgggtattctgtctgacaaaatcgcccgtatccgcgtgattaccctcggtcaggttgtctcgctggtcgggatggcagcgttactgttcgcgccgctgaatgatgtgacgttctttgccgcgattgcctgcgtcgcctttaacttcggcggtacgatcacggtgttcccgtcgctggtgagcgagttcttcggcctgaataacctggcgaaaaactacggcgtgatttacctgggctttgggattggcagtatttgcgggtcgattatcgcctcgctgttcggtgggttctacgtcaccttctgcgttattttcgctctgctgatcctctctctggcgctctcgaccacgattcgccagcctcagcgccgcgtctttaaagaggctcacgcctga

SEQ ID NO: 72888 - DNA, 705 bp, Citrobacter koseri
atgattataaaaaaatgcagtggtcgccaggtgtggtactgcctggcgagcgttatcgtctgtgcaattttcactaacacagcatatgcctggcaacaagaatatatcgctgatgccgtatcgggtcatacgacagaacgctatacatgggacagcgatcaccaaccaagttacaacgatattctggcggagcggattcggtccagccagaatgcgccaggccctgtgctgagtctggccgatcaaacgccactggacgcgaccagcggcatgagcatgggctggaattttccgcttgccgggcgcgtgacgaccgggccggtcgccagcctgcattacgacggctcaaccacctcgatgtttaatgaatttggcgacagcgtgacggcgcaggcgctgaccgaccctctgtggcatgccagcgtcagtacgttgggctggcgggtgaattcgcagtttggcgagatccgtccctgggcgcaaatcagctataaccagcaatacggcgagaacatctggaaagcgcagtcggggctgagtcgaatgacggcggcggatcagaatggcaactggctggatgtgacggtgggggcggatatgctactgaacccgcatatcgcggcgtatgcggcgctctctcaggcagataacagcgcaagcaatagcgactacctgtacaccctgggcgttagcgccagattttaa

SEQ ID NO: 72889 - DNA, 582 bp, Citrobacter koseri
atgcagcgttgcggatgggtcagtcaggacccactatacatcgcctatcacgacaaggagtggggcattcccgaaaccgacggcaaaaagctgtttgagatgatctgccttgaaggccagcaggcggggctttcctggatcaccgtgctgaagaaacgggaaaactatcgcgcaaacttccaccactttgatcccgttcgcgtcgcggcgatgcaggaagacgacgttgagcgtctgttgcaggatgcgggcattattcgccatcggggaaaaattcaggccatcatcggcaatgccagggcgtatctcgcgatggagcaaaatggcgaaccgtttgctgaattcgtctggtcttttgtcgaaaaccagccgcaggtaacgcgcgccgccagcctgagcgagatccccacctcaacccccgcgtcggatgcgctggcaaaagcgctgaaaaaacgcggcttcaagttcgtcggcaccaccatttgctactcctttatgcaggcgtgcgggctggtcaacgaccatatcacgggctgtttctgccatcctggaggtcagcatgattcgcgaatcccggactga

SEQ ID NO: 72890 - DNA, 432 bp, Citrobacter koseri
atgattcgcgaatcccggactgacgatatggcgtcaattttgacgctctggatggaaagcacgatctatgcccacccgtttatcgaagcgcgctactggcgcgaaagcgaagcgatagtgcgtgacgtgtacctgcccgccgcgcagacctgggtgtgggaagaagcaggttcactgaaaggctttgccagcgtgatggaagcgcgctttttgggcgcgctgtttgtcacgccagacgcgatccgcagcgggattggcaaggcgctggtgcagcatgttcagcagcgctttaccgcgctcagcctggaggtttaccagaaaaatcagtcggcggtgaatttctaccatgcgctgggttttcgtatcgaagacagcgcatggcaggaagatacacagcatccgacatggattatgggctggcaggcggattaa

SEQ ID NO: 72891 - DNA, 2334 bp, Citrobacter koseri
ttgatcaacgcaccatcgcactattcggtattaactgccgcccactggggacctgtccgggtcgacactgacggcgagacgattctcgcgtctcgcggggcgctgcccacttcgcatctcaattccctgcaaaccgtcgtgcgcgaccaggttcacagccctacccgggtgcgtttcccgatggtgcgtaaaggatttctcgcctcgccagagaagccacagggcgtgcgcggtcaggatgaatttgtgcgggtgagttgggatgaggcgctggatctgatccatacccagcacaaacgtattcgtgaaacatatggtccgtcctcgatttttgccggttcttatggctggcgttcgaatggcgtgctgcataaagcttccaccctgttgcagcgttatatggcgctggcgggcgggtataccgggcatctgggggattactccacgggggcggcgcaggccatcatgccgtatgtggtgggcggaaacgaagtctaccagcagcagaccagctggccggttgtgctggaacacagtgacgtggtggtgctatggagcgccaacccgttgaatacgctaaaaattgcctggaatgcgtcggatgagcagggcattgcttactttgccgcgctgcgcaacagcgggaaacggctgatctgcatcgatccaatgcgatcggaaagcgcggcgttctttggcgataagatggagtggatcgccccgcatatggggactgacgtggcgctgatgctggggattgcgcatacgctggtgaaaaacggctggcatgatgacgcgtttctggcgcgctgcacgaccggttacgagacattcgccgactatctgctgggcgtgagcgacggcgtggcgaaaacggcggaatgggccgcagatatttgcggcgtatccgctgctaaaattcacgaactggcggaactcttccataaaaacaccactatgttgatgtctggctggggaatgcagcgtcagcagttcggcgagcaaaaacactggatgctggtaacgcttgccgctatgttagggcaaattggcacgcccggcggcggttttggcctctcgtaccatttcgccaacgggggaaacccgacgcgccgcgccgccgtactggcttcaatgcagggcagtctgccaggcggcaccgatgcggtagacaaaattccggtggcgcgcattgtcgaggcgctggagaatcccggcgcgccctatcagcacaacggtatgaaccgccatttcccggatatccgcttcgtctggtgggctggcggcgcgaactttacgcatcatcaggataccaaccgtctgattcgcgcctggcaaaagccggaactggtggtgatctccgaatgtttctggaccgctgcggcgaaacatgccgatatcgtgttacctgccacgacctcttatgaacgtaacgacttaaccatgaccggcgactacagcaaccagcatctggtgccgatgaagcaggttgtgccgccgcgtgatgaggcccgtaatgactttgacgtgtttgccgaactgagcgagcgctgggaaacgggcggtcatgcgcgcttcaccgaagggaaaagcgagcttgagtggctggaaaccttctacaacatcgccgggcaacgcggcgccagccagcaggtgacgctgccgccgtttgcacagttctgggaagccaacgatctgattgaaatgccggagaatgcggccaacgcgcagtttatccgctttgcggatttccgccgcgaccccgacgcgcatccactgaaaacggacagcggcaagatagagatctattcccggcgaattgcggactacggctatgcggactgcccaggacacccaatgtggctggagccagacgaatggcacggcaatgccgaacccggtcagctacaggtgctgtccgcccatccggcgcatcgtctgcacagccagcttaactacagccagcttcgtgaacagtatgcggtggcggggcgcgaaccgattactctgcatccgcaggatgcgcagacgcggggcattgccgacggcgacacggtgcgggtctggaatcaccgaggacaaattctggcgggcgcggtggtgacggagggcattagacccggcgttatctgcattcatgaaggggcatggccggatttagaggtgtcggctggcggcatctgtaaaaatggcgcggtaaacgtgttgaccaaagatctccccagctcgcgactggggaacggctgtgcgggcaacaccgcgctggcgtggattgaaaagtataccggcccttcgctgacgcttacggcgtttaatccgcctgccagcccataa

SEQ ID NO: 72892 - DNA, 663 bp, Citrobacter koseri
atgaaaaaacgtgttttggtcattgctgctatcgtgagcggcgccctggcagtatctggctgcacaacaaacccttacaccggcgagcgcgaagcgggtaaatccggcattggcgcgggcattggttctctggtcggcgcaggcgtcggcgcactctcctcttccaagaaagatcgcggcaaaggcgcgctgattggcgcagcggcaggcgcggcgctgggcggcggcgctggctattacatggacgtacaggaagcgaaactgcgtgacaaaatgcaaggaacgggcgtgagcgtgacgcgaagtggcgataacatcatcctgaatatgccgaataacgtcaccttcgacagcagcagcgcaaccctgaaaccggcaggcgccaacacgctgaccggcgtggcgatggtgctgaaagagtacaacaaaaccgccgttaacgtagtgggctacaccgacagtaccggcgggcaggatctgaacatgcgtctgtcgcagcagcgcgcggactccgtggccagcgcgctgatcacccagggcgttgccgccaaccgcatccgcaccagcggcatgggcccggcgaacccgatcgccagcaacagcaccgccgaaggtaaagcgcaaaaccgccgcgtggaaatcaccttaagtccgttgcagtaa

SEQ ID NO: 72893 - DNA, 1017 bp, Citrobacter koseri
atgagcaaatcaacacgggcaaccatcagcgatgtggcgaaagccgctaaaaccggaaaaaccagcatttcacgctatctcaacggcgagaagcatttgctgtccgatgccctgctggcgcgcattgaaaaagccattgccgaactcgactatcgcccaagcctgatggccagaggcctgaaacgcggccgtacccgcctgattggcctgatcatcgccgatattaccaacccctattccgttaacgtgttgagcggcattgaagccgcctgccgcgagaaagggttcactcccctggtctgtaacaccaacaatgaggtggatcaggaactgcactatctggatctgctgcgtagctaccaggtggaaggcatcgtggtgaacgccgtcgggatgcgcgaggaggggctgaaccgcctgcaacagtcggcgctgccgatggttctgattgaccgtaaaatccctgatttcgcctgcgatgtcgtcggtctggataacacccaggcggcaacaaccgccaccgaacatctcattgagcaagggttcgaggcgatcctgtttctcagcgaaccgctcggtatggtcaatacccgccgcgagcgcctgaacgcatttcgtgcgacgctggcgcgttaccctggcgtggtggcggaaaacgccgaggtgccgctggcggaaaatacgcaactggataacaccctgcgccagtttcaccagcagcaccgggggatgcgcaaagccgtgatctccgctaacggcgcgctcacattgcaggtcgcccgttcgctcaaacgcattggtcttaactggggcagcgacatcggcctgctcggttttgacgaactggaatgggcagagctggcaggcgtcggcatcaccacgctgaaacagccgacctggcaaattggttttgccgctgttgagcaggttgtacgccgcattgaagggggcagcgacgcgattcacgagcaggttttctccggcgagctgatcgttcgcggctccaccgcccgctaa

SEQ ID NO: 72894 - DNA, 750 bp, Citrobacter koseri
atgcaaagaaaaattatggtggtcaccgccgcctatggctacgaccaggtgcgtgccgcaggcgggcaaaccgcgatgctgcccatcattgccggagcgggggcggatggcgtcgagattcgccgtgaaatgttcactgacgccgagcttaacgcgctcccgctgctggcggccgccattgacattttcggcctgctggcctgctattccgcgccggaaccgctgttcctggaggatggcagcctcaacccccaccttcccgacctgttacaggaagcccgcacgctgcaagcgcggtggctgaaagtgtcgctgggtcattttgaacgccaggatcagctcgacactctgcgtgactggctggagagcagcggcatggcgctggtggtggaaaatgatcaaaccgcctgcgggaaattgcgcccgatgcaacgcttcaatgccgcctgtcaggtacagaacctgcccatcagactgacgtttgatatggggaactggctgtgggtaggtgactcgccggaagaggccgcacgctacctggcgcccgccgtcggctatatccacgttaaagccgccacgccccatcacgacagtttccgcgccgttgcgccggatgacgccgacccccgctggctggcgctgctgaacgcgctgcctgttgatgtaccgcgcggtattgagttcccactggaagggcaagatttgacggcggtgactcgtcgctacgtcgatttgttacgtgaggagtaa

SEQ ID NO: 72895 - DNA, 939 bp, Citrobacter koseri
atgaaaaattctctggatgtcatcacgattggtgaagcaatggcgatgttcgtcgccacgcaaacgggcgatctcgcagacgtagacgcgtttattaaacgcgtcgccggggccgaacttaacgtagcgaccggcctggcgcgcctggggttaaacgtcggctgggtaagccgcgtcggtgatgacagctttggccgttttgtccttaagtcgcttgaaaaagaagggattgatgcgcagggcgtcacgctggacggacgttacgccaccggctttcagcttaaatctaaagtcgaaaatggaaccgatcccattgtggaatatttccgtaaaggttccgctgcaagccacctttccgtggacgattaccacgatgcgtacttctccagcgcgcgtcatctgcacttaagcggcgttgcggcggcgctttccgccagctcttatgaactgctggcgcataccgcccgcaccatgaaagcgcagggcaaaacgatttcattcgatccgaatctgcgcccggtgctgtggaaaagcgaagccgaaatggtggaaaaacttaaccgcctcgccttccaggctgactgggtgctgcccggtctgaaagagggaatgatattaaccggacagcaaacgcctgggggcattgccgatttttatctgcgccacggcgtgaaagcggtggtgctgaaaaccggcgcggatggcgcctggtacaaaaccgctgagggcgagcaaggctgcgtcgcaccggtgaaagtggacaacgtggtcgatacggttggtgcgggcgatggctttgccgtgggtgtgatcagcgccctgctggaaggccgcacgctgcatcaggcagtgacgcgaggcaataaaattggcgcgctggcgattcaggttcagggcgacagcgaaggattacccactcgtgaagcgttaggcgaataa

SEQ ID NO: 72896 - DNA, 1281 bp, Citrobacter koseri
atgacaagctcaacaaatgcagcaaaacgctggtggtacatcatgcctatcgtgttcatcacgtacagcctggcgtacctggatcgcgcaaacttcagcttcgcttccgcagcgggaattaacgaagacctcggcatcacgaaagggatctcctccctgctgggcgccctgttcttcctcggctatttcttcttccagatcccaggcgcggtgtacgccgagcgtcgcagcgtacgtaagctgatcttcatctgcctgattttatggggagcatgcgcatcgctgaccgggatggtgagtaatatcccaatgcttgccgccatccgctttattctcggcgtcgtggaagcggccgttatgcccgccatgctgatttacatcagcaactggttcacgaagtcagagcgttcgcgcgccaatacgttcctgattctcggcaacccggtgacggtgctgtggatgtccgtagtttcaggctacctgattcaggcgctcggctggcgtgaaatgttcattattgaaggcttccccgccatcatctgggcgttcttctggtgggtgctggtgaaagacaaaccgtcacaggccggttggctgacggagtcagaaaaagccgcgcttcaggcgcaactggaaaaagagcagcagggcatcaaagcggtacgcaattacagcgaggcattccgctcacgcaacgtcatcctgctgtgcatgcagtatttcacctggagtatcggggtgtacgggtttgttctgtggctgccgtccatcatccgtagcggcagcgcgaatatgggcatggtggaagtcggctggctctcttcagtgccgtacctggcggcgacaatcgcgatgatcgttgtctcctgggcatccgataaactgcaaaaccgtaaactgttcgtctggccgctgctgttgattgccgcctttgcctttatcggctcatgggccgttggcgcgaacaacttctggctctcttataccctgctggttatcgccggtgcggcgatgtatgccccttatggcccgttcttcgccattattcctgaaatgctgccgcgtaacgtcgcgggcggcgcaatggcgctgatcaacagtatgggcgcgctgggctcattctttggttcatggttcgtcggctatctcaacggcgcaaccggcagcccggccgcctcgtacatttttatgggggtggcgcttttcgcctcagtatggctaactttaattgttaagcctgctaacaatcagcaattaccgattggcgcacgccacgcttaa

SEQ ID NO: 72897 - DNA, 975 bp, Citrobacter koseri
atgaagccgtccattattctctacaaagcgttacctgacgatttactgcatcgcctggaagagcatttcaccgtcacgcaggtaccaaatcttcgcccggaaacggtagaacaacacgcccaggctttcgccagcgcggaaggtttgttgggctccagcgaaaccgtcaatagcgcactgctggagaagatgccgaaactacgcgcggcatcgaccgtctccgtgggttatgacaattttgatgtggctgccctcaacgcgcgcagcgtattgctgatgcacacgccgaccgtactgacggaaaccgtcgcggatacggtaatggcgctggtgctgagcaccgcccgccgcgtggtggaagtggccgaacgcgtcaaagtgggggaatggacaaaaagcatcgggccagactggtttggcactgatgtacaccacaaaacgctggggattgtcgggatggggcgcattggtcttgcgctggcgcaacgcgctcacttcggctttaacatgccgattctctacaacgcccgccgccatcatcctgaggcggaagaacgcttcaacgcccggtactgcgatctggacaccctgttgcagacggcggattttgtctgcctgatcctgccgctgacggaagagacgcatcacctgtttggcgcggcgcagtttgccaaaatgaagtcctccgccattttcattaacgcagggcgcggcccggtcgtggatgaaaacgcgctgattgccgccctgcaaagcggtgaaattcatgcggcgggtctggatgtgtttgaacaagaaccgctgccagtcgattcgccgctgctgtcgctgccaaacgttgtggcgctgccgcacatcggctccgccacccatgagacgcgctacaacatggccgcctgcgcggtggataacttaattgatgcgttacaaggcaaggtggagaagaactgcgtgaacccgcaggttgcaggataa

SEQ ID NO: 72898 - DNA, 711 bp, Citrobacter koseri
atggcgacaggtaagtcctgctctcgctggtttgcgcctgttatggcgttattaatggtagttagcctgagcgggtgttttgataaagaaggtgatcagcgtaaagcgtttattgatttcctgcagaatactgcgatgcgtagcggggagcgtctgccgacgttgaccgccgatcagaaaaaacaatttggtccgttcgtgtctgattatgcgattctgtatggctattcgcagcaggtgaatcaggcgatggattccggtctgcgtccggttgtggatagcgtcaatgcgatccgcgttcctcaggactatgtcactcagcgcgagccgctgcgtcaggcaaatggttctctgggcgtgctgggccagcagttgcagaatgcgaaattgcaggcagatgccgcgcacagcgcgctgaaacagtccgacgacctgaaaccggtctttgatcaggtttacagtaaagtggtgacggcgccttcggaggcgttacagccgctgattccggctgcgcaaattttcacgcagcaattggtgcaggttggcgactttgtggcgcagcaggatacgcaggtgagctttgtcgcgaacggcattcagttcccgacgtcacagcaggccagccagtacaacacgctgattgggccgctggcgtctcagcaccaggcatttaatcaggcctggaccactgcggtaaacgcgatccagtaa

SEQ ID NO: 72899 - DNA, 291 bp, Citrobacter koseri
atggaatacaaagatcctatgtttgaactgctgagcagtctggaacaaattgtttttaaagatgtatcgcagacgattatcctgacaaacaagcccaacccttttacagagtttgaacagttacgaagaggaaccgggctaaaaacagatgattttgcccgggcgatgggcgtaaccgttgccatggtacaggaatgggaatccagacgggtaaaaccgtcgagtaccgagttaaatctgatgcgcctgatccaggccaacccaggtttaagtaagcagttgatgaaatag

SEQ ID NO: 72900 - DNA, 213 bp, Citrobacter koseri
atgtccggtaaaatgactggtatcgtaaaatggttcaacgctgataaaggcttcggcttcatcactcctgacgatggctccaaagacgtgttcgtacacttctctgctatccagaacgacggttacaaatccctggatgaaggtcagaaagtttccttcaccatcgaaagcggcgctaaaggcccggcagctggtaacgtaaccagcctgtaa

SEQ ID NO: 72901 - DNA, 2070 bp, Citrobacter koseri
atgtctgagaaaacttttctggtggaaatcggcactgaagagctgccaccaaaagccctgcgcagcctggcagagtcctttgctgcgaacgttactgcggagctggataacgctggcctcgcacacggcaacgtagagtggttcgccgcgccgcgccgtctggcgctgaaagtggcgaatcttgctgcttctcaacccgatcgcgaagttgaaaaacgcggcccggcgattgcccaggcgtttgacgcggaaggcaaaccgagcaaagcggctgaaggctgggcgcgtggttgcggcatcaccgtggaccaggctgaacgtctgaccactgacaaaggcgaatggctgctgtatcgcgcgcatgtgaaaggcgaaagcgcagaagcgctgctgccgaacatgattgccacctctctggcgaaactgccgattccgaaactgatgcgctggggcgcgtctgacgttcacttcgtgcgtccggtacacaccgtaacgctgctgctgggcgacaagctcattccggcaacgattctgggtatccagtccgatcgcgtcattcgcggccatcgttttatgggcgagccggaaatcaccatcgacactgctgaccagtatccgcaaatcctgctggagcgcggtaaagttgttgctgattacgaagcgcgtaaagcgaaaattaaagccgatgcagaagaagcggcgcgtcagattggcggtaacgctgacctgagcgagagcctgctggaagaggtcacttcgctggtggaatggccggtggtgctgacggcgaaattcgaagagaaattcctcgcggtgccgtctgaagcgctggtttacaccatgaagggcgaccagaaatacttcccggtttacgccgcagacggcaaactgctgccgaactttatcttcgtggcgaacatcgaatctaaagatccgcagcaaattatctccggtaacgagaaggtggtgcgtccgcgtctggcagatgccgagttcttcttcaataccgaccgtaaaaaacgtctggaagataacctgccgcgtctgcaaaccgtgctgttccagcaacagctgggtacgctgcgcgacaagaccgaccgtattcaggcgctggcgggctggattgctgaacaaattggcgcggatgttaaccacgccacccgtgcgggcctgctgtcgaaatgtgacctgatgaccaacatggtctttgagttcaccgacacgcagggcgtcatggggatgcactacgcgcgccatgacggcgaagcggaagatgtggctgtcgcgctgaacgagcagtatcagccgcgctttgccggtgacgacctgccgtctaacccggttgcctgcgcgctggcgattgccgacaagatggacacgctggcgggtatcttcggtatcggtcagcatccgaaaggcgataaagacccgttcgcgctgcgtcgtgccgcgctgggcgtgctgcgtatcatcgttgagaagaacctgaatctggatctgcaaacgctgaccgaagaagcggcgcgtctgtacggcgacaagctgaccaacgcgaatgtggttgatgacgttatcgactttatgctcgggcgtttccgcgcctggtatcaggacgaaggttacaccgtggacaccattcaggcggttctggcgcgtcgtccgacccgtccggcggatttcgatgcccgtatgaaggccgtgtcgcacttccgcacgctggaagaagcctccgcgctggcggcggcgaacaaacgtgtgtccaacattctggcgaagtccgacgaagtgctgaacgatcgtgtcaatgcggcaacgttgaaggaaccagaggaaattgctttggctctgcaagttgtggttctgcgtgacaaacttgaacccgtgtttgctgaaggtcgttaccaggaagcgctagtcgaactggctgagctgcgtgaaccggtcgatacgttctttgaaaaagtgatggtgatggttgatgacaaagatctgcgcatcaaccgcctctctatgctggcgaaactgcgcgagctgttcctgcaagtagcggatatttccctgttgcagtaa

SEQ ID NO: 72902 - DNA, 912 bp, Citrobacter koseri
atgcaaaagtttgataccaggaccttccagggcttgatcctgaccttacaggattactgggctcgccagggctgcaccattgttcaaccattggacatggaagtcggcgcggggacttctcacccaatgacctgtctgcgcgcgctggggccagagccgatggcggctgcctatgtgcagccttctcgtcgtccgaccgatggtcgctatggcgaaaacccgaaccgtttacagcactactatcagttccaggtggtgattaagccatcgccggataacatccaggagctgtatctcggttctctgaaagagctggggatggacccgactatccacgatatccgtttcgtggaagataactgggaaaacccgacgctgggcgcctggggtctgggttgggaagtgtggctgaacggcatggaagtgactcagttcacctacttccagcaggttggcggtctggagtgtaagccggttaccggtgagattacctatggcctggaacgtctggctatgtacattcagggcgtagacagcgtttacgacctggtctggagcgacggcccgctgggtaaaaccacctatggcgacgtgttccatcagaacgaagtggagcaatccacctacaacttcgaatacgccgatgtggatttcctgttcacctgtttcgaacagtatgagaaagaagcacagcaactgctggcgctggaaaacccgctgccgctgcctgcttacgagcgtattctgaaagccgcccatagctttaacctgctggatgcgcgtaaagccatctccgttaccgagcgtcagcgctacatcctgcgcattcgcaccctgaccaaagcagtggcagaagcttactacgcttcccgtgaagcccttggcttcccgatgtgcaacaaagacaaataa

SEQ ID NO: 72903 - DNA, 303 bp, Citrobacter koseri
atgatgatgaagtctgtttttccggcgctgttaaccctcctgctggtgggatgcgcgacgacggcgcagccggttcagaaggcgcagaaggtcaacgtgaacccggaacgctcactggatatggaagcattgtgcaaagcgcaggcggcgcggcgttataataccggcacgcagaaaattgatgtgaccggttttgagcaataccagggtagctatgagatgcgcggcaatactttccgcaaagagagttttgtttgctcttttgacgcagaagggcagtttttacatctttccatgcgctaa

SEQ ID NO: 72904 - DNA, 996 bp, Citrobacter koseri
atgcaacccaaaatatactggattgataatttgcgagggatcgcctgtttaatggtcgtgatgatccacgccaccacctggtacgtcaccaatgcgcaaagcatcaatccgtttagctgggattttgccaatgtcctgaactccgcctcacgcgtcagcgtaccgctgttttttatgatctcgggctatctcttttttggcgaacgtagcgcccagccgcgacatttcctgcgcattgcgctctgcctgctgttctatagcgccgtcgcgttggtatatatcaccctttttacgtcgattaacgcagagctatcgctgaaaaacctgctgcaaaaaccggtgttctaccacctgtggtttttcttcgcgatcgcggtgatctacctggtatcgccgttaatacaggttaaaaacgtcagcggcaaaatgctgctggtgctgatgatcatcattggcgttgtcgccaaccccaataccgtgtcgcaaaaaatcggcggatttgagtggctccccgttaacctgtatatcaccggcgacacgttttactacatcctctatggcatgctgggccgggcgattggcatgatggagacacaaaaacgttcgctgacctggataagcgccgcgcttttcattacggcggtattgattatttcgcgcggaacgttacatgaactcaactggcgcggaaattttgccgatacctggtacgtctattgcggcccaatggtgtttatttgcgccgcgtcgctgctcacgctggtcaaaaataccctgaatacgcgcacggttcccgggctggcgctgatttcccgccactcactcggtatttacgggtttcacgcgctgataatccatgcgctacggacgaatggcgtggagtttaaacgctggccgccgctggatatcgtatggatttttaccctcaccctggccggaagtttgctgctgtcgatattgctacagaagattgatacgcgcaggctggtcagttga

SEQ ID NO: 72905 - DNA, 354 bp, Citrobacter koseri
atggacgataaggttgcgcgcaggaagcgtctggccggtttaatcatgctggcgggcggtgcgctggtctatctgacaggactgtggcctgcttgccactcgttgagcgacaagggctatttttttgcgataatggtgatgagtggctttcccctgttaatacgccaggagccgacgggaaatgagcgtctgctcacccggtgcaaatatctgttatttctcgccgcaggtatgctttttgtcggtctatggaatattgatttaccggccgccgtcaaagtgatgtgccttctggggctgggcgtgagtctgttgggtacggatatgtacgccacgtattctgatgatgaataa

SEQ ID NO: 72906 - DNA, 1455 bp, Citrobacter koseri
atgtatatcgggatagatctgggcacgtccggtgtgaaagccatcctgctgaatgagcagggagacgtgctggcctcgcagacggagaaactgtccgtctctcgcccgcatccattatggtcggagcaggatcccgaacagtggtggctggcgacggatcgcgccgtaaaagcgctggggcgagagcattcattgcgtgatgtaaaggcgctggggattgccgggcagatgcacggcgccacgttgcttgataaacaccagaaggtgctacgcccggcgattttatggaatgacggacgctgtggtgaagagtgcgcgctgcttgagcagcaggttccgcagtctcgcgccattaccggcaatctgatgatgcccggctttaccgcgccaaaactgctgtgggttcagcgccatgagccggatatcttccgccaggttgcaaaggtgctgctacctaaagattacctgcgtctgcgtatgacgggggattttgccagcgatatgtcggacgcggcgggaacgatgtggctggatgtcgcagcgcgcgactggagcgacatcatgctcaacgcttgtcagctaacccgtgagcacatgtccgctctgtacgaaggcagcgacatcaccggtacggtgttgcctgaggtggcgcactcctgggggatgcctgcggtgcctgttgttgcagggggcggagataacgcggcgggcgcggtgggcgtgggaatgatcaatgcgggtcaggccatgctgtcgctgggaacatcaggcgtctattttgcggtgagcgacggttttctcagtaaaccagaaagtgcggtacacagtttttgccacgcgctgcccgaacgctggcatttgatgtccgtcatgctgagcgcggcatcctgcctggactgggcggcaaaattgaccggtcaggcgtctgttcccgcgctgattgacgcggcacgccaggcggatgataacgcggatgccgtctggttcctgccttatctttccggcgaacgcacgccgcataataatccgcaggcgaagggcgtattctttggccttacgcatcagcatggccccgcagagctggcgcgggcggtgctggaaggcgtcggttatgcgctggcggatggcatggatgttgtgcatgcctgtggcgtgaaacccggcagcgtgacgctgatcggcggcggggcgcgaagtgaatactggcgacaaatgctggcggatatcagcgggctacagcttgattaccgtaccggcggcgatgtaggcccggcattgggcgccgcgcgtctggcgcaaattgcgatgaataaagagcaaccattatctgatttattaccgcagcttccgctggagcaggcgcatttccctgatgctgaacgccatgcgcgttaccttgaacgtcgcgaaacgttccgccgcatttaccagcagttattaccgctcatgtcttaa

SEQ ID NO: 72907 - DNA, 1323 bp, Citrobacter koseri
atgcaggcttattttgaccaactcgatcgtgttcgttatgaaggccctaaaagcactaatccgttagctttccgccattataatccagatgaaatcgtactgggtaaacgcatggaagatcatctgcgttttgcggcctgctactggcataccttctgctggaacggcgcggatatgtttggcgtaggcgcgttcaaccgtccgtggcaacagcccggcgatgcgctggagctggcgaagcgcaaggcggatgtggcgtttgaatttttccataagctgaacgtgccttactactgctttcacgatgtggatgtttcgccggaaggcgcctcgctgaaagagtataaaaacaactttgcgcagatggtcgatgtgctggagtcgaagcaagaacagagcggcgtgaagctgttatggggcaccgcgaactgctttaccaacccgcgttacggcgccggggcggcgacgaacccggacccggaagtcttcagttgggcggcgacgcaggtggtgaacgcgatgaacgccacgcacaaactgggtggcgaaaactacgttctgtgggggggccgtgaagggtatgaaaccctgctgaataccgatctgcgccaggaacgcgagcagattggccgctttatgcagatggtggtggagcataaacataaaacaggtttccagggcacgctgctgatcgagccaaaaccgcaggagccgacaaaacaccagtatgactacgatgtggcaacggtttacggctttctcaagcagttcggcctggaaaaagagatcaaggtgaacattgaagccaaccacgccacgctggcgggccactctttccatcatgagattgcgtccgccattgcgctgggcatttttggttctgtggatgccaaccgtggcgatgcgcagctgggctgggataccgaccagttcccggtaagcgtcgaagagaacgcgctggtgatgtatgaaatcctgaaagcgggcggtttcacgaccggcgggctgaactttgacgcgaaggttcgtcgccagagtaccgacaaatacgatctgttctatggtcatattggcgcgatggacacgatggcgctgtcattaaaagtggcagcgcgcatgattgaagatggcgaactggataaacgcgtggcgaaacgttattccggctggaatagcgaactgggccagcaaattttgaaaggccagttatccctgagcgacgtcgcgcactatgctgaacagcgtaatctggcgccggtgcatcaaagcggccatcaggaactgctggaaaatctggtgaatcattatctgttcgacaagtaa

SEQ ID NO: 72908 - DNA, 993 bp, Citrobacter koseri
atgaagataaaaaacatcttactcaccgtctgcacttcactcctgctcgccagcataacgggacatgccaaagaagttaaaattggtatggctatcgatgacttacgtctggaacgctggcaaaaagatcgcgatattttcgtgagcaaggccgagtccctcggcgcaaaagtatttgtacaatctgccaatggtaatgaagaaacccaaatgtcgcagattgaaaacatgatcaaccgtggcgttgatgttctggtcattattccttataacgggcaagtattaagcaatgtcgtaaaagaagcgaaacaagaaggaataaaagtattagcgtacgaccgcatgataaatgatgccgacatcgatttttatatttcttttgataacgaaaaagtcggcgaattacaggctcaggcgttggtcgataaagtgcctgaagggaattatttcctgatgggcggctcgccggtagataataatgcaaaattgttccgcgccgggcaaatgaaagtattaaaaccttatatcgactcaggaaaaattaacgtcgtcggcgatcaatgggtggacggatggttgcctgaaaatgcgctgaaaattatggaaaatgcgctgaccgcaaacaataacaaaattgatgcggttgtcgcttccaatgacgcaaccgcaggcggtgcgattcaggcgctcagcgctcagggattatcgggaaaagtcgctatttccggtcaggatgccgaccttgcgggcattaaacgtattgtcgcaggcacgcagaccatgacggtttataaacccatcacgctactggcgaataccgccgccgagatcgccgtcgagctgggtaacgggcaacaacctaaggccgacgccacgctgaataacggtctgaaagatgtcccttcccgtctgcttactccaattgatgttaataaaaccaatattgacgaaaccgtgattaaagacgggttccacaaaaagagtgatctgtaa

SEQ ID NO: 72909 - DNA, 1542 bp, Citrobacter koseri
atgccctatctacttgaaatgaaaaacattaccaagaccttcggcgcagtgaaggcagttgataacgtcagcctcaggcttaatgccggggaaatcgtttcattgtgcggtgaaaatggttcgggtaaatcaacgttaatgaaagtgctgtgcggtatttaccctcatggctcttatgaaggtgaaattctgtttgcgggagaaacactgcaagccagccatattcgtgataccgaacgtaagggcattgctattattcaccaggagttagcgctggttaaacacttaaccgtgctggaaaatatcttcctgggcagcgaaatcacccgtaacggcattcttgattacgacatgatgacgctacgctgccagaagctgttagatcaggtcagcttgtctatctcaccggatacccgcgtgggcgacctgggcctggggcaacaacagctggtagaaattgccaaagcgcttaataaacaagttcggctgctgattcttgatgagccgacggcctccctcacggaacaagaaaccaccgtgctgctggaaattattcgcgatctgcaacagcatgatattgcgtgtatttatatctcacacaagctcaatgaagttaaagctatctcggacacaatctgcgtgatccgcgacggccaacatattggcacccgcgcagccgccggaatggaagaagacgatatcatcaccatgatggtcggtcgcgagctgacggcgctctatcctaatgaaccgcatgctaccggggaggagattttgcgcgttgagcgccttaccgcctggcatcccgtcaaccgtcacatcaaacgcgtcaatgatgtctccttttcgctgaaacggggcgagattctcggcattgcagggctggtcggcgcgggccgcacggagttagtgcaatgcctgttcggcgtctggcccgggcgctgggaaggaaaggttatgatcgataatcaggccgtggatattcgtcattgccagcaagcgatcgctcatggcattgcaatggtgcctgaagacaggaaacgcgacggcattgtgccggttatggccgtcgggaaaaatatcacgctggcggcgctcgatcggttcaccgggaagataagccatcttgatgatgccgcagagcaaaaatgcattctggaatcgctgcaacgcctgaaagtgaaaacatcctcgcctgatttagcgattgggcgccttagcggcgggaaccaacaaaaggccatactggcgcgctgtctcctgctgaacccgcgcattctcatcctcgatgaacccacccgaggaatcgatatcggcgcgaaatatgaaatctacaaactcattaaccagcttgttcagcaaggtattgctgtcatcgtcatctcgtcggaactccccgaggttcttggattaagcgatcgcatcctggtgatgcacgaaggaaaactgaaagccaacctggtgaatcataacctgactcaagaacaggtgatggaagccgcattgaggagcgaatatcatgtcgaaaaacaatccgtctga

SEQ ID NO: 72910 - DNA, 1182 bp, Citrobacter koseri
atgtcgaaaaacaatccgtctgaagtgaaactctcagcccctctgacgggcggttttcctgggttaaaatcactgaacctacaggtgttcgtcatgatcgcggcgattattgtgatcatgctgttctttacctggaccacggaaggcgcatacctgagcgcgcgcaacgtctccaacctgcttcgtcagacggcgatcaccggtattctggccgtggggatggttttcgtgattatctctgcggaaatcgacctctccgttggctcaatgatggggctattaggcggcgtcgcggcaatctgcgacgtctggctgggctggccattgccgcttacgattgttgtcacgctggcgctgggtttactgctcggcgcctggaacgggtggtgggtcgcctaccggaaagtcccttcgtttatcgtcaccctggccgggatgctggctttccgtggcattctcattggcatcacgaatggtacgaccgtctcgcccaccagctcggcgatgtcgcagattggtcagagctacttatccaacggtctgggcttcacaataggcgccatcagcttaatggcgtttatcggctggcaatggcgcgggcgtatgcgtcggcaggctctggcgcttagcaccccggcttctactgcggtagtcggtcgccaggcgctgaccgccgtcattgtcctgggcgcaatctggctgctgaacgattatcgcggcgttccaacgcccgtactgctgctggtattcctgctgcttggcggtatgtttatggcgacgcgaacggcgtttggccggagaatttatgcgattggcggcaatctggaagccgctcgcctctccggcattaacgttgagcgaaccaaactggcggttttcgccatcaacggcctgatggtggcgattgcagggctgatactcagttcgcgcctcggcgccggatcgccttccgccgggaacattgccgaactggacgcgattgccgcctgcgtgatcggcggaaccagcctggcgggtggcgtgggtagcgtcgcgggcgccgtcatgggggcgtttattatggcctctcttgataacggaatgagtatgatggacgtgcccacattctggcagtacatcgtgaaaggtgcgatcttgttactggcagtatggatggactcagcaactaaacgtcgttcctga

SEQ ID NO: 72911 - DNA, 1179 bp, Citrobacter koseri
atgtttgagaaacgccaccgtatcacactgttatttaatgcaaataaagcctacgaccgtcaggtagtggaaggcgtgggtgaatatttacaggcatcgcaatcggaatgggatatcttcattgaagaagacttccgcgcgcgaattgataacatcaaagagtggttgggcgatggcgtcattgccgactacgatgacgatgacattgctcaggcgcttgccgatgtggatgtgcccattatcggcgtcggcggttcttaccaccttgctgcacactatccatccgtccattatatcgccaccgataactacgctctggtggaaagcgcctttctgcacctgaaagaaaaagggatcaatcgcttcgccttttatggcctgcccgcctccagcggcaagcgctgggcggccgagcgtgaatacgcattctgccaactggttgcacaagaaaaataccgtggcgtggtctatcaggggctggaaaccgcaccggaaaactggcagcacgcgcaaaaccggctggcggactggctgcaaaccctgccgccgcaaaccgggattatcgccgttaccgacgcccgggcaagacatgtgctgcaagtttgcgagcatctgcatatcccggttcccgaaaagctgtgcgtcatcggtattgataacgaagaactgacccgttatctgtcgcgggtcgcgctgtcatcggtcgctcagggagccaggcagatgggctatcaggcggcaaaactgctacaccgcctgctggataaggaagtgctgccgctgcaacgtattctggttccgcctgtgcgcgtcgttgagcgtcgctcgacggactaccgctcattgaccgacccggccgtcatacaggcgatgcatttcatccgtaaccatgcctgcaaaggtattaaagtcgatcaggtgctggacgcagtcggtatctcccgctcgaacctggagaaacggtttaaagaagacgtcggggagaccattcacgccgttattcatgctgaaaaactggaaaaagcgcgcagcctgttaatttcaaccacgctgccgattaacgaaatatcacagatgtgcggctacccatccctgcaatatttctattctgttttcaaaaaggagtatgacacgacgccaaaagagtaccgcgatcggtacagtgaagtgttgttgtag

SEQ ID NO: 72912 - DNA, 825 bp, Citrobacter koseri
atgatattgacgcccatacgacgatatggggcaatgattcttatgttactcaccgtagtattttcgggtgaggtgctggcgaaggcgcacacgacaacaacgagtcaaaagtcccacgtaaccaagacaggtcataaacaggtaagcagtaaacaagagtattctcgcaatagtgcaaagagtagttcacttcctgatttgcgaaaatacccttccggaacaccaaggaaaaaagcgtttctccggacggttatgccttttatcaccagtcaaaatgctgcgattactgcggatcgtaactggctgatttcaaaacagtatcagaaccgctggtcgccttctgagcgtacgcgtatgaaagatatcgcggcgcgctacaaggtaaagtggtctggcaacacgcgtaacattccgtggaataccttgctggaacgcgtagacatcatcccgaccagtatggtggcgacgatggcggcggcggaaagcggctggggaacctctaaactggcgcgcaacaacaataacctgttcggcatgaaatgcggaaaagggcgttgtaccaatgcgccgggtaaagtgaaaggttactcgcagttcggctcggttaaagagtcggttaacgcgtacgtgattaatctgaacacgcatcctgcttactcgtctttccgtaagtctcgcgcccagttgcgtaaggcggatcaggaagttaccgcaagcgcgatgattcataagctgaagggttattcgacgaaagggcagagctacaacaactatctgttcgcgatgtatcaggataaccagcgtttaatcgccgcgcatatgtaa

SEQ ID NO: 72913 - DNA, 2031 bp, Citrobacter koseri
atgaaacttaccgcttttgcgctggcgctcatgcccggcatcgtattcgcctcatcatggacatctcagggattcccgccctttacgacggaagggacgggtaagtttgtcagccatgccgcgttgacgaaaggtacgcgccctttgacgctgcatattgaccaacagtgctggcaacctgctgatgccataaaactcaatcagatgctgtcgctcaaaccgtgtgaaggcacgccgccacagtggcgactgtttaaagacggcgactactcgctggagattgatacccgctccggtacgccaacgctaacgctgtcgataaaaagcaccgccgatcccgtcgccagcacggtgcgccagtgcccaacgtggaacggctcgccgctgaccctggaggtgagtcacaccttcccggaaggcgcggtcgtgcgcgattactacagccagaaaaccgctaccgttaaaaacggtcagattacgctgcaacccggcgcgaccagcaacgggcttttgttgcttgaacgcgcggaaaccaacgcgcccgccgcattcaactggcataacgcgacggtctactttgtgctgacagaccgtttccagaacggcgatccgacgaatgaccaaagctatggccgccacaaagacggcatggaggagattggcacctttcatggaggcgatttacgcgggctggcagacaagctggactatctgcaacacctgggggtgaatgccctgtggatcagcgcgccgttcgagcaaatccacggctgggtcggcggcggtacgaaaggggatttcccgcattatgcctaccacggctattacacccaggactggaccacgctggacgccaatatgggcagcgaggacgaccttcgcgcgttagtcgatggcgcacaccagcgcggcatccgtattctgtttgatgtggtgatgaaccacacgggctacgccacgctggcggacatgcagacattccggtttggcgcgctgtatctgcaaggcgatgagctgaaaaagacgctgggcgaacgctggaccgactggaagcccgccgccgggcaaagctggcacagctttaatgactacatcaacttcagcgacaaagcggcatgggaagcatggtgggggaaagaatggattcgcacggatattggcgattatgacaatccaggctttgacgatttgaccatgtcgctggctttcctgcccgatattaaaacggaatccacaaccccttccggcctgccagtgttctataaaaacaaaccggatacccgtgcaaaagccattgagggctacacgccacgggattatctgacccactggctcagtcagtgggtacgtgattacggcatcgacgggttccgcgtagataccgccaaacacgtcgaacttcctgcctggcaacagttgaaaacccaggccagcgtggcgttgaccgagtggaaacaggccaacccggaaaagacgctggacgacacgcctttctggatgaccggtgaagcctggggccacggcgtcatgcagagcgattattaccgccacggctttgatgcgatgatcaactttgattaccaggagcaggcggcaaaagcggtcgattgtctggcggatatggacgccacctggcagcaaatggcagagaaattacagggtttcaacgtgctgagttatctctcctcgcacgacacgcgcctctttcgggaaggcggcgataaggccgcagagcttctgctgctggcgcccggcgccgtacagatcttttatggcgacgaatccgcacgtccctttggcccgacgggttccgatccgctgcaaggcacccgttctgacatgaactggcaggatatcaacggtaaatccgccgccaccgtcgcccactggcagcgaatcagccagttccgcgccagacaccccgccatcggcgccggtaagcaaaccacgctctcgctgaagcagggatacggttttgtgcgcgagcacgacgacgataaggtcatggtcatctgggcgggtcgcccttaa

SEQ ID NO: 72914 - DNA, 1293 bp, Citrobacter koseri
atggttagccactttgataatgagttcgacagaccacctgctatgacattctcactttttggcgacaaatttacccgccattcaggcattacccgcctgatggaagacctcaatgacggcttacgcacgcccggcgcaatcatgctcggcgggggtaatccagcgcaaatcccggaaatgcagaattacttccattcgctactgggcgaaatgctggaaaacggcaaagccactgatgcgctttgtaattatgacggtccgcagggaaaaacggagctactgacagcactcgcgtcgctgctgcgtgagaatctgggttgggatatcgaaccacagaatattgcactaacaaacggcagtcagagcgcgtttttctacttgtttaatctcttcgccggacgccgcgccgacgggacgactaaaaaagtgctgttcccgctggcgccggaatacattggttatgccgattccgggctggaagaggatcttttcgtttctgctcgcccgaatatcgagctattgccggaaggtcagttcaaataccacgttgattttgaacatctgcgcatcggggaagagactggcatgatctgcgtgtcgcgcccgactaacccaacaggcaatgtgatcaccgacgaagagctgatgaagctggatacccttgccaatcagcacggcatcccgctggtgatcgataacgcctacggcgttcccttcccaggcattattttcagcgaagcacgcccgctgtggaatccgaatatcatcctgtgcatgagcctctccaaactggggctgcccggcagccgctgcggcatcattatcgccaatgaaaaaatcatcaccgccatcaccaatatgaacggcattatcagcctgtcacctggcggtattggcccggcaatgatgtgcgaaatgattaagcgtaacgacctgctgcgcctgtcggaaacggtaataaaaccgttctactaccagcgcgtactggagacaatcgcgaccattcgccggtatttaccggaaaatcgctgcctgatccataagccggaaggcgctattttcctctggctgtggttcaaagatttgccgatttcaactgaattgctgtaccagcgtctgaaagcgcgcggcgtattgatggttcccggcgactacttcttcccggggctggacaaaccctggccgcatacgcaccagtgcatgcggatgaactacgttcccgatccgcaaaaaattgaggcaggggtgaaaattcttgctgaagaggttgagcgcgcctggcgcgaaggctaa

SEQ ID NO: 72915 - DNA, 474 bp, Citrobacter koseri
atgaaccgatttatcatggcggatgcggcgaaatgtatcggctgtcgtacctgtgaggttgcctgcgtagtggcgcaccaggagaaccaggactgtgcggcggtgtcgtccggggaatttgtctcccgcatccgggtcattaaagacgatgcgtttaccacggcggcggcatgtcgccagtgtgaagatgccccctgcgcgaacgtgtgcccaacgcaggctattcgtcgcgatcatgggcacatcttcgtggaacaagcgcgctgtatcgggtgtaaaagctgtatgctggcgtgcccgttcggcgcgatgaacgttgtgtcgcgaacctcacgcgtacaggcgattaaatgcgatctctgctggcaccgtgcaacgggcccggcatgcgtggaggcctgcccgactgacgcgttgcagtgccttgatgtggaaaacgtgcagcgacaacgactgcacgcgcaacccgtctga

SEQ ID NO: 72916 - DNA, 816 bp, Citrobacter koseri
atgggcataaaagagagcgaaatgacgcaagaaaaagagaggccagccggtagtcagagcctgttccgtggtttgatgctgattgagatcctcagtaactacccgaacggatgcccgctggcacacttgtctgaactggccgggctgaacaaaagtaccgtgcatcgactgctacaggggttgcagtcctgcgggtatgtcacccccgcgcctgccgccggaagctatcgtctgaccactaaatttatcgctgtcgggcagaaagccctgtcatcgctgaatatcattcatgtggctgcgccgcatcttgagacgctgaatatcgctactggcgagaccgtcaacttctccagccgtgaagacgatcatgccatcctgatctataagctggagccgaccactggcatgctgcgcacccgtgcctatatcggtcagcatatgccgctgtattgctctgcgatggggaagatttacatggcgttcggccatcctgactatgtggaaacctattgggaaagccacaaggatcagatccagccgttgacccgtaacaccattaccgggttgccggcaatgtatgacgagctggcgcaaattcgtgaaagcggtatggcgatggatcgcgaagagaatgagctgggcgtttcctgcattgccgtgccggtgtttgatattcaccatcgggtgccatacgccatctctatttcgctttcgacgtcccggcttaagcaaattggtgagaaaaatctgctcaaacccctgcgtgacaccgcgcaggcgatctcgaatgagttgggttttaccgtgcgcgattaa

SEQ ID NO: 72917 - DNA, 999 bp, Citrobacter koseri
atgaaagtgacttttgagcagttaaaagaggcgttcaatcgggtgctgctggcgcgcggcgttgcggcggaaacggctgacgcctgtgcagagatgtttgcccgtaccacagaatccggcgtctattcgcatggcgtgaatcgctttccccgtttcattcagcaactggataatggcgacatcattcctgatgccagaccacagcgcatcaccagccttggcgccatcgagcagtgggatgctcagcgatccatcggcaatctgacggcgaaaaaaatgatggatcgcgccattgaactggcttccgaccacggcatcggcctggtggcgttacgcaatgccaaccactggatgcgcggcggcagctacggctggcaggcggcggaaaaaggctacatcggcatctgctggaccaactctatcgccgtgatgccgccgtgggggtcaaaagagtgccgcattggcacgaacccgctgattgtcgccatcccttcatcgccaatcaccatgatcgatatgtcgatgtcgatgttctcctacggcatgttagaggttaaccggctggcgggacgtgagctgccggtagacggcgggttcgacgatgaaggcaatttgaccaaagaacctggcgtgatcgaaaaaaatcgccgcattttgccgatgggctactggaaagggtcaggtctgtcgattgtgctggatatgatcgccaccctgctttccgacggtgcttccgttgccgaagttacccaggaaaacagcgacgaatacggcgtttcgcagatcttcatcgctattgaggtcgataagctgattgatggcgccacgcgcgatgccaaactccagcgcattatggatttcgtcaccaccgctgagcgcgccgatgagaacgtggcaatccgtctgccaggccacgaatttacccggctgcgggatgagaatcgccgcaacggcatcaccgtcgatgacagcgtatgggccaaaatccaggcgctgtaa

SEQ ID NO: 72918 - DNA, 465 bp, Citrobacter koseri
atgatatttggacatatcgcacagcccaatccgtgtcgtctgccagacgcgattgaaaaggcgctcgatttcttacgtaccaccgactttcgcacgttggaccctggggtggtggaaatcgacggcaaaaatatttttgcccagataattgatttaaccacccgcactgcggctgaaaaccgtccagaagttcatcgccgttatctggatattcagtttctcgcctggggtgaagaaaaaataggggttgccatcgacaccggtaataaccaaatcagcgaatcgttattagaacagcgcgatattattttctatcacgacagtgaacatgaatctttctttgaaatggttccgggaagctacgctatttttttcccgcaggatgttcatcgccctggctgcaataaaacggtcgcgacacccatacggaaaatcgtcgttaaagtggcaatatccgctttataa

SEQ ID NO: 72919 - DNA, 930 bp, Citrobacter koseri
atgaaaacgaacaataccggttatattatcggtgcgtatccctgtgcaccctcatttcaccaaaagagtgaagaggaagagaaggaattctggcggcaactctccgatactcctgatattcgtgggctggagcaaccctgccttgaacatcttcacccactcggcgacgcgtggttattgcgccatacgccaggcaactggcaaatcgtcgtgacggcgattatggaaaccatgcgccgtcgcggtgaaaaccgcggctttgggctggcctccagcaatgaagatcagcgtcaggcctgtgtggcgtactatcgccacctttaccagaagatcacgacaatcaacgcggcaagcgccgggaaagtgatcgcgcttgagctgcacgccgcaccgctggccgataacccaaacgtcgcgcaggcaacggacgcatttgcccgttcagtgaaagagatcgctggctgggactggccgtgcgacctggtgctggaacactgcgacgcaatgaccagcgccgcgccgcgcaaaggattcctgcctctggacaacgtgctggaggtgattgccgactacgacatcagcgtttgcattaactgggcgcgttccgccattgaaggacgcaacaccaccctgccactaacccatacgcagcaggtgaaacaggctggcaaactcggcgcgctgatgttctccggtacaacgcaaagcggtgaatacggcgaatggcaggatttacatgcgcctttcgcgcctttctgccctgacagcatgatgacgcaggaacatgcccgtgaattactgacctgcgcaggaacagacgttctgcaattcatgggtattaagttactggaaattaacgctaatgccgacgtcagtcaccgcgtagcgatattacgcgacggcattacggcattaaataacgccaaataa

SEQ ID NO: 72920 - DNA, 1320 bp, Citrobacter koseri
atgaatatgacctctcgccctacagaaaaagatatacctcgtcagcgttggctgcgaattattccgcccattctgattacctgtattatttcttatatggaccgcgtgaatattgctttcgcgatgcctggcggaatggatgccgaattaggtatttccgccactatggccggtctggctggcgggattttcttcatcggctatctgttcttacaggttcccggcggcaaaatcgccgttcacggcagcggcaagaaatttatcggctggtcgctggttgcctgggcggttatttccgtcctcacaggcttaatcaccaaccagtatcaattgcttgccctgcgtttcttactgggtgtggcggaaggcggtatgctgcccgtcgtactgacgatgatcagcaactggttcccggacgctgaacgcggtcgtgcgaacgccattgtgattatgtttgtgccgattgccgggataatcaccgccccgctctccggctggataatcaccgtactcgactggcgctggctgttcattattgaaggtctgctctctctcgtcgtgctggtgctgtgggcgtacaccatttatgaccggccgcaggaagcccgctggatctccggggcggaaaaaaactatctggtggaaaccctcgccgcagaacagaaagccattgccggaagcgaagtcaaaaacgcctctctcagcgcggtcctttccgacaaaaccatgtggcaacttatcgccctgaacttcttctatcagaccgggatttacggttacaccctctggctgccaaccatcctcaaagagctgacccacagcagcatggggcaagtcggcatgctcgccattttgccgtacgtcggcgcgatcgccgggatgttcctgttctctttcctatccgaccgcacgggtaaacgcaaactgtttgtctgcctgccgctgattggcttcgccctgtgcatgttcctgtcggtggcgctgaaaaaccaaatctggctggcctatgccgcgctggtcggctgcggcttcttcctgcaatcggcggcgggcgttttctggacgatcccggcacgtctgttcagcgccgagatggcgggcggcgcacgcggcgttatcaacgcgcttggcaacctcggcggcttctgcggcccctacgcggttggcgtactgatcacgttgtacagcaaagatgctggcgtctattgcctggcaatctccctggcgctggccgcgctgctggcgttgttgctgcccgcgaaatgcgatgcgggttcgacaccggcaaagacaatgagcccgcgtaaacacgccgcgtaa

SEQ ID NO: 72921 - DNA, 1506 bp, Citrobacter koseri
atgagagagaaagaggccttctggctgggcatcgattgtggcggtacttatctgaaagccggtttgtatgacgccaaaggtcatgagcatgggatcaaccggcagtcgttacagacggcaacgccactgccgggttacgccgaacgcgacatgcaccagctctggcaacagtgcgcagccaccattaccgggcttttgcagcgtacaggcatctccggcgagcaaattaaaggcgtcggtatctccgctcagggtaaaggattgtttctgctcgacaggcaggatcagccgctgggcagcgccattctctcttccgaccgccgggcgctgaagattgtccagcgctggcagcaggacggcattcctgaacagctttaccccgttacccgtcagacgctgtggaccgggcatcccgcttctctgctgcgctggattaaagagaacgaccctcaacgttacgcacaaattggctgcgtgatgatggggcatgactatctgcgctggcgcttaaccggcataaaagggtgcgaagagagcaacatttctgagtccaacctctacaacatgagcagcgggcagtatgacccgcgcctgacccaatggttgggcatcagtgaaatcgacgatgcgctgccccccattatggggtcagccgaaatatgcggggagatcactgctcaggcagccgccatcaccggtctgaaggcgggcacgcccgtcgtcggcggtctgtttgacgtggtttccaccgcgctctgcgccggtattgaagatgaattcaccctcaacgcggtgatgggcacctgggcggtgaccagcgggatcaccgaggggttgcgcgaccacgaagcgcacccttatgtctatggccgctacgtcaacgacgggcagtacatcgttcacgaagccagccctacctcatccggcaatcttgaatggtttaccgcccagtggggcgaactctcttttgacgagatcaaccaggccgtcgccagccagccgaaagcgagcggcgaactctttttcctgccgtttctgtacggcagcaatgccgggctggagatgacctgcggcttttacggcatgcaggcgctgcatacccgcgcgcatctgctacaggccatttacgaaggggtggtgttcagccacatgacccatctcaaccgtatgcgcgaacgctttactgaggcgcacaccctgcgcgtaaccggcggcccggcgcactccgacgtctggatgcagatgctggcggatgtcagcggcctgcgcatcgaactaccgcaggttgaagagaccggctgctttggcgccgcgctcgccgcccgcgtcggcaccggcgtataccgcagtttcagcgaggctcagcacgccttacggcacccggtacgcacgctgatgcccgacatggccgcgcaccgtctttatcagcgcaaataccaccaataccaggatttgattcaggcattacagggctaccacgcccgcattaaggagcacgcattatga

SEQ ID NO: 72922 - DNA, 663 bp, Citrobacter koseri
atgagccgaccattactgcaactggcgctcgaccacaccaaccttcaggcggcgcttcacgatgtcgccctgttacaggaccacgtcgatatcgttgaggctggcaccatcctctgtttaaccgaggggcttggcgcggtgaaagcgctgcgcgcccagtgcccggataaaatcatcgttgccgactggaaggtggccgatgcgggcgaaacgctcgcgcagcaggcttttgccgccggcgccaactggatgacgattatctgtgcggcgccgctcgccacggtggagaaaggccatgccgtcgcgcaatcctgcggcggtgaaattcagatggagctgttcggcaactggacgctggactatgcccgcgcctggtatcgcaccggtgtgcgccaggcgatttaccaccgtgggcgcgacgcgcaggccagcggacagcagtggggagacgcggatctggcgcggatgaaggcgctttctgatatcggtctggagctgtcgattaccggcggcattacgcctgccgatctgccgttgtttaaagatattcgcgtcaaagcatttatcgccggacgcgcgctggcaggggcggcgcatccggcgcaggttgctgccgggttccacgcgcaaattaacgccatctggggagagcagcatgcgtaa

SEQ ID NO: 72923 - DNA, 861 bp, Citrobacter koseri
atgcgtaatcatccgttaggtatctatgaaaaagcgctggcaaaagacctcagttggccggagcgcctggtgctggcgaaaagctgcggctttgactttgtcgaaatgtcggtggatgagaccgacgaacgcctgtcgcgcctggactggagccccacgcagcgggcgtcgctggtgaccgccatgctggaaaccggcgtggccatcccgtcaatgtgcctgtccgcgcatcgtcgctttcccttcggcagtcgcgatgaggccgtacgccagcgggcgcgcgacatcatgaccaaagcgattcacctggcgcgcgatctgggtatccgcaccattcaactggcgggttatgacgtctattacgaagaacatgacgaaggtacgcaacaacgctttgccgaagggctggcgtgggcggtggagcaagccgcagcggcgcaggtgatgctggcggtggagatcatggataccacctttatgaactccatcagcaaatggaaaaaatgggacgcgctgctcgcctcgccgtggtttagcgtttacccggatgtcggcaatctcagcgcctggggcaacgacgtcgccgctgagctgaagctcggtattgaccgcatcgccgccatccacctgaaagacacgcagccggtgacagagaacagccccggtcagttccgcgacgtgccgttcggcgaagggtgcgtggattttgtcggcatcttcaaaacgctgcatgagctgaactaccgtggcgcgtttttgattgagatgtggacggaaaaggccaaagagccggtgctggaaattatccaggcgcggcgctggatagaagcgcgtatgcaggaaggaggattcacatgttag

SEQ ID NO: 72924 - DNA, 696 bp, Citrobacter koseri
atgttagagcagttaaaagccgaggtgctggcagccaatctggcgcttccggcacaccatctggtgacattcacctggggtaacgtcagcgccgtcgatgaaacgcgaaaactgatggtcattaaaccttccggcgttgaatatgacgtcatgaccgccgacgatatggtggtggtggagatcgccagcggcaaggtcgttgaaggcagcaaaaagccctcatccgatacgccgacgcatctggcgctctatcgtcgttatccgcagatcggcggaattgtgcatacccattcccgccatgcaacgatctggtcacaggcgggtcttgacctgcccgcctggggcaccacgcatgccgactatttctatggcgcaatcccctgtacccggctgatgaccgtggaggaaattaaaggggaatacgaataccagacgggcgaggtaatcatcaaaacctttgaagagcgcggtctgaacccaatgcagatcccggcggtattagtccattcacacgggccattcgcctgggggaaagacgccgctgacgccgtgcataacgccgtggtgcttgaggagtgcgcctatatggggctgttttcccgccagctcacgccgcagctaccggatatgcagccagaattgctcgacaaacattatctgcgtaaacacggcgcgaacgcctattacgggcagtaa

SEQ ID NO: 72925 - DNA, 414 bp, Citrobacter koseri
atggaatatcagttacatggatttatgattggcagggaaatattccttgatattaacgaagctcgaattttccggctgccggttaataaaatggatagcgtcatctctttctgtggagtgttttttaatcggacaatgctccatctgtttgtttaccttttggtcaatgcacgttctcaatatgtctcaaaggatgaattactcatcaacgtttgggaaaaaaatgaattatgtgcttccacgcagcgtttatctaaagtcgtcaaaaatctaaataataaattaagtctgctggggctaccgaagaattcaattgtctgcgtgaaaggaagtggatacatactggcactggatgatattcaaccgctttatagtgtggtggacaatgtagattatcaataccgatatcgctga

SEQ ID NO: 72926 - DNA, 1539 bp, Citrobacter koseri
atgaccaataatcccccttcaacgcgtattcagcccggcgagtatggttttcctctgaaattaaaagcccgctacgacaactttatcggcggagactgggtcgcaccggtagacggcgagtattaccagaatctgacgccggtgaccgggcaactgctgtgtgaagtcgcctcttccggcaaaaaagatatcgatctggcgctggatgccgcgcataaagtgaaagaacagtgggcgcatacgtccgtgcaggatcgcgccgcgattctgtttaagattgccgatcgcatggagcaaaacctggaactgctggcaacggcggaaacctgggataacggcaaacccatccgtgaaaccagcgctgccgacgtgccgctggcgatcgaccatttccgctattttgcgtcctgtatccgcgcacaagagggcggtatcagcgaagttgacagcgaaacggtggcttatcacttccatgaacctctgggcgtggtggggcagatcatcccgtggaacttcccgctgctgatggcgagctggaaaatggccccggcgctggcggcggggaactgcgtggtgctcaaacctgcgcgtctgacgccgctttcggttctgttgctgatggaaatcgttggcgacctgctcccgccgggcgtggtcaacgtcgtgaacggcgcgggcggagagatcggcgaatatctggcgacgtcgaagcggatcgcgaaggtggcgtttaccggttcgacggaagtcgggcaacagatcatgcagtacgcgacacaaaacattatcccggtaacgctggagctgggcggtaagtcccccaatatcttcttcgccgatgtgatggatgaagaggatgcgtttttcgacaaggcgctggagggctttgcgctgtttgcctttaaccagggtgaagtttgtacctgcccgagccgtgcgctggtacaggagtccatttatgagcgctttatggagcgggccattcgtcgcgtcgaaagcattcgcagcggtaacccgctcgacagcgttacgcagatgggcgcacaggtctcccagggtcaactggaaaccatcctcaactacattgatatcggtaagaaagaaggcgcggatgtgttaaccggcgggcggcgcaagcagctggaaggagagctgaaagagggctattacctcgaaccgaccatcctgtttggtaagaacaatatgcgcgtcttccaggaggagatttttggcccggtgctggcggtgacgaccttcaggacgatggaggaagcgctggaactggctaacgacacccagtacgggcttggcgccggagtctggagtcgtaacggcaacctggcgtacaaaatggggcgcggtattcaggcgggacgcgtatggaccaactgctatcatgcttacccggcgcatgctgcgttcggcggctataagcagtcggggattggccgtgagacccacaaaatgatgctggagcattatcagcaaaccaaatgtctgctggtgagctattccgataaaccgctggggctgttttaa

SEQ ID NO: 72927 - DNA, 1152 bp, Citrobacter koseri
atggctgcttcaacattttttattccttccgtgaatgtaatcggcgctggtgcattaaaagaagcaatgaatactatggcggaatatggttttcgccgtacattaattgtcacggatagcatgttaacaacattaggcatggctggagatattcagaaagcgttgcaggaacgcgatattttcagcgttatttatgatggcacgcagccgaacccgaccaccgaaaacgtggctgccgggctgaaactcctgaaagaacacgggtgcgatagcgtaatttcgctgggcggcggctccccgcacgactgcgcgaaaggcatcgcgctggtggcggcgaacggcggcgacatccgcgactatgaaggcgtggatcgctccgcgaaacctcaactaccgatgattgccatcaacacgacggcgggaacggcatcagaaatgacccgcttctgcatcattaccgatgaagcgcgccatattaagatggcgattgtggataaacacgttacgccgctgctctccgtgaatgactcttcgttgatgatggggatgccaaaatcgctgaccgccgcgaccggcatggatgcgttaacccacgccattgaagcctatgtttctattgccgcaacgccgattactgatgcatgcgcgctgaaagccatctctatgattgcggaaaacctggcgattgccgtggaagagggcagcaacgcgcaggcgcgcgaagcgatggcctatgcgcaattcctggctggtatggcgtttaacaatgcttctctgggctatgtccacgcgatggcgcaccagctcggcggcttctacaatctgccgcacggcgtatgtaatgcggtgctgttgccgcacgttcaggtatttaacagccaggtcgcggcaggccgtctgcgtgactgtgcggctgcgatgggcgttaatgtaaccgggatgagtgaagccgacggcgcgaaagcgtgcattgacgctatccgtcagctggcgcagcaggtcaacattccggcgggtctgcgcgacctgaatgtgaaagaagaagatatttcggtgctggcgaccaatgcgctgaaagacgcctgtggcctgaccaaccctattcaggcgacccacgacgagatcatggcgatttaccacgcggcgatgtaa

SEQ ID NO: 72928 - DNA, 1848 bp, Citrobacter koseri
atgattattgcaaccgccggacacgttgaccacggaaaaacaacgctattacaggcgattaccggcgtgaatgccgatcgtctgccggaagaaaaaaaacgcggtatgaccatcgatctggggtatgcctactggccgcagccggatggccgcgtgctgggatttatcgacgttcccggtcatgaaaagtttctctccaacatgctggcgggcgtgggcggtatcgatcatgcgctgctggttgtcgcctgcgatgacggcgtgatggcgcagacccgcgagcatctgcaaattttacaactgacgggcaatccgcagcttacggttgcgctgaccaaagccgaccgcgtggatgacgcgcgaatcgaagaggtgcgggaagagattctggcgacgctgggccattacgggtttgccgacgtgacgctgtttgtcaccgccgcaaatgaagggcgcggtattgaggcattgcgcgagcatttacggcagttgacgggccgcgcgcatcccggccatcagagctttcgcctggcgatcgatcgcgcgtttacggtgaaaggcgcagggctggtggtgaccggtacggcgctcagcggcgaagtgaacgtcggcgatacgctgtggctgaccggtgtgaataagcccatgcgcgtgcgcagcctgcatgcgcagaatcaggcgactgaacacgctcatgccggacagcgtattgcgctgaatatcgcgggcgatgcggaaaaagagcagcttaaccgtggcgactggcttctctctgacgtaccgccggatgccttttcacgcgtcatcgtttcgttagaacatgctgcgccgctcgtgcaatggcaaccgctgcatattcaccacgccgccagccatgtcaccggacgtatttccctgctggagggcacgctggcggaactggtgttcgatacgccgctatggcttgccgataacgatcggctggtattacgcgatatttctgcccgtaccacgcttgctggcgcacgcgtggtgacgctcaactcgccgcgtcgcggtaaacgtaaaccggaatatctgcaatggctgtcggcgctggaaaacgccagggatgacagcgccgcgctggcgacgcatctcgaacgcggcgcggtgaatattcctgattttgtgtgggcgcggcagctcaacggcgacggtatgcgccagcttattgaacagcatggttttattcaggcgggttacagcctgttgaacgcccctgtcgccgcgcgctggcagcgtaagatcctggatacgctcgcgatgtaccacgaacaccatcgcgatgaacccggcccggggcgcgagcgtttgcggcgcatggcgctcccgatggaagacgaagcgctggtgctgctgctcatcgaccgtatgcgtgaaagcggcgtgattcacagccaccacggctggttgcatttaccggatcacaaagccggtttcagcgacgagcagcaggccgtctggcaaaacattgagccgctgtttggcgacgacccctggtgggtgcgcgatctggcgaaagaaaagggcgtggacgagcaggttatgcggcaggtgctgcgacaggcggcacagcagggcatgattaccgcgatcgtgaaagatcgttattaccgtaacgatcggattgtcgcttttgcgaacctgatccgcgaactggatcaggagagaggctcgacctgcgccgctgattttcgcgatcggctgaatgttggacgaaaactcgccattcagattctggagtattttgaccggacaggattcacgcgccgtcgcggaaacgatcatttattacgcgatgcgttattatttccggcaaaagaatga

SEQ ID NO: 72929 - DNA, 1446 bp, Citrobacter koseri
atgtcgatatccctctccgcaccggagggggccaccaacagccaggcctttttcatgacaaccgaaacgcgttcactctacagccagcttcctgctatcgatcgcttactgcgtgacagcacttttctctctttacgtgatacccacgggcataccagggtggtggatctgcttcgccagatgttggatgaagcaagggaagcgattcgcgatacgcaggcgctgcccgcgtggtgcgagaactgggcgcaagaggtgaatatccggctggcgaaagaggcgcaaagcgcgctgcgtccggtgattaacctgacgggaacggtgctgcacaccaatctggggcgtgcgcagcaggcggaagaggcgattgacgcggtgacgcaggcaatgcgcgctccggtcacactggaatatgatctggatggcgccgggcgcggacaccgcgatcgggcgctggcggacctgttatgtcgcattaccggggcggaagacgcctgtattgtgaacaacaacgcggcggccgtgttgttgatgctggcggcgacggcgaacggtaaagaggtggtggtatcgcgtggtgaactggtggagattggcggcgcgtttcgtattcctgatgtgatgcgtcaggcgggctgtacgctgcatgaggtgggaaccaccaaccggactcacgcgaaagattatcgtcaggcggtgaatgaaaacaccggcctgttgatgaaagtgcataccagtaattacagtattgaaggcttcaccaaagcggtggatgaggcagagctggccgctattgggctggagctggatatcccggtggtggcggatctgggcagcggttcgctggtggatctcagtcagtacggcttgccgaaagaaccgatgccgcagcagctgattgccgcaggcgtcagcctggtcagcttctctggcgacaagctgctgggcgggccgcaggccgggatcattgtcggcaagaaagagatgattgcgcaactgcaaagccacccgctgaagcgggccctgcgtgccgacaaaatgacgctggcggcgctggaggcaaccctgcggctttatctgcacccggaagcgctggcggagaaactgccgacgctgcggctgttaacccgcagtgaagcggcgattcaggcgcaggcgcagcggctacaggcggcgcttgccgcacgctttagcgcggagttcgcggtaaacgtgatgtcttgcctgtcgcagatcggcagcggttcgctgccggttgatcggctgcccagcgcggcgctgacctttacgccgcatgacgggcgcggaagccgtcttgaggcgctggcggcccgctggcgcgcgctgccggtcccgatcattggccgaatttacgatggtcgcctgtggctggatatccgctgccttgaagacgagacccggcttatggagatgatgttgaaatga

SEQ ID NO: 72930 - DNA, 609 bp, Citrobacter koseri
atgaaactcatcggcagctataccagcccttttgtgcgaaagatttcggttttattgctggaaaagggcatcactttcgaatttgtgaatgaacttccctacaacgcggaaaacggcgtggcgcagtacaacccgcttggcaaagtccccgcgctggtgacagataagggagagtgctggttcgattccccgataatcgccgaatatattgagttactggatattgctccggtgatgattccgcgtgaaccgctggcctcactgaaagtacggcagattgaagcgctggcggacggcattatggatgccggtctggtttccgtgcgtgaacaggcgcgcccggcggcgcagcagtctgaaacggaactgttgcgccagcgcgagaaaatcaaccgtagcctggacgcgctggaaggctatctggtggacgggacgattaagaccgataccgtgaatctggcaaccatcgccattgcctgcgctgtgggctatctcaatttccgccgcgtggcgccgggctggtgtgtggacagaccgcacttagtcaaactggtggaaacgctctttcaacgcgaaagctttgcccgcacggaaccgccaaaggcttga

SEQ ID NO: 72931 - DNA, 1137 bp, Citrobacter koseri
atggatctgttgattgttttgacctacgtagcattagcctgggcggtatttaaaatattcaggattccggtgaatcaatggacactttccacggcggcattaggcggggtatttttagttagcggacttatattattaatgaactataaccacccctatacttttacggcgcagaaagcggttatttctattcccattacgccgcaggtaacaggtattgtgagtgaggtaacggataaaaataatcagctgattaaaaaaggcgatgttttattcaaaatcgatcccgtgcggtatcaggcgcgggtcgacaggttacaggctgacctggtcacggccacgcataatatacataccctgaaggcgcaattagcggaggctcaggccaataccacgcgggtgtccgcagaacgcgaccgcctctataaggattatcagcgctatctgaaaggcagtcaggcgagggtgaatccgttttctgaaagcgatatcgataacgcgcggcaaaactatttagcgcaggatgcgatggtaaaaggttctgttgctgagcaaacgcagatccagagccaactggacagcatggtcgatggcgagcagtcgcaaatcgtcagcctgcgggcgcagctggccgaggcgaaatacaatcttgaacagacggttattcgcgcgccgagcaatggctatgtgacccaggtgcttatccggcccggtagctatgccgccgcgctgccgctgcgcccggtaatggtttttattcccgaacaaaaacggcaaattgtcgcccagttccggcagaactcattattacgtcttgaggcgggagatgaggcagaagtggtgttcaatgcgctgcccggccaggtattccagggcaaattgttgagtattttaccggttgtgcccggcggttcttaccaggcgcagggaacattacagtccttaagcgtaacgccggggatggacggcgtgcttgcgttgattgagctggagccgaatagtgatgtggatgccctgcctgacggcatttacgcccaggttgcggtttactccgatcacttcgcccatgtctccgtgatgcgtaaggtgctactgcgcatgaccagctggatgcactatctttatttggatcattaa

SEQ ID NO: 72932 - DNA, 315 bp, Citrobacter koseri
atgattcatgacatcccttatctgatcgctaaaaaacgaaaccacccccatgctgatgctattcatactgctggttgggtcagtctgtttacgcttcatgttatttggccgtttctgtggatttgggccacgctttatcagcctgaacggggctggggcatgcaagcgcatgtttcaccgcaggaaaaggaacctgagccggggccagaaccggagcctgacacggaacttatcgccttgtcgaaacgtgtggaagcgctggagcgaaagctggctgaggtacagtcccctgatattcccccgtcggagagctaa

SEQ ID NO: 72933 - DNA, 1914 bp, Citrobacter koseri
atgtcatccgatattaagatcaaggtgcaaagctttggtcgtttcctcagcaatatggtgatgccaaatatcggcgcgtttatcgcgtggggtattatcaccgcattatttattccaacagggtggttgcctaacgaaacgctggcaaagctcgttggtccgatgatcacctacctcctgccgctgctgatcggttataccggtggtaagctggtcggcggcgagcgcggcggcgtggtcggtgctatcaccacgatgggcgttatcgtcggtgcggacatgccgatgttcctcggctcaatgatcgcaggcccgctgggcggctactgcatcaagaaattcgatagctgggtagacggtaagatcaaatccggtttcgaaatgctggtgaataacttctccgctggcatcatcgggatgatcctcgcgattctggcgttcctcggcattggcccggcggttgaagtcctgtccaaactgctggcagccggcgttaacttcatggttgtccatgatatgctgccgctggcgtctatcttcgttgaaccggcgaaaatcctgttcctcaacaacgcgatcaaccacggtatcttctcgccgctgggtattcagcagtcccatgagctgggtaaatccatcttcttcctgatcgaagctaacccaggcccgggtatgggtatcctgatggcgtacatgttcttcggtcacggcagcgcaaaacagtctgctggcggtgcggcaatcatccacttcctgggcggtatccacgaaatttacttcccgtacgtgctgatgaacccgcgtctgatcctggccgttatcctcggcggtatgactggcgtgtttacgctgaccatcctgaacggcggtctggtttctccggcgtctccgggttctatcctggcggtactggcgatgacgccaaaaggcgcctacttcgctaacatcacggcgattatcgctgctatggcggtctccttcatcattgcctccattctgctgaaaaccagcaaagtgaaagaagatgatgatatcgacgcggcaacccgtcgcgtgcaggacatgaaagcggaatctaaaggcgcatccgcgctgtccgctggcgatgtgaccaacgacctgagccatgtacgtaaaatcatcgttgcctgtgatgccggtatgggttccagcgcaatgggtgcgggcgtactgcgcaaaaaagttcaggatgcgggtctgagccagatttccgtcaccaacagcgcgatcaacaacctgccgccggatgtcgacctggtcatcactcaccgtgacctgaccgagcgcgccatgcgccaggttccgcaagcgcagcacatttcgctgaccaacttcctggatagcggactgtacaccagcctgaccgaacgtctggttgccgcgcagcgccacaacaccaacgaagagaaagtacgcgatcatctgaaagacagctttgatgaaggggataacaacctgttcaagctgggcgcagaaaacatcttcctgggtcgtaaagccgccactaaagaagaagccattcgctttgcgggcgagcaactggtgaaaggcggttatgttgagccagaatacatcgacgccatgctggaacgtgaaaaactgaccccgacttatctgggtgagtctatcgccgtaccgcacggcaccgtggaagccaaagaccgcgtgctgaaaaccggtgtggtgttctgccagtacccggaaggcgtacgcttcggtgaagaagaagacgatattgcccgtctggtcattggtatcgcggcgcgtaacaacgagcacatccaggtcatcaccagcctgactaacgcgctggatgatgagtccgtgatcgagcgtctggcgcataccaccagcgtggatgaagtgctggaactgctggccggtcgtaagtaa

SEQ ID NO: 72934 - DNA, 198 bp, Citrobacter koseri
atggcttcccccctcacccaaaccctctcccttgcgggagaggaaaccgtacaccgcaggccggtagcagcgccaccggacatgatgccggatggcggcgtaaacgccttatccggcctacgggaactgcacatcgcatgcccggtaagcacagcgtcgccgggcatgatgccggcctacgggaactgcacatcgtag

SEQ ID NO: 72935 - DNA, 1149 bp, Citrobacter koseri
atgaaagcattacattttggcgcaggtaatatcggtcgtggatttatcggcaaactgctggctgacgcggggatacaactgacgttcgcggatgtaaaccaggtcgtgctcgacgccctgaatgcccgtcatagctatcaggttcatgtggtgggtgaaaatgagcaggttgatacggtttccggcgttaatgccgtgagcagcatcagcgatgacgtggttgagctgattgcgcaggtcgatttggtcaccaccgccgttgggccggtggtactggaacgcattgctccggccatcgccaaaggcctggttaaacgtaaaacgcagggaattgaagcgccgcttaacatcattgcctgcgaaaacatggtgcgcggcaccacgcaattgaaaggtcatgtgatgaacgccctggcggatgaagacaaagcctgggttgaacagcatgtcggttttgtcgattccgccgtcgaccgtatcgtgccgccttccgcctccgccacgaacgacccgctggaagtcaccgtggaaaccttcagcgagtggattgtcgataaaacgcagttcaaaggcgcgctgccagatattccaggtatggaattaaccgataacctgatggcatttgtcgaacgtaaactcttcacgctgaacaccgggcatgctataaccgcgtacctcggaaaattaaccggtcatcagaccatccgtgacgcgattctcgatgagaaaatccgcgctgtggtaaaaggggcgatggaagagagcggcgcggtgctgatcaaacgctacggttttgatgccgacaaacatgcggcatacattcagaaaatcctcggtcgttttgaaaacccgtatctgaaagatgacgttgagcgcgttggccgccagccgctgcgtaagctgagtgcgggcgaccgtctgatcaaaccgctgctgggcacgctggaatacggcctgccgcacgttaacctggtcaacggtatcgctgccgcgatgcactttaccagcgaagacgatccgcaggcccaggaactggctgcgctgatcgcagagaaagggccgcaggaagcgctggcgcaaatttccgggctggatgtaaacagcgaagtggtagcggaggcggttaacgcatacaacgcgaccaaatga

SEQ ID NO: 72936 - DNA, 591 bp, Citrobacter koseri
atgaggcaaaatacggcgcaggtcatcctgcgcccgaatgacagattgtcagatatgcaggcaataatggaacaaacccaggcctttgaaaaccgcgtgcttgagcgtctgaatgctggcaaaaccgtacgaagtttcctcatcaccgccgtagagttactcaccgaggcggtgaatattctggtacttcaggtgtttcgcaaagacgattatgcggtgaaatacgcagtggaaccgttgctcgacggcgatggaccgctgggcgatctctcggtacgtctgaaactgatctacggtctgggggtactcagtcgccctgaatatgaagatgcggaacttctgatggcgctgcgtgaagaactgaatcacgacggtaatgaatatgcgttcaccgacgacgaaattctcgggccgtttggcgaactgcactgcgtgacggcgttaccgccgccgccgcattttgagacctctgacccgggtttatacgccatgcaaattcagcgctaccagcaagcggtgcgctcaacgatggtgctttccctgaccgagctgatttctaaaatcagcttaaaaaaagcctttcaaaaatag

SEQ ID NO: 72937 - DNA, 210 bp, Citrobacter koseri
atggttaaaataggtgacaacgttccgcttcttattgataaggctgtagattttatggcttcgagtcaggcatttcgggagtatctgaataaaacgccgccgcgcgatatggttcctgatgaggtgccgaaggcaaatgcgcagatgtacctgcaacgtctggaatattatcgccagctctatcagccgcagccggaagaaaaacagtaa

SEQ ID NO: 72938 - DNA, 363 bp, Citrobacter koseri
atgaaagaagtcgaaaaaaacgaaattaaacgtctgagcgatcgcctggacgccatccgccaccagcaggcctcgctatcccttgtcgatgccgctgacaaatatgccgagctggaaaaagagaaagccacgctggaagccgagatcgtgcgcctgcgtgacgttcacagccagaagctgagtaaagaagcgcaaaagctgatgaacctgccgtttcgccgcgcgattactaaaaaagaacaggccgatatgggcaagctgaagaaaagcgtgcgcggtctggttgtcgtccacccaatgacggcgttaggccgtgaaatgggcctgaaagagatgaccggtttcgcaaaaaccgagttttaa

SEQ ID NO: 72939 - DNA, 1656 bp, Citrobacter koseri
atgaatctctggcaacaaaactacgatccggccggtaacatctggatttccagcctgatcgcatcgcttccgatcctgttctttttcttcgcgctgattaagctcaagctgaaaggctacatcgccgcctcctggacggtcgcaatcgcgctggctgtcgcgctgctgttttacaaaatgccggtggataacgccctggctgcggtggtgtatggcttcttctatggtctgtggccaattgcctggatcattatcgccgccgtctttgtctataaaatctctgtcagaaccgggcaattcgacatcatccggtcatcaatattgtcaatcacccctgaccagcgtctgcaaatgctgatcgtcggcttttcctttggggcattccttgaaggggctgcgggctttggcgcgccagtggcgattactgcggctctgctagtcggcctgggctttaatccgctgtatgcggcgggtttgtgcctgatcgtcaacaccgcgccggtcgcgtttggcgcgatggggattccgattctggtggccggtcaggtcaccgggctggacagctttgagatcggccagatggtcggccgtcagctgccgttcctgaccattatcgtactgttctggatcatggcgattatggacggctggcgcggcgtgaaagagacctggcctgcggtgatggtggcgggtggttcatttgctatcgcccagtacctcagctctaactttatcggcccggaactgccggacatcatctcgtcgctggtctcgctggtctgtctgacgctgttcctgaaacgctggcagccggtacgtattttccgctttggcgatatgggcgcttcacaggtcgatcagacgctggaccgcacccattacacggttggtcaagtcgttcgcgcatggtcgccgttcctgttcctgacagcgaccgttaccctctggagcgtcccgccgtttaaagcgatgtttgccccaggcggcgcgctgtacgactgggtgattaatattccggttccgcatcttgataagctggttgcccgtatgccgccagtggtgcatgaggcaaccgcctacgctgcggtctataagttcgactggttctccgctaccggtacggccattctgttcgctgcgctgctgtccgtcgtctggctgaaaatgaaaccgtctgccgcaatccagacattcggcagcacgctgaaagagttagcgctgccgatttactccatcgggatggtgctggcattcgcgtttatctctaactactccgggctctcctctacgctggcgttagcgctggcgcatacgggcagcgcctttaccttcttctcgccgttccttggctggctgggcgtattcctgacgggatctgatacctcatcaaacgcgctgtttgccgccctgcaggcgacggccgcccagcaaatcggcgtctctgacgtgctgatggtggcggcgaataccaccggcggcgtaaccggtaagatgatctctccgcagtctatcgccattgcctgtgcggcagtgggtctggtagggaaagagtccgacctgttccgctttaccgttaaacacagcctgattttcacctgcatggtgggtgtgattaccacacttcaggcctatgtcttaacctggatgattccgtga

SEQ ID NO: 72940 - DNA, 777 bp, Citrobacter koseri
gtgattgtgatgccaaaacgcctgtcagacgaggttgcctctcgtgtgcgggcgctgattgaagaacaacagctggaggcgggcatgaagttgcccgccgagcgccagctggccgtacaactgggcgtgtcgcgcaattctctgcgcgaggcgctggcgaaactggtcagtgaaggcgtgctgatcagccgccggggcggcggaacgttcgttcgctggcagcatgaaacctggtccgaacagaatatcgttcagccgttgaaaacgctgatggcggacgacccggactacagcttcgacattctggaagcccgccacgccattgaagccagcaccgcgtggcacgctgcaatgcgcgccacacccgctgataaagagaaaattaagctctgctttgacgccacgctcagtgaagacccggacctcgcctctcaggcggatgttcgcttccatctcgcgattgcggaggcctcgcacaacgtcgtgctgttgcagaccatgcgcggcttctttgatgtcctgcaatcatccgtgaagcagagccgccagcgtatgtatctcgttccgccggtgttttcaaaactgacggaacaacatcaggcggtgatggacgccattctggccggtgatgccgacggcgcacgtaaagccatgatggcgcacctcagtttcgtccacaccaccattaaacgatttgatgaagaccaggcccgccaggcgcgtattacccgcctgcccggtgaccataatgagatttccagggagaacaaagcatga

SEQ ID NO: 72941 - DNA, 1191 bp, Citrobacter koseri
atgatcatttcagcagccagcgattatcgcgccgcagcccaacgcattctgccccctttcttgttccactacatcgacggcggcgcctatgcggaatacaccctgcgtcgtaacgtggaagacttgtcagaggtggcgctccgccagcgcgtgctgaagaatatgtccgacctgagcctggaaaccaccctgtttaacgaaaagctgtcgatgccggttgcactggctccggttggcctgtgcggaatgtatgcgcgtcgcggtgaagttcaggccgccgccgccgccgatgcgaaagggattccgtttaccctctccaccgtttctgtctgccctatcgaggaagtcgcgccgacgattaaacgcccgatgtggttccagctgtacgtcctgcgcgatcgcggttttatgcgtaacgcgctggagcgcgccaaagcggcgggctgctccacgctggtctttaccgtcgatatgccaacgcctggcgcgcgttaccgtgacgcccactccgggatgagcggcccgaatgccgccctgcgccgctactggcaggctgcaacccatccgcaatgggcctgggatgtcggcctgaacggtcgtccgcacgatctgggcaatatctccgcctacctcggcaaaccgaccgggctggaagattacatcggctggctggcgaacaacttcgatccgtcgatttcctggaaagacctggagtggatccgtgaattctgggacggcccaatggtgatcaaagggatcctcgatcccgaagacgcccgcgacgcggtacgctttggcgctgacggcatcgtggtctctaaccacggcggccgccagctcgacggcgtactctcctccgcccgcgccctgcccgccattgccgacgcggtgaaaggcgatatcgccattctggctgatagcggaattcgtaatggtctggacgtggtacgcatgattgcgcttggggccgatagcgtactgcttggccgtgcgtatctgtacgcgctggcgacggcgggtcaggctggcgtggcgaacctgctggatctgatcgaaaaagagatgaaagtcgccatgacgctgaccggcgcaaaatcaatcagcgagatcagccgtgattcgctggtgcaggaactcggtaagagcttacctgccgcactggcaccgctgacgcagggtgatgcggcgtag

SEQ ID NO: 72942 - DNA, 474 bp, Citrobacter koseri
atgttgaatatcgtattattcgaaccagaaatcccaccaaacaccggcaatattattcgtctttgcgccaataccggttttcgtctgcatattatcgagccgatgggcttcacatgggatgataaacgtctgcgccgcgcggggctggactatcacgagtttgccgccgtacagcgccatcacgattacgctgcctttgtcgccgccgaaaacccacagcgtctgtttgctctgaccaccaaaggcacccctgcccatagcgcggtgagctatcaggatggggactacctgatgtttggcccggaaacgcgcggtttaccggcgaccattcttgacgcgctgcccgcagaacaaaaaattcgtattccaatgatgccggacagccgcagcatgaacctgtcgaacgcggtgtcggtcgtggtgtatgaggcatggcgccagttggggtatcctggcgcggtattgcgtcgttga

SEQ ID NO: 72943 - DNA, 822 bp, Citrobacter koseri
atgtcatgtgaagaactggatatcgtctggaacaatattaaagccgaagcccgggctctggcggactgtgagccgatgctggccagtttctaccacgcgacgctactcaagcatgaaaacctgggcagtgcgctgagctatatgctggcgaacaaactcgcatctccgattatgcctgccatcgccatccgtgaagtggtggaagaggcctacgccgccgacccggaaatgattgcctccgctgcctgtgatattcaggcggtacgcacccgcgacccggcggtagacaaatactcgacgccgcttctgtatctgaaaggcttccatgctctccaggcctaccgtatcggccactggttatggaatgaaggccgccgcgcgctggcgatattcctgcaaaatcaggtttctgtcaccttccaggtcgatattcacccggcggcgaaaattggacgcggcattatgctcgatcacgcgacggggattgtggtcggtgaaacggcggtaatcgaaaatgatgtctcgatcctgcaatcggtcacgcttggcgggaccgggaaaaccagcggcgatcgtcatcccaaaattcgtgaaggcgtgatgattggcgccggggcgaagatccttggcaatatcgaagtggggcgcggcgcgaagattggcgcgggctccgtggtcttgcagcctgtaccgccacacaccaccgcagcgggcgttccggcgcggattgtcggcaagcccgacagcgataagccgtcaatggatatggatcagcattttaacgggattcaccatacgttcgaatacggcgacggcatctga

SEQ ID NO: 72944 - DNA, 1020 bp, Citrobacter koseri
atgaaccaaagtaatgcttcaatgactgtgatcggtgctggctcgtacggcaccgctcttgccatcaccctggcgagaaacggccaccaggttgtcctgtggggccacgatcctaaacatgtcgcgacccttgagcgagaccgctgcaacgtcgcgttcctccctgatgtgccttttcccgatacgctacgccttgaaagcgacttagccaccgcgctggcggccagccgtaacattctggtggtggtgccaagccatgtctttggcgaggtgctgcgacagattaaaccgctgatgcgtcctgatgctcgcctggtctgggcgaccaaaggtctggaagcggaaacggggcgcctgttgcaggatgtcgcccgtgaagcgttgggcgatgacatcccgctggcggtgatatccggcccgacattcgctaaagaactggcggcgggtttgccgacggcaatttctctggcgtcgacggacgaaaccttcgcggatgatttgcaggaacttttgcactgcggtaagagttttcgcgtctacagcaaccccgatttcatcggcgtgcagttgggcggtgcggtgaaaaacgtgattgcgattggcgcaggcatgtctgacggcatcggttttggcgcaaacgcacgtaccgcgctgatcacgcgtgggctgacggagatgtcgcgtcttggcgcggcgctgggggccgatccgaccacctttatgggaatggcgggtctgggcgacctggttctgacctgtaccgacaaccagtcgcgtaaccgccgttttggcatgatgctcggtcagggcatggatgttcagggcgcgcaggacaaaattggtcaggtggttgaaggctaccgtaatacaaaagaagttcgtgagttggcgcaccgttttggtgtcgaaatgccaataaccgaggaaatttatcaagtattgtattgcggaaaaaacgcgcgcgaggcagcattgacgttattaggtcgtgcacgcaaggacgagcgtagtcgccactag

SEQ ID NO: 72945 - DNA, 468 bp, Citrobacter koseri
atgtcagaacaaaataacaccgaaatggctttccagatccaacgtatctacaccaaggatgtgtctttcgaagcgccaaatgcgccgcatgttttccagaaagattggcagccagaggttaaacttgatcttgatacggcgtctactcaactggcagatgacgtatacgaagtggtactgcgtgttaccgtaacggcttccctgggcgaagagaccgctttcctgtgcgaagttcagcagggcggcattttctccatcagtggtattgaaggaactcagatggcgcattgcctgggtgcatactgcccgaacattctgttcccgtatgcccgcgaatgcatcaccagcctggtttcacgcggcacgttcccgcaactgaatcttgcgccggttaacttcgatgcgctgttcatgaactatttacagcagcaggctggcgaaggtactgaagaacatcaggatgcctga

SEQ ID NO: 72946 - DNA, 252 bp, Citrobacter koseri
atggccaacatcgagatctacaccaaagcaacctgcccgttttgccatcgtgcaaaagcgctgttgagcagtaagggtgtgagtttccaggaacttccgattgacggcgatgccgtaaaacgtgaagagatgatcaagcgtagtggccgcacgacggttccgcagatttttattgatgcacagcacattggcggctgtgacgacttgtatgcgttggatgcgcgtggtggactggatcccctgctgcgttaa

SEQ ID NO: 72947 - DNA, 432 bp, Citrobacter koseri
atgcaagaaattatgcaatttgttggccgccatcccatactgagtatcgcctggattgcgttactggtggcggtgttgttcaccactttcaaaggcctgatgtctaaagttaaggttattactcgcggcgaagcgacgcgtcttatcaacaaagaagacgccgttgtggtggatttacgtcagcgtgacgacttccgcaaaggccatatcgcgggcgcgactaacctgctgccgagcgaaatcaaggccaacaacgttggcgagcttgaaaagcacaaagataagcctctgatcgtggttgatggttccggtatgcagtgtcaggaatccgcaaacgcactgatcaaagcgggctttgagaaagtttttgtgctgaaagaaggcgttgcgggctggagcggtgagaacctgccattagtgcgcgggaaataa

SEQ ID NO: 72948 - DNA, 1545 bp, Citrobacter koseri
atgtcggtttctaaaaaacctatggtactggtgattctggatggctatggctaccgtgaagacagccaggataacgccattttgaatgccaaaaccccggtaatggatgctctgtgggcaaaacgtccgcataccctgatcgacgcttccggtctggaagtgggtctgccggaccgtcagatgggcaactccgaagtgggtcacgttaacctgggcgcgggccgtatcgtgtatcaggatctgacgcgcctggatgttgaaattaaagaacgtaccttcttcgctaacccggtactgacggcggcggtcgatcaggcgaaaaataccggtaaagccgtgcacattatgggtctgctgtctgcgggcggcgtgcacagccacgaagatcacatcatggcgatggtcgaactggccgcagaacgcggcgcagagaaaatttatctgcacgccttccttgatggccgcgataccccgccacgcagcgcggaatcctcgctgaaaaaattcgaagacaagtttgccgcgctgggcaaaggccgcgtagcgtccattattggtcgttactatgcaatggaccgcgacaaccgctgggatcgcgttgagcaggcctatgacctgatgacgctagcgcagggtgaattccaggccgataccgccgttgctggcctgctggccgcttacgcgcgtgacgaaaacgacgaattcgtgaaagcgaccgtcattcgcgcggaaggtcaggccgatgccgcgatggaagacggcgacacgctgattttcatgaacttccgtgctgaccgcgcccgcgaaattacccgcgcgttcgttaatgctgatttcgacggcttcgcccgtaagaaagtggttaatctgaacttcaccatgctgaccgagtacgccgctgatatcaaaactgccgtggcttacccaccggcatcgctggcaaacaccttcggcgagtggatggcgaagaacgacaaaacccaactgcgcatttccgaaacggaaaaatacgcccacgtcaccttcttcttcaacggcggcgtagaagaaccgtttgcaggcgaagaacgcatcctgatcaactcgcctaaagtggcgacctacgatctacagccggaaatgagttccgcagaactgaccgaaaaactggttgcggctatcgggagcggtaaatacgacaccatcatttgtaactacccgaacggcgatatggtcggccacactggcgtgatggaagcagcggttaaagcggttgaagcgctggatcactgcgttgagcaggttgctaaagcggttgagtccgttggtggccaactgctgatcaccgcagaccacggcaacgccgagcagatgcgcgatccatccaccggccaggcgcacaccgcgcataccaacctgccggttccgctgatttatgtcggcgcgaaaagcgtaaaagcggtcgaaggcggcaaactttctgatatcgcaccgacgatgttgacgctgatgggtatggaaatcccgaaagagatgactggtaagccgctgttcatcgtggaataa

SEQ ID NO: 72949 - DNA, 1218 bp, Citrobacter koseri
atgatttacgccagcgtgttgagcgctggcgtattgttgtgcgccttttccgcccatgcggatgaccgcgatcagctcaaatccatccaggcggatatcgccgccaaagagcgtgccgtacgccagcaacagcagcaacgttccagtttgctcgcacagctcaaaacgcaggaagaggccatctccgccgccgcgcgtaaactgcgtgaaacccagaatacccttgcccagttgaataagcagatcgacgcgatgaacgcgtctatcgcgaagctggaacaacaaaaagccattcaggaacgcagccttgccgcacagctggatgcggcgtttcgccagggcgagcatacggggattcagctcattcttagcggtgaagagagccagcgcgggcagcgtttgcaggcctatttcggttatctgaaccaggcgcgccaggacaccattgccgaactgaaacagacgcgtgaagaggtggcgtctcagaaagcggcgctggaagagaaacagagccagcaacagacgctgctgtatgaacaacgcgcccaacaggcgaagctggagcaggcgcgtaatgagcgtcagaaaacgatcgccggtcttgagtcgtcaatccagcaggggcaacagcagttaagtgaattgcgagcgaacgaatcccgcctgcgcaacagcatcgcgcgcgcagaggcggccgccaaagcccgggcggagcgagaagcccgcgaagcgcaggcggtgcgcaatcgtcagcaggaagccacccgcaaaggcacaacctacaaaccaaccgaaagcgaaaaatcgttgatgtcccgtaccggcggtctgggttcaccgcgcggtcaggcattctggcccgttcgcggcccaacgctgcatcgttatggcgaacagctgcaaggtgagctacgttggaaagggatggttatcggtgcgtctgaaggcactgaagtcaaagcaattgcggacggtagggtgattctggcggactggttgcagggctacggtctggtcgtcgtcgtggaacacggtaaaggcgatatgagcctttacgggtataaccagagcgcactggtcagcgttggcacacaggttcgcgcaggccagcctattgcgcttgtaggcagcagcggcggtcagggccgaccgtcactctatttcgaaattcgtcgccagggtcaggccgtcaatccacagccgtggttgggaagataa

SEQ ID NO: 72950 - DNA, 966 bp, Citrobacter koseri
ttgcctcactttcgtcgcacaatactctcactcgccagcctgctggcattcgcctcccctgtttttgctggcaaactcgccatcgtaatcgacgattttggttatcgtccgcacaatgaaaatcaggtgctggcgatgccgtccgccctctccgttgccgtcctgcccaatgccccacatgctcgtgaaatggcaaccaaagcgcacaacagcgggcatgaggtgctgatccatctgccgatggcgccgctgagcaaacagccgctggagaaagatacgctgcgcccggagatgagcagcgacgaaattgaacgcattattcgcgatgcggtgaataaggtgccgtatgccgtgggtctcaacaaccacatgggcagcgcgatgacctccagcctgtttggcatgcaaaaagtgatgcaggcgctggagcgttataatctttacttcctcgacagcatgaccattggcaacagtcaggcgatgcgtgccgcctccgggacgagcgtgaaggtgattaagcgcaaagtgttccttgatgatacgcagaacgaagcggatattcgtcgccagtttaatcgcgccattgagttagcccgtcgcaacgggtccgctatcgcaattgggcacccgcatccatcaacggtgcgagtccttcagcagatggtctataacctgcctgcggatattacgctggtgcgtccgagcagcctgctcaacgagccgcagacagatacctctacgccaaatctgacgccgccgaaaaacggtacgccggattcgccgcgaaatccgttccgcggcgtgaaggtgtgtaaatcgaagaaaccgttagaacctgtctacgccagccggttctttagcgtgttaagcgaaagcattacgcagagcacgatggtgaactacttccggcatcagtggcaaggctggggcaagatcgctgccccccagaacgctaacgcggattaa

SEQ ID NO: 72951 - DNA, 963 bp, Citrobacter koseri
atggaatctttgattgcacaaacatggaatgcgctggagatcatcattgttaacgacgggtctaccgacaactccgttgatatcgcaaggtattttgccgatacccattcacatgttcacctgttgcatcaggataatgcaggcgcgtccgtggcccgcaaccgggggttggccgcggcgaccggcgactacgttgcttttgtcgatgccgatgatttggtgtatccgaacatgtatgaaacgctgatgaccatggcgctacaggatgacctggatgtggcgcagtgtaatgcagactggtgcattcttgagacggggcatacctggccatccatccccacggatcgcattcggtcgacaggggtattaaccggcccggactggctgcgtatggggctggcttcacgccgctggacgcatgttgtctggatgggcgtttatcggcgcgcccttattgaaaaacacgcgattagctttgttccaggattacatcatcaggatattctgtggaccacagaagtgatgttcaatgccacgcgcgtacgctataccgaacaggcgttgtataaatattttcttcacgatcagtctgttagccgcctgaaacgacaaggtgagcgtaatctgcattaccagcgacactacattaaaatcacgcgtttattagaaaagttgaatagtgattatgcggatcgcattcccgtctatcctgaatttaagcaacaaattacctgggaagcgctgcgggtgtgtcatgcggtgcgtaaggagcaggacacgcttattcgccagcggatgatcgccgaaatatttgcctccggcatgtataagcgcatgatgcttaacatacgaagcgcgaaggcggcttatcaggcgctgttgtggtcgggtcggttataccggtggcgtgataaaacggcctcgcaccaccgcgttgcccgtaaagcgattaatccgcgttag

SEQ ID NO: 72952 - DNA, 687 bp, Citrobacter koseri
atgaccatcagtaagacacatgaaaagggctatacggtctattacaaagaggaaaataaagaccttaagtccctgatggataagtatatgaataacgaaatcagtggcaaaccgctgaacagcggcaacgaattccgcagcgtagaacttgttgaataccagtcacggaagttcatcatcaaaaacgatcgcgaaatagacccacgatttgagaaaaagattcagaattttctctccgggcctttttattctcagctgatccaaaaactggacagcctggcgccacaagtgcgtgcctgtaccgccgatctctactgtgtggccgagaaaacacgttttcgccagtgctatgatgtgtatacccttcatgaatatattgaaggggagccattaaatgatattaatgaaagcaataaaaaagatattaaggcgtgtattcagcaactgcaccgggcaggtctggcctccaatgatattcatgccggaaactttatccgcacaccttccggggaattgcgcatcatcgacttatcctgcaaaggaagtctgaaaatttgccaggcaaatgatattttagtattacaaaataaataccatatgaatattgaaggtcagggtctggtttataaacttattcagcttaaagagaaattcagacgcttatcccgcaagatgcgcggaaaataa

SEQ ID NO: 72953 - DNA, 1026 bp, Citrobacter koseri
atgaaagcgttatccaaactgaaagcggaagagggcatctggatgactgacgttccggtaccggaagtcgggcataacgatctgctgattaaaatccgtaaaacagccatctgcggcactgacgttcacatctataactgggatgaatggtcgcaaaaaaccatcccggttccgatggtggtagggcatgaatatgtcggcgaggtggtcggtatcggtcaggaagttaaaggcttcaggattggcgatcgcgtttccggcgaaggccatattacctgcggccattgtcgtaactgtcgcggtggccgtacgcatttgtgccgcaatactctgggtgtcggtgttaaccgtcccggttgttttgcggaatatctggtacttccggcgtttaacgcctttaagatcccggataatatctccgatgatttagcctctatcttcgaccccttcggcaatgccgtacacacggctctgtcgttcgatctggtcggtgaagatgtgctggtttccggtgccggcccgatcggcatcatggcggcggcggtagcgaaacatgtgggcgcgcgtcatgtcgtgatcacggatgtgaatgagtaccgtctggaactggcgcgtaaaatgggcatcatccacacggtgaacgttgcgaaagagaacctgaccgacgtgatggctaatctgggcatgaccgaaggatttgatgtcggcctggagatgtccggtgcgccgcctgcgtttcgcgccatgctggataccatgaaccacggcggtcgtatcgcgatgctggggattccgccttcggatatgtctatcgactggacgaaggtgatcttcaaagggctgtttattaaaggtatttacggtcgtgagatgtttgaaacctggtataagatggcggcgctgattcagtctggtctggatctgtctccgatcatcactcaccgtttctccatcgatgagttccagaaaggctttgatgcaatgcgttcaggccagtcaggaaaagtgattctgagctgggactga

SEQ ID NO: 72954 - DNA, 1197 bp, Citrobacter koseri
atgcgtggggatttttataagcagttaaccaacgatctggaaaccgcccgtgcggaaggattgtttaaagaagagcgcattatcacgtctgcgcagcaggcggacatcaccgtggcagacggaagccacgtcatcaacttttgcgccaacaactatctggggctggctaaccatcccgaactgattgcggcagcaaaagcgggaatggattctcacgggtttggcatggcttcagtgcgctttatctgcggcactcaggacagccataaacagctggagcaaaaactggcggacttcctcggtatggaagacgctattctgtactcttcctgcttcgacgccaacggcggcttgttcgaaaccctgctgggcgcagaagatgcgattatctcggatgcgttaaaccacgcctcgattattgatggcgttcgcctgtgtaaagcgaagcgttttcgctatgccaacaacgatatgcaggaactggaagcgcgtctgaaagaggcccgtgaagctggcgctcgtcatgtgctgatcgccaccgacggcgtgttctcgatggacggcgttatcgccaacctgaaaggcgtctgtgacctggcagacatttacggcgcgctggtgatggttgatgactcccatgctgtcggttttgtcggggagaacggtcgcggttctcacgaatactgtgacgtgatgggacgcgtggacatcattaccggtacgttaggcaaagcgctgggtggggcatctggcggttatacggcggcgcgtaaagaggtggtggagtggctgcgtcagcgttcccgtccgtatctgttctcgaattccctggcgcctgccattgtggcggcctcccttaaagtgctggagatggttgaggcggggagcgaactgcgcgatcgcctgtgggcgaatgcgcgtcagttccgtgagcaaatgtccgctacgggcttcacgctggctggcgccgatcacgctattattccagtgatgctgggtgatgcggtggttgcgcagcaatttgcccgcgaactgcaaaaagaggggatttacgtgaccggattcttctatccggttgttccgaaaggtcaggcgcgtattcgtacccagatgtctgcggcgcatacccctgagcaaatcacgcgtgcggttgaggcgttcacacgtattggtaaacaactgggcgttattgcctga

SEQ ID NO: 72955 - DNA, 933 bp, Citrobacter koseri
atgatcatcgttaccggcggcgcgggctttatcggcagcaacatcgttaagtccctgaatgataaaggcatcaccgatatcctggtggtggacaacctgaaagacggcaccaagttcgtcaacctggtggacctgaatattgctgactatatggataaggaagacttcctgatccagattatggccggagaagagttcggcgatatcgaagcggttttccacgaaggcgcctgctcttccaccaccgagtgggacggcaagtatatgatggacaacaactatcaatactccaaagagctgctgcactactgcctggaacgtgacattccgttcctgtatgcctcctctgcggcaacttacggcggtcgcacctctgacttcattgagtctcgtgaatatgagaaaccgctgaacgtttacggctactctaagttcctgttcgacgagtatgtgcgccagatcctgcctgaagccagctcgcagattgtgggtttccgctatttcaacgtttacggaccgcgtgaaggccataaaggcagcatggcgagcgtcgctttccatctgaatactcagctcaacaacggtgaaacgccgaaactgtttgaaggcagcgaaaacttcaaacgcgattttgtctacgtcggcgacgtggctgatgtaaatctgtggttctgggaaaacagcgtgtccggcatctttaacctgggcaccgggcgcgcggaatccttccaggccgtggcggatgccgcgctggcttatcacaagaaaagcgatcttgagtacattccgttcccggaaaaactgaaaggccgttaccaggcgttcacgcaggcggatctgaccaatctgcgcgccgcaggctatgacaaaccgttcaagaccgttgccgaaggcgtaacggagtatatggcctggctgaatcgcgacgcgtaa

SEQ ID NO: 72956 - DNA, 1047 bp, Citrobacter koseri
atgaaaatactggtgattggtccgtcctgggtaggcgacatgatgatgtcgcaaagtctctatcgcacgctcaaggcgcgctatccccaggcgataatcgacgtgatggcgcccgcgtggtgccgcccgttattgtcgcgtatgccggaggtcaacgacgcgatccccatgccgcttggccacggggcgctggaaattggcgagcggcgcaagctcggtcatcgtctgcgtgaaaagcgctatgaccgcgcctatgttctgccgaattcgtttaaatccgcactcgttcctttctttgccggcattccgcatcgcaccggctggcgcggcgagatgcgctacggcctgctcaacgacgcacgcgtgttagataaagaggcctggccattaatggtggaacgctatgtggcgctggcctacgacaaaggcgttatgcgtactgcccaggatctgccgcagcctctgttatggccgcagctacaggtgagcgagggcgaaaagtccctcatctgcaacgaattttctctttctgctgaacgtccgatgatcggtttttgccccggcgcggaatttggcccggcgaaacgctggccgcattatcactatgcggaactggcaaagcagctcatcgatgaaggccaccagatcgtcttgtttggctcagcaaaagatcatgacgccgggaatgaaattctggctacactgaatactgagcagcaggcctggtgccgcaatctggcgggagaaacgcagctggaacaagctgttatccttctatccgcctgcaaagccgttgtcacgaatgactctggtttaatgcatgtcgccgctgcgctgaaccgtccgctggtcgcgctgtacggccccagcagcccggactttactcccccactttcgcataaagcgcgggttatccgtctgattacgggttatcacaaggtgcgcaaaggggatgctgcggaggggtatcatcagagcctgattgacatcacgccgacgcgtgtcctggaagaactcaatagtctgttattacaagaggaagcctga

SEQ ID NO: 72957 - DNA, 969 bp, Citrobacter koseri
atgcgggttctgatagtcaaaacatcatcaatgggggatgtgttacacacattgcccgcactgactgacgcacagcaagtcatcccgggtattcagtttgattgggtggtagaagaaggattcgcgcaaattccatcctggcacgatgctgtcgatcgcgtgattcccgtcgctattcgccgttggcgtaaggcctggttttccgcgcccatcaaagctgaacgtaaagcctttcgcgatgccgtacaggcacagcaatacgatgcgattattgatgcccaggggctggtaaaaagcgcggcgctggtcacaagactgggacgcggcgtaaagcacggcatggactggagtacggcccgggagcccctggccagcctgttttacaaccgaaagcatcacatcgctaaagcgcagcatgccgttgaacgcacccgcgagctgttcgccaaaagcctggggtacagcaagccacagtcccagggcgattatgcgattgcgcaacatttcctgagcaatctgaatgcagacgcagggcaatatgcggtatttttacacgcgactacccgagacgataagcactggccggaagcaaactggcgagatctgatcggccaactgcgtgatgcgggtgtacgcattaagctgccctggggtgcgccccatgaagaagcacgggcaaaaagattagcggaaggatttgattatgtggatgttttaccacgaatgagtctggaagaggtcgcacgcgagttggcgggggcaaaatttgtagtgtccgttgataccgggcttagccatttaaccgccgcccttgatcgacctaatatcacgctgtatggcccgaccgatccgggactgattgggggatatgggaagaatcagtgcgcgcaaaagagtcattcagggaagatgtcaactctgagtgcggatgccgtcaaagtatcattgcttgattttaatttgctataa

SEQ ID NO: 72958 - DNA, 1284 bp, Citrobacter koseri
atgcttcgtggacacacgttttctcgctttatccgcagcacgcaaaataatccgtttaacgttatctattttttattttatgccgggtgcctgacgaccctggcgatgctgctgatcaatccagacgaagctttaaaagtttttattgcatgtgcggttctgtcgctaccgattatcggtaaacacagcaagtcacttctgagtgataagaaaaacctgctgttacccgtgatgctgctgctcttcggtttagtacaaattatttgggttgagatctttaaagaaccgggctcatcctttactggcgcttatcgctcataccagaatggcggtaaagtgatgatctttgccgcactgattgtcacagccctgcaatcgccaatcgcatgtgcgatgaaagatcgtataacccactactgggtgattgcgacggctgttggtttgtatctttttgcgggttatcaactcctcacctcaccagatccgcttaactaccgtgtcgaactgggttttgaacatccgacaggagcggcttatgcgttgacgtttgtcgcattgctcgcgtcacaggccatcatcaacttgcggctgaagcatacaatcctgctctatttattacactttttggtatcactggcggttatcactataacgcaaacccgcgccgccattctggtctatccggttctgagcatagggctatttttcttacactatcggcataaccgtaccgttttgctgcgtacgttactggcctttattgttctcgcggggctggcggcaatccctttaaaatcggtgattgaaaagcgctataacagcttcgtaaccgatatgcattcttacagtaagaataacagtaatacctcgattggcgcccgactcgcgatgcaaagagcgggtattgatgctggaaaaaaccactactggggccaatcacttgaacaacgcgatgctggaatgcgggattttgcccgacaggatacctcgttaagaggagcacttgggttcgtcgacatccatttgcataacgaattcattgatactttttctcttaaagggatttctggcgtcatcgctctgctctttttgtatctggcgatgtttttaaaagcttatacacaacgtagccctctgttattcatcatttccagtgctatagttatctatggtttaagcgacttattattatacgccaaaggtgaaactctgagcagtatgctggcattatgcgcggcgatgatgctgacaccaggcacgatgagagagttatgccatgattaa

SEQ ID NO: 72959 - DNA, 1014 bp, Citrobacter koseri
atgattaacgcttcagattatttgctgagcattattataccggcatacaacaatgccgaattcattacggatacgctggcgtctttacatcagggcatcactaatgaggtagaagtaatcattattaatgatggctcaacggatttgactgaagaacgcataaatgcgttttatcgcgaacatcattgcaacaacgtgaaatacatctaccaggaaaatcatggtgttgcgattacccgcaacgtcgggctttcacatgcgacagggaagtatattggctttgttgacagcgatgacattattagcccggattatttttcggttcttctccctaaattaagagaagagaaatatgatatcgttgaattcaacttaacccgtgacattaataatctctatcaatgccaaaaagataagccggatgcagtaaaacagagtgaaatcacgttaacggatgaaaatttaacgcagttattacccactttccgtgcgggtcaatggcaccttgtaacaaaattctttcgccgtgacattattgggcaagaccgctttgaagaacatcatcgttatgaggacattattttttgtccatttcaatactttaaatgccataagatcttaaaaatagataacaagctatattattatcgaataaacgatcggagcattaccgagaatattcttgaaaatgatgcacaatatattttcttcgccatgcgtaaaatgtgtgactatataaaagaaaatgatgaaaaacgaactgtagccacattaatgatcattaactgcttccttgaaggacgcaagttgctgcgcaagaagaaaggttattatcgctacgaagaagatatgatcagtgacattcaagatgcactgacatgctgtgatacaagcatcgttaaaagaaaagttatttataaaatgaagtacccacacattgatcgttttatttcaaaaatacgatttaaagccataaacgcttgcaaaatgttatttgttagcaaggaaagttaa

SEQ ID NO: 72960 - DNA, 1056 bp, Citrobacter koseri
atgtttgataaagtagaaagaattcttatttgcaagcttaagttttatggcgatgttctgctcattacccctgttattgccagtctccaggcacgttatccgcacgcaaaaattgatcttcttctttataaagacaccagggcaattttagctgctgatgagagaatcaacaacttttaccttattgaaaaaaagaaaggtctgctggaaaccattaaaaattatatatcggtacgccgccagctgaaaaaaaaccactatgaccttattgtcaacttaaccgagcaatggcctattggcgcacttatcgcttccctacgccgcccctctattgcctttaaaagggacaagaagcagtggaattgcctttttacaaaggtcacaccaacaaccggaactcatattgttgagcaaaacttatccattctaaaaggcctcgactttagtgaaagcgagctcaaaaaagagatgttgctctgctatcgcgagagtgactatcaatatttactgactcagcttcccgcgcttcccacgcaaaaatacgttgtgattcaacccactgcaagacagtcgtttaagtgctgggatgacgagaaatttgcacatgtcatagattatttgcagcaacgcggtctgcatgtttacctgacctgtgggcccgcagtacaagaacagcagcaggtagcgcgtatcgccggactgtgtcaatcaccaccagacctgacggtggcaggtaaaacgaccttcctgcaactggcggcgttaatcgatcatgcagtactgtatatcggcgtggactccgcccccatgcatatggctgccgcattaggtacgccgcaggtatgtttgtttggcgccacaaattatcaacagtggaaaccctggtcagataaagctgcgctgatctgggcaggcgattatcatccaatgccgacccgggcagaactggacagatcccggaaatacctgacctggataccagaacacgcagttattgacgctatcgacactgtgctccatgatagcaacccagttgaaggaaatgagacagcgtaa

SEQ ID NO: 72961 - DNA, 945 bp, Citrobacter koseri
atggataacaaaactaacgtaattaatattgcctactgcacagatgctaattatctggagtatgttgccgtatccattatgtctgtcataatgaataaccctgagcaatctctcgcattttttgtctttgtctatgatgtcagcgatgaagatattgcgaagctacagtcgaccagtaataaaattcaggttatcacgatcgataaggctgatattgaaaaatataacaatgattttgcgataaaacatctcaaccgctcaacttatatgcgtctggctgtgccccgtttacttaaagacaaagtagcacgttttatctatcttgatgccgatacgctatgctttgactcactcagtgagattaacagcgttgatattgatgatgttgtttgcgccgtcagccatgactctctcaacattcatgataataaacacgcccggcgattagggctgagcatcgatcactattttaacgctggtttcctctatattaatgtcgcgaactggattaagcatgacattgaacataaggcaaataccgtgttatttgagcaaggaaaatcattgccttactttgatcaggacgcactcaacattgcaatgaacggcaatattacgtttattgataaccgctggaatttcctgtttaactggtttactgacgaacagaaagaaaatttcttctatcacagtgacacgctgccaagaatcattcattttacgggcggaagaaagccgtggtataaagaacatacggggctgtcgcaacagctttatgttttctaccaccatttcacgccctggcggaatgcagagttacgctcttatgcccctcgtatgaggcctaccgattatcgggtgtactcccgtcaggcggcaaaaaaaggtaattattttaccgccataaaatggtacgcaaagtacctcaaaaccaagattcattaa

SEQ ID NO: 72962 - DNA, 993 bp, Citrobacter koseri
atgatttttgattgccatcagtctataaaaaagatacttgattttaatcaagcaccagccggggagagtccacagctcaatatcgcctggggtgttgataaaaacttcatgtttggcgccgcgatttcgatgacatcagtgttgatacataataaagacatcaatatccatttccatctttttactgattatgtggatgatgattatcaacagaaaataagtatgctggcgcagcaattctctactaacatctcaatatatgttatggatgccgaggggctaaaggtattgcccagcggtaatgcctggtctcatgcgatgtatttccgctttatcgcatttgaatatttaggcgaaaaagttgattcactcctgtacattgatgcagacgtgatatgtaaaggctcacttgttgaattgagtcatctcaaccttgatgagcatgttgctgcggtagtaagggacgtcgatgatagtcctgccagagatattgagaaaaatagtgattattttaactctggtgtgatctatgcgaatcttaaaaagtggaaagagcagaactttattggtgctgcatttgatatcctcctggataaaaatcagaaactctctttccccgatcaggatgttttaaatattcttttcttaaataaagtgatctttttaccgcgtatctacaatgcgatatatggtataaaacaagagttaaaaagcaaagatatatcacgctataaagaatatataacggcagataccattcttattcactatattggggtaactaaaccctggaattcctgggcaaattatccgtctgcacagtattttgtggaggcatggaaggcttcaccatgggcgaatgtgccgttgttgcctgccagaacgccaaagcagtataagaagaagtcacgtcatgaaaggctacagggtaaatatattgcttcaattatcagctacataggctatctggccgaaaaaatcaaaggtaagtaa

SEQ ID NO: 72963 - DNA, 1020 bp, Citrobacter koseri
atgaacattgattttgaaaacgtaataattcaaaaaaaggttatcgacaacgctacacaccagaaaagcaaaaagctgaatattgcatatggtgtagatcgaaattttttatttggctctggaatttcaatgacatcagtgttggtgaacaaccctgatattgatatccatttctatgttgtgacggactatgttgatgatgagtacctggaaagcgtggaacgactcacgcaaatgtatggtacaacggtaacggtcttagttttcgataatgaggcgtttcgcaagttgccgagtactaaagcatggacctatgcgatgtactatcgctattttgcgttcgagtatttaagtcgtgaactggattctgtgctgtatctggatgccgatatcgtttgtaaaaattcgctgcgggaactgacggatattcattttgccggagaatatgcggctgttgttaatgatattgatcgagtacgtttaaaatccgggcagagactgggtattcctgagttagctcgtgactattttaattcaggggtggtattcgctaatctccatgtctggagagaaaaaaaactgttatccaaagcctttgaagttttgcatgagcgtcagaaagaactgctttattttgaccaggatatcctgaatatcttatttgttgggcatgtgatcctactgaggcgtgattttaattgtatttatggcgtagaccaggaactgaagaataaaaatgaatatcgttatcaggactttatcactgagagtacggtattaattcattatgtcggcgtgacaaaaccgtggcatacgtgggctaactatccggtttctaagtactttattgaggcttataaaaaatcggcatgggccgaaaaatcgttactcaatgcaaatacggcaaaattatataagcgtaagtcacgccatgaaaggatacagcgaaaatatattcgttctatatttagccatataatgtatattaaaaataagctacacggcgctaaagtgcattga

SEQ ID NO: 72964 - DNA, 798 bp, Citrobacter koseri
atgattgaattaaaagagccattcgctacgcagtggcaaggtaaagatccgtttgtcgaagtaacgaaactggacggagaggttttccgcgctctggagacccggaggacgctgcgttttgagatgatgggtaaagggtatttcctgaaataccatcacggaaccacgctgaaagaagtgctaaaaaacctcatttccttgcgtatgcccgttcttggcgcggatcgcgagtggctggctattcaccgtctgcaatcactgaatgttgataccatgaccggcgtcgcgtttgggcaaaaagggtttaatccgttgcagcggacatcgtttatcatcacggaagatctctcgccggcaataagccttgaagacttttgcgccaggtggagtgaagaacgtcctgacctcaccttaaaacgaaccattatcacccgactggcggagatggtggggaaaatgcatcgtggtggggtgaatcatcgggattgttatatttgccattttttactacagcaaccattaccggctgatgtggctgatataaaactttccgtgattgatctgcatcgcgcgcaaattcgtcgccgggtgccgcgtcgctggcgtgataaggatctgattggactctatttctcctcactcgaaattggcctgacctcgagagatatttatcgttttttacgcgtttatttctcgatgccactgcgtgaaattcttcgcaaggaagccagtttgcttgagcaagcggcggcgaaagcacaaaaaatcaaacaaagaacgataagaaaagcgttataa

SEQ ID NO: 72965 - DNA, 1125 bp, Citrobacter koseri
atgaccattgctttttgtttgtacaaatattttccctatggcgggttgcagcgtgatttcctgcgaatagcgcatacggttgcggcgcgtggccatcatgttcaggtattgactcagcagtggcagggcgaacgtccctccgaccttgaaattatccttgttccggtgactgccagaactaatcatggaaaaaatgaacagtattatcagtgggttcagagttacctgagccaacatcccgtcgatcgcgtcgttgggtttaataaaatgcccgggcttgatgtctattatgcggcagatgtgtgctacgcggaaaaagtcgcccgtgaaaagggtttcttttataagctgaccagtcgttataagcactatgcagcttttgaaaaagcgaccttccagcaaggtgctcataccgagcttttgatgttaacaaataagcaaatcggtgactttaagcatcattatcatactgaggatcgccgttttcatattttgccgccagggatatacccggacaggaaatacagccagcaacctgaaaacagcagacagattgtcagagaaaaaaatggcattgggttagatcagttcctgcttttgcaggtaggttcggattttaaacgcaaaggcgtaccaagaacgttactggcggtagcttctttacctgaagcaatacgtcaacgtacgcgattgatggttgtcgggcaagacaaggccgaccggtatcaggcccaggcgcgtcaactagggattgagaagcaggtgcagtttttttcagggcgcgatgatatttcagcgctgatgtctgctgctgatttgttgcttcatcctgccgttcaggaagcggccggaattgtattattagaggcgattgtcgccgggctacccgtgttgaccaccgaagtttgtggatatgcgcactatatcaatgctgcgcagtgtggcgttgttataccggagccttttgcacaggaagtcctgaatgcttccctctgcgatgcgctggagaaaggtgagcagcgaagtgaatgggcaagtcatgcaagacactttgccgatacagaagatctctacagtctggctgataaagcggctgatatcattttaggttttgagaatgattga

SEQ ID NO: 72966 - DNA, 1278 bp, Citrobacter koseri
atgctcgaattgctttacaccgcccttctctaccttattcagcccttgatctggatacggctttgggtgcgtggacgtaaagcgccagcctaccgtaaacgctggggcgaacgttacggtttttaccgtcatccgcttaaacctggcgggatcatgctgcattccgtttctgtgggtgaaacactggcggcaattcctttagttcgcgccctgcgacaccgttatcctgatttaccgattaccgtcaccaccatgacgcctaccggctcagagcgcgtacagtccgcattcggcagcgatgttcagcacgtctatcttccttatgatttgcccgatgcgctcaaccgtttcctgaataaagttgaccctaaactggtgttgattatggaaaccgagctctggccgaacctgattgccgcgctgcataaacgtcatattccgttggttatcgccaacgcgcgcctttccgcccggtcggctgctggctatacaaagctggggaaatttgttcgcagactgctgcggcgcattacgctaatcgcggcgcaaaatgaagaagatggcgcgcgttttatcgcgttgggtgcgaaaaataaccagctcaccgtcaccggcagtctgaaatttgatatttccgtgacgccacagcttgctgcaaaagcggttacgctgcgtcgccagtgggcaccgcaccgcccggtgtggatcgccaccagtacgcatgacggcgaagagagtattgttatcgccgctcatcaggcactgctgcatcaattccctaacctgttgctgattctggttcctcgccatccagagcggttcccggatgcgattaacctcgtgcgccaggcagggctaagctataccacgcgttcctcaggagaggtgccgtccgccagtactcaggttgttattggcgatacaatgggcgaattaatgctactgtatggtattgcggatctcgcatttgtcggcggttcgctggttgaacgcggaggacataacccgctggaagctgccgcacacgcgataccggtattgatgggccctcatacctttaacttcaaagatatttgcgcccgactggagcaagcaagcgggctgattaccgtaaccgatgccacaacgctggtaaaagaggtttcgtctttactgaccgacgcggattatcgtaatttctacggtcgacacgccgttgaagtgctgtaccaaaaccagggtgcgctacagcgtctgttacaactgctggaaccttacctgccaccgaaaacgcattga

SEQ ID NO: 72967 - DNA, 480 bp, Citrobacter koseri
atgcaaaaacgggcgatttacccaggaaccttcgatccgatcaccaacggccatattgatatcgtgacgcgcgcgacgcagatgttcgatcacgttatcctcgccattgccgccagccccagcaaaaaaccgatgtttacccttgaagagcgtgtagcgctggcgcaacaggcgacggcacacctcggcaacgtggaagtcatgggattcagtgacttaatggccaacttcgcgcgcattcagcaggccaatattttgattcgcggcctgcgcgccgtggctgattttgaatatgaaatgcagttggcgcacatgaatcgccatttaatgccgcagcttgaaagcgtcttcctgatgccttcaaaagagtggtcttttatctcttcttcgctggtaaaagaagtggcgcgccatcagggcgacgttacccacttcttaccggagaacgttcatcaggccttgatggataagctgaagtaa

SEQ ID NO: 72968 - DNA, 810 bp, Citrobacter koseri
atgcctgaattacctgaagttgaaaccagccgccgcggcattgaaccgcatctggttggggcaaccattctgcatgccaatgtgcgtaatggacgtctgcgctggccggtatcggaagagatctaccgcctgagcgataaacccgttctcagcgttcaacgccgcgcgaaatatttgctgctggagctaccggatggctggatcatcattcatctgggaatgtcgggcagtttgcgtatccttcctgaagaacttcccgctgaaaaacatgaccacgttgatctggtgatgagcaatggcaaagtcctgcgctacaccgatcctcgccgcttcggcgcctggctgtggacgaaagagctggaagggcataacgtgctggcgcatctcggcccggagccgctgagcgacgattttaacggggcttatttgcagcagaaatgtgcgaagaagaaaacggcaattaaaccctggctgatggataacaaactggtggtgggcgtgggaaatatctacgccagcgagtcgttgtttgcggcaggcatccatcctgaccgtctggcgtcgtcattatcgcaggctgagtgtgagctgctggcccgcgtgattaaggccgttttactgcgttccatcgagcagggggggacaacgttgaaagattttctgcaaagcgatggtaagccgggctattttgctcaggagttgcaggtttacggacgtaaaggggaaccgtgccgggtttgcggtacgccgatcgttgcggctaaacacgcgcaacgggcgacgttctactgccgtcagtgtcagaaataa

SEQ ID NO: 72969 - DNA, 168 bp, Citrobacter koseri
atggctaaaggtattcgtgagaaaatcaagctggtttcttctgctggtactggtcacttctataccaccacgaagaacaaacgtactaagccggaaaaactggaactgaaaaaattcgatccagttgtccgtcagcacgttatctacaaagaagcgaaaatcaaataa

SEQ ID NO: 72970 - DNA, 237 bp, Citrobacter koseri
atgtcccgagtctgccaagttactggcaagcgtccggtgaccggtaacaaccgttcccacgcactgaacgcgactaaacgccgtttcctgcctaacctgcactctcaccgtttctgggttgagagcgagaagcgttttgtcaccctgcgtgtatctgctaaaggtatgcgtgtaattgataagaaaggcatcgaaacagttctgtccgaactgcgtgcccgtggcgaaaagtactaa

SEQ ID NO: 72971 - DNA, 663 bp, Citrobacter koseri
atggatgcgccggaacgtttaatgccccgggaaaaaatgttgaagtcaggaattggttcgctgacggatgttgaactgctggcgctctttttacgtacaggagtgccaggaaaagatgtgatggctctggcgcatgaaacgctgcaacgcagtgggtcgctctatgggttgctgtctgcggatttcgcgcaatttcgcggtacaggtatcggtatcgctaagtatgcgcagcttaaggggattgccgaactggcaaggcgctattacaaggcgcgcatgatgaaggaaaacgcgttgttgagcccggaaatgacgcgtgagtttctgcaaagccagttggcgggggaagagcgggagatcttcctggtgatctttctggatgcccggcaccgggtgattaaacacagccgtcttttttccggcacgctgaatcatgtcgaggtgcatccgcgcgagattatccgcgaggcgataaaattaaatgcttctgcggtgatccttgcgcataatcacccctcggggtgtgcagaaccgagcaaagcggataaactcatcaccgaacgtgtcgtaaaatgttgtcagttcatggatatacgagtactggatcaccttgtgattgggcgcggagagtacgtttcttttgccgaacgtggttggatttag

SEQ ID NO: 72972 - DNA, 1224 bp, Citrobacter koseri
atgatgagcctggctggcaaaaaaatcgttctcggcgtgagcggcggcattgctgcctataaagcccctgaactggtgcgtcgtttacgcgaacgcggcgccgacgtccgcgtggcgatgaccgaagcggcaaaagcctttatcacgcccctgagcctacaggcggtgtcgggttatcccgtctctgacagtctgcttgaccctgccgcagaagccgcgatgggccatattgagctggggaaatgggcagatttagttatcctcgcgccagccacggcagatctgatcgctcgcgtcgctgccggtatggccaacgatctggtttcaacgatttgtctggcgacacccgccccgattgccgtgcttccggccatgaatcagcaaatgtatcgcgccgccgccacgcaacataatctggatgtactcgcgtcacgcggaatgcttatctgggggccggacagcggcagccaggcgtgtggagacgtggggccaggacgcatgctcgatccgttgaccattgtggatatggcggcagcgcatttctcccctgtcaacgatctgcaacatctcaacatcatgattacggcgggcccgacgcgcgagccgctcgatccggtgcgttatatctctaaccacagctccggtaagatgggatttgccattgccgccgccgccgcacgacgcggcgccaacgttacgctggtttccggccccgttgcgctgcccacgccaccttttgttcagcgcattgatgtgatgaccgcgctggaaatggaagcggcagtccaggctgcggttcagaagcagcatattttcatcggctgtgctgcggttgctgactaccgtgcagccgccgtcgccagcgaaaaaattaagaaacaggcgacgcagggcgatgaattaacagtaaaaatggtcaagaaccctgatattgtcgccggggtcgccgcactcaaagacaagcgaccttatgtcgttgggtttgccgcggaaacaaataatgtggaagaatacgcccggcaaaaacgtatccgcaaaaaccttgatctgatctgcgcgaacgatgtttcgctttcaactcaaggatttaatagcgacagcaacgcattacaccttttctggcaggatggagataaagccttaccgctcgaacggaaagcgctcctgggccaattattactcgacgagatcgtgacccgttatgatgaaaaaaatcgacgttaa

SEQ ID NO: 72973 - DNA, 459 bp, Citrobacter koseri
atgatgaaaaaaatcgacgttaagattctggacccgcgcgttgggcagcaatttccgcttccaacttatgccacctccggctccgccggacttgacctgcgcgcctgtctcgatgacgccgtagaactggcgcctggcgcaacaacgctggtgccgaccggtctggcgattcatattgccgatccgtctctggcggcggtaatgctgccacgttccggcctgggccataagcatggtattgtgctcggcaatctggtcggcctgatcgactctgactatcaggggcagttgatggtttccatctggaaccgtggccaggacagctttaccattgagccgggcgaacgtattgctcagatggttttcgtaccggttgtacaggccgaatttaatctggtggaagagttcgaagccaccgaccgtggtgaaggcggcttcggccattctggtcgcaagtaa

SEQ ID NO: 72974 - DNA, 597 bp, Citrobacter koseri
atggcagaaaaacaaactgcgaaaaggaatcgtcgcgaagaaatacttcagtctctggcgctgatgctggaatccagcgatggaagccaacgcatcacaacagcgaaactggcagcctccgtcggcgtttctgaagcggcgctgtatcgccattttcccagtaagactcgcatgttcgatagtctgattgagtttatcgaagacagtctgattacccgtatcaatctgatcttaaaagatgagaaagacaccagcgcgcgtctgcgtttaatcgtgttgttaattctgggcttcggcgaacgcaacccaggcctgacgcgtatcctcaccggtcatgcgttaatgtttgaacaagatcgcctgcaaggacggattaaccagctgtttgagcgcattgaagcgcagctgcgtcaggttctgcgggaaaaaagaatgcgcgaaggcgaagggtacgccacggatgaaaccctgctggcaagtcagttgctggcgttttgtgaagggatgttgtcccgctttgtacgcagcgagttcaaataccgcccaacggacgatttcgacgcccgctggccgttggttgccgcgcaattgcagtaa

SEQ ID NO: 72975 - DNA, 642 bp, Citrobacter koseri
atgaaaccgtatcagcgccagtttattgagtttgcgcttaacaagcaggtactaaagtttggcgaatttacgctgaaatccgggcgcaaaagcccctatttcttcaacgccgggctgtttaataccgggcgcgatctggctctgctgggacgtttttatgccgaagcgttggtggattcgggtatcgatttcgatctgctgtttggtccggcctataaaggtattccgattgcgacgaccaccgctgttgcactggcggaacaccatgacaaagacctgccgtactgctttaaccgtaaggaagccaaagaccacggtgaaggcggaagtctggtcgggagcccattacagggacgcgtgatgctggtggatgatgtgatcactgcgggtactgcgattcgtgaatcaatggagattatccaggcgaatggcgcaagtctggcgggggtgctgatttctttggatcgtcaggagcgtggccgtggcgagatttccgcaattcaggaagtggaacgcgattacgggtgtcaggtgatctcgattatcacgctgaaagacctgattgcgtatctggaagagaaaccagagatggcggagcatctggcggcagtgcgtgcgtatcgggaagcgtacggggtttaa

SEQ ID NO: 72976 - DNA, 717 bp, Citrobacter koseri
atgcgtccagcaggccgtagcgctaatcaggtgcgtcccgtaaccctgacccgtaactatacaaaacacgctgaaggctcggtgctggtcgaatttggagataccaaagtgctgtgcacggcatccatcgaagaaggcgtaccgcgctttttgaaagggcagggccaggggtggatcaccgcagaatatggcatgttgccacgcgctacgcatacccgtaacgcgcgtgaagcggcgaaaggcaagcagggcggccgcacgatggaaatccagcgtctgatcgcccgcgcgctgcgtgctgctgtcgatcttaaaacgcttggcgagtttactatcactctggattgcgatgtgatccaggcggacggcggtacgcgtactgcatctatctccggggcttgtgttgcgctggccgatgcgctgaacaagctggtcgcgaacggtaagctgaaaaccaacccgatgaaagggatggtggctgcggtttccgtcggcatcgtgaatggtgaagcgctctgcgatctggagtacgttgaagactccgcggctgaaaccgatatgaacgtggtaatgaccgaagacggtcgaattattgaagtgcagggaacggcagaaggcgagccgttcagtcacgaagaactccttaccttgttggcattagcccgagggggaatcgaatccattgtagcgacgcagaaagcggcgttagaaaattga

SEQ ID NO: 72977 - DNA, 864 bp, Citrobacter koseri
atgatccgcagtatgaccgcctacgcccggcgtgaaatcaagggtgaatggggtagcgctacctgggaaatgcgctcggtaaaccagcgttatctggaaacgtattttcgtctgccggaacagttccgtagccttgaaccagttgtacgcgaacgcattcgtacgcgcctgacgcgcggaaaaatcgaatgtactttacgctttgaacccgatgccagcgcgcaaggcgaactcattctgaatgagaagctggcaaagcagctcgttgcctccgcgaactgggtcaaaatgcagagcgatgaaggggaaatcaacccggtagatatcctgcgttggccgggcgtcatggccgcccaggaacaggatctggacgcgattgccgcagagatcctcgccgcgctggacgggacgctggatgacttcattgtcgcccgggaaaccgaagggcaggctttgaaagcgctgattgagcagcgtctggaaggcgtcagcgctgaggtagtgaaagtccgcgcccatatgccggaaatcctgcaatggcagcgcgaacgtctggtagcaaaactggaagacgcacaggtacaactggaaaataaccgtctggagcaagagctggtgctgatggcacagcgcattgacgtggcagaagagctggatcgtctggacgcgcacgtcaaagaaacctacaacatcctgaagaaaaaagaggcggttggccgtcgtctggactttatgatgcaggagttcaaccgcgagtcgaacacgctggcctccaaatccatcaatgctgatgtcaccaattcggcaattgagctgaaagtattgatcgagcaaatgcgcgagcagatccagaacatcgagtaa

SEQ ID NO: 72978 - DNA, 618 bp, Citrobacter koseri
atgctgttacacgttctctacttaattggcattactgccgaagccatgaccggggcgctcgctgcgggtcgacgccgcatggatacatttggcgtaattatcattgccaccgcgacagcaattggcggcggttccgttcgcgatattctgctcggtcactatccgctcggttgggtacagcaccctgagtacgtgattattgtcgcttctgctgcggttctgacgacgatcgtcgcccctgtaatgccttacctacgcaaactgttccttgtacttgatgcgctgggcttagtggtcttttctattatcggcgctcaggttgcgctggatatggggcatagcccggtcatcgctattgtggcggctgtcattaccggcgtatttggcggcgtattgcgtgacatgttctgcaaacgtattccgctggtcttccagaaagagctgtatgctggtgtttcctttgcgtctgccgtgttgtacatcgcgctacaacactacgtatccaaccaagacgtcgtggttatctccacgctggtttttggctttaccgctcgcttgctggcgctgcgtctcaaacttggcctgccggtgttttactatcgccacgaaggtcactaa

SEQ ID NO: 72979 - DNA, 1683 bp, Citrobacter koseri
atgagaagagggaaaagtatcgtgctgagtctgttgctgtggcatttcccggtatgggcggcttgccctgactggtcgccagccagagcgaatgacgaaatcgcccggctacagcagcagctcgcccagtggaacgacagttactggcagcagggggttagtgcggtagaagatagtgtctacgatcagctcagcgcgcaattggtgcaatggcaacgctgctttggcggtgataccggggcagaactggcgccgccagtgagcggctcattaccccatcctgttccgcatacgggtgtgcgaaagcttgcggacaaacaggcggtgcagcagtggatgcgtaagcgcagcgatttgtgggtgcaaccgaaagtggatggagtggcggttactctcgtataccgggatgggcgtctggtcagcgcgattagccgggggaacgggcttaaaggcgaggactggacgcagaaggtgcgtttaatacccgcagtaccgcaaagcacaaaaggcgcgcttgccaatagcacgttgcagggtgagatttttttgctgcgcgacaaccatattcagcggcagatgggaggaatgaatgcccgctcgaaggtcgccggaatgatgatgcgccagaataacacctcgtcgctccagtcgctgtctgttttcatctgggcatggcctgatggcccggcaacgatgcctgagcgcttgcgtcaactgtccggggcaggatttggctttgcacaacaatattctcaaccggtgaaaagcgctgatgatgttgaacgcgtgcgtacagcatggtggacaacgggattaccgttcgttaccgatggagtcgtggtaagaacgggtaaagaacctgaggccagacactggatgcccgggcagggcgactggctggttgcctggaagtatcttccggtcgcaaaagtagctgaagtcaccggggttcagttcgctgtcggcaagagtgggaaaatctcggttgtggcgtcgcttgcgccagtaatgctggatgataaacgggtgaagcgcgtaaatgtagggtctgtcaggcgttgggaggagtgggacattgcgccaggtgaccacattcttgtcagccttgccggacaggggattccgcgtattgataaggttgtctggcgtagcactcaacgggataagcccgcaccgccggggaatcgctataacgcattaacctgtttttatgcgactgaggtatgccaggagcagttcatcgccaggctggtctggctggggtcgaaggaggcgctggaggttgacgggatgggggaggcaggatggcgtgtgcttcaccaggcgcatcgtttcgagcatattttctcctggctcgcgttaacgcaggaacaactacaggcgacacctgggtttagtaaagaaaaaagcaagcagttgtggcatcagtttaacctggtgcggcatcggccatttatccgctgggtgatggcgatgggcataccgttaacgcaggcggcgcttaaggccagcggcgatcgttcatgggggcagctactggcacgcacggcaggatactggcaacagcttccgacgacaggggaggggcgcgccaggcgggtcatccagtggcgggataacccggaaatacgggcgctgggcaactggctggctgcccggcatattaacggctttagcccttag

SEQ ID NO: 72980 - DNA, 624 bp, Citrobacter koseri
atggctcaaggcacgctttatattgtttctgcccccagtggcgcgggtaaatccagcctgattcaggcgttattaaaaacccaaccgttgtatgacacccaggtttctgtttcacacaccacgcgcgcaccgcgtccgggtgaagtgcatggcgagcattatttctttgtcgatcatcatgagttcaaaaccatgattggcagagatgcgtttctggagcacgctgaagtgtttggtaactattacggcacatcgcgtgaaaccattgagcaagtgctggcaacgggtgtggatgtttttctggatatcgactggcagggcgcgcagcaaattcgtgagaagatgccgcaagcgcgcagtatctttattttaccgccgtccaaaattgagctggaccgccgccttcgcgggcgcggtcaggatagcgaagaagtaatcgcaaaacgtatggcgcaagctgttgcagaaatgagccattacgccgaatatgattaccttattgtgaatgatgatttcgacaccgccctgggcgatctgaaaaccattattcgcgccgaacgtctgcgcatgagccgccaaaagcagcgtcatgacgctttaatcagcaaactgttggcagactga

SEQ ID NO: 72981 - DNA, 276 bp, Citrobacter koseri
atggcacgcgtaactgttcaggacgctgtagagaaaattggtaaccgttttgacctggtactggtcgccgcgcgtcgcgctcgtcagatgcaggtaggcggcaaggatccgcttgtaccggaagaaaacgataaaactaccgtaatcgcgctgcgcgaaatcgaagaaggtctgatcaacaaccagatcctcgacgtccgtgagcgccaggaacagcaagagcaggaagccgctgaattacaagccgttaccgctattgctgaaggccgtcgttaa

SEQ ID NO: 72982 - DNA, 2112 bp, Citrobacter koseri
ttgtatctgtttgaaagcctgaatcaactgattcaaaactacctgcctgaagaccagataaaacgtcttcagcaggcgtatctcgttgcacgtgacgctcacgagggtcagacacgttcaagcggtgaaccctatatcacgcacccggttgcggtagcctgtattctggccgagatgaaactcgactatgaaacgctgatggctgcgctgctgcatgacgtgattgaagatactcctgcgacctaccaggacatggaacagctttttggtaaaagcgttgcagagctggtagaaggggtatccaagcttgataagcttaagttccgcgataagaaagaagcgcaggctgaaaactttcgcaagatgattatggcgatggtgcaggatatccgcgtcattctcatcaaacttgccgaccgcactcacaacatgcgcacgctgggctcattacgcccggataaacgtcgccgcatcgcccgtgaaacccttgagatctacagtccgctggcgcaccgtttaggtattcatcacattaaaaccgagctggaagagttgggttttgaagcgctgtacccaaaccgctatcgcgtgattaaagaagtggtaaaagccgctcgcggcaaccgcaaagagatgattcaaaaaatcctctctgagatcgaagggcgtttgcaggaagcaggcattccgtgtcgcgtgagcgggcgtgaaaagcatttgtactctatctactgcaaaatggtgctcaaagagcagcgttttcactccatcatggacatctacgcctttcgcgtgatcgtgcatgattccgatacctgctatcgcgtactcggccagatgcacagcctgtataagccgcgtccggggcgcgtaaaagactatatcgccattccaaaagcgaacggctatcagtctttacacacttcgatgatcggcccgcacggcgttccggttgaggtacagatccgtaccgaagacatggatcagatggcggaaatgggggttgcggcgcactgggcttataaagagcacggtgaaaccagcaccaccgcgcaaatccgcgcccagcgctggatgcaaagcctgctggagctgcaacagagcgccggtagctcgtttgaatttatcgagagcgttaaatccgatctcttcccggatgagatttacgttttcacaccggaagggcgcattgttgagctgcctgccggtgccacgccggtcgacttcgcctatgccgtacataccgatatcggtcatgcctgcgtaggcgcgcgcgtcgacaggcagccatacccgctgtcacagccgctcaccagcggtcagaccgtcgaaattattaccgcccctggcgcacgcccgaatgcggcatggcttaactttgtcgtcagctcaaaagctcgcgccaaaattcgccagttgctgaagaacctcaagcgtgatgattccgtcagcctggggcgccgtttgctcaaccatgccctcggcggcagccgtaaactggctgaaatcccgcaggagaacatccagcgcgaactggagcgtatgaagctcgcaacgctggacgatctgctggcggaaattggtctgggcaatgcgatgagcgtggtggtggcgaaaaatcttcagcaaggcgaagccgccgtacctgccacaacgcagtccaatcatgggcatttgccgattaaaggcgcggatggcgtgctgatcacctttgcgaagtgctgccgcccgattccaggcgacccgatcattgcgcacgtcagcccaggtaaagggttagttatccaccatgaatcctgtcgcaacatccgtggttaccagaaagagccagagaagtttatggctgtggaatgggacaaagagacggagcaggagttcatcaccgaaattaaggtggatatgtttaaccaccagggggcgctggccaacctgacggcggcaatcaacacgacgacctccaatattcagagtctgaatacggaagaaaaggatggtcgcgtctatagcgcctttattcgcctcaccgcgcgtgaccgtgttcatctggcgaatatcatgcgcaaaatccgcgtgatgccggacgtgataaaagtcacccgtaaccgaaactag

SEQ ID NO: 72983 - DNA, 690 bp, Citrobacter koseri
atgaacttacagcgttatgcgcgtatctgcgagatgctcgccaggcgtcagcctgatctgacggtctgcatggagcaggtccacaaacctcataatgtctcggcgatcattcgcaccgccgacgcagtaggcgtacacgaagttcacgccgtctggccgggcagccgtatgcgcaccatggcgtcggcggcagcgggcagcaatagctgggtacaggtgaaaacccaccgtaccatcggcgatgcggtcagccacttgaagggccggggcatgcaggttctggcgactcatctctctgataaagcggttgatttccgcgaaatcgattacacgcgcccaacctgcatcctgatggggcaggagaaaaccggcatcacccaggaagccttagacctggcggatcaggacatcatcatcccgatgatcggcatggtgcagtcacttaacgtttccgtcgcttccgctctgattctctacgaagcgcagcgccagcggcagaacgcaggcatgtacctgcgtgaaaacagcatgctgccggaagacgaacagcagcgcctgctgtttgagggcggctatccggtgctggcgaaagtcgccaagcgcaaaggtctaccctaccctcatgtaaacatgcagggtgagatcgaggccgacgccgcctggtggtccacgatgcaggcggcagggtaa

SEQ ID NO: 72984 - DNA, 2082 bp, Citrobacter koseri
atgaaaggccgtttgctggatgccatcccgctcaattccctgaccggcgttggcgcggcgcaaagcagcaaactggcgaaaattggcctgcacaccgtgcaggacctcctgttgcaccttcccctgcgttatgaagatcgcacccatctttacccgattggcgaactgctgccgggcatttacgccactgttgaaggcgaagtgctgaactgcaatatcaccttcggcggtcgcaggatgatgacctgccagattagcgacggctccggcattctcaccatgcgctttttcaacttcagcgcggcaatgaaaaacagcctggcgaccgggcggcgcgtactggcctatggtgaagccaaacgtgggaagtacggcgcggagatgattcaccctgaataccgcgtgcagggcgatctcagcacgccggagcttcaggaaacgctcacgcccgtttatccgaccaccgaaggcattaagcaagccacgctgcgtaagctcaccgaccaggcgctggacctgcttgatacctgcgccattgccgagcttctgccgcctgaacttgcgcaaggaatgatgagcctgccggaagccttgcgcacgctgcatcgcccaccaccgtcgctacagcttagcgatctggaaaccgggcagcatccggcgcagcgacgcctgattctggaagaactactggcgcataacctgagcatgctggcgctgcgtgccggcgcgcagcgttttcacgcccagccgcttagcgcgaacgattcactgaagaatcagctgctgaccgcattgccgttcaaaccaacgggtgcgcaggcgcgcgtagtggcggagatcgaacgtgacatggcgctcgatgtgccaatgatgcgtctggtgcagggcgacgtcggttccggtaaaacgctggtcgccgcactggctgcgctacgcgccattgcgcatggcaaacaggtggcattgatggcgccgacagaactgctggccgagcagcatgccagtaacttccgcaactggtttgcaccgcttggtattgaagtgggttggctggcaggtaaacagaaggggaaagcgcgcctggcgcagcaggaagccatcgccagcgggcaggtacagatggtggtcggcacccacgcgattttccaggagcaggtacaatttaacgggctggcgctggtgattatcgatgaacagcaccgcttcggcgtccatcaacgtctggcgctgtgggaaaaaggtcagcagcaggggttccacccgcatcagttaatcatgaccgcaacgccgatcccccgaaccctggcaatgaccgcctatgccgatctcgatacctccgtgattgatgagctaccgccgggtcgcacacctgtcactaccgtcgccatcccggacacccgtcgtagcgatattatcgatcgcgtccgcaatgcctgtacccaggaaggccgccaggcatactgggtctgtacgttgattgaagagtcagatttgttagaagcccaggctgcggaagcgacatgggaagagctcaggctcgccttaccggagttgaagattggtctggttcatgggcgaatgaaacccgcagagaagcaggcggtgatggcggcctttaagcagggtgagctgcacctgctggtcgcaacaacggtgattgaagtcggggtggatgtccccaacgccagcctgatgattatcgaaaacccggaacggttaggtctggcacaattacaccagttgcgtgggcgcgtgggccgtggcgcggtggcctcccattgcgtactgctctacaaatcaccgctctcgaaaaccgcgcagaagcgccttcaggtcttacgggacagcaacgacggctttgtgattgcgcaaaaggatttagagattcgcggccccggtgaactgctgggcacgcgtcagacgggtaacgccgagttcaaagtggcggatttgctgcgcgatcaggccattatcccggatgttcaacgcatcgcccgtcacattcacgaacattatccgcaacaggcaaccgccctgattgaacgctggatgcccgaaaccgagcgttattccaacgcctga

SEQ ID NO: 72985 - DNA, 1392 bp, Citrobacter koseri
atgtctgttaacaccgtcgagtcggcaaatgcgcaaccggttgcgcagacgcaaaacagcgaactgatttaccgtcttgaagatcgcccgccgctccctcaaaccctgtttgccgcctgtcagcacctgctggcaatgttcgtcgcggtcatcacgccagcgctgttaatctgccaggcgctcggtttaccggcacaagatactcaacacattatcagtatgtcgctgttcgcctccggtgtggcctcaattattcaaatcaaagcatgggggccggtcggttcagggttgttatctattcagggaaccagttttaacttcgtcgccccgctgattatgggcggcaccgcgctgaaaaccggcggagcggacgtccccaccatgatggcagcgctattcggcacgctgatgctggcaagctgcaccgagatggttctctcccgcatactgcatctggcgcgccgcattatcacaccgctggtctccggcgtggtggtgatgattatcggtctgtcgctgatccaggtgggtttaacatccattggcggcggctatgccgcaatgagcgacaacacctttggcgcgcccaaaaacctgatgctggcaggcgttgtactggcgctgatcatcctgcttaaccgccagcgcaacccctacctgcgcgtggcctcgctggtgatcgcgatggcggcgggctatctgctggcctggtttatgggaatgctgccggaaaataccacaccggcaacacaagacttaatcatggtgcccacgccgctgtactacggtctgggcattgactggaacctactgctgccgctgatgctggtctttatgatcacctcactggagaccatcggcgatatcaccgccacctccgatgtctccgagcagccggtctccgggccgctgtatatgaagcgcctgaaaggcggcgtgctggctaacggcctgaactcttttgtttccgccgtgttcaataccttccccaactcctgtttcgggcagaataacggcgtgattcagttgaccggcgtggccagccgctatgtcggctttgtggtagcgctgatgctgatcctgctcggcctgttcccggcggtaagcggctttgtgcagcacattcctgaaccggtgctcggcggcgccacgctggtgatgttcggcaccatcgccgcttccggcgtgcgtatcgtctcccgtgaaccgctgaaccgccgcgctatcctgattatcgcgctgtcgctggctgtcggcctgggcgtttctcagcagccgctgatcctgcaatttgcgccagactgggtgaaaaacctgctctcctccggcattgccgctgggggcatcaccgctatcgttctgaacctgattttcccgccagagaagccgtaa

SEQ ID NO: 72986 - DNA, 1710 bp, Citrobacter koseri
atgaaatttattggaaagctgattctctacatattgattgcccttttggtggtgatcttcggcctctattttctgctgcaaacccgctggggcgcggagcatgtaagcgcctggatatcagagaacagcgggtacagcctgacatttgatgtcatggatcaccgcttttccgcaccgtcccacgttttgcttgagaacgtcacgtttggccgggatggccagcccgccacgttagtcgcgaaaacggtggatatcggcctgagcagtcgccagataaccgatcccctgcacgtcgacgccatcctgttgcaggacggcacgctcaatatctccccgcagaccgcaccgcttcctgttcaggctgaccgcctgcaattacagaacatggcgcttaacagcccgggcggtgagtggaacctgagcgctcagcgcgttaacggcggcgtggttccctggcgtcccgaagcgggcaaggtattggggaataaggcacagatccagctcagcgctggttcactcacgctgaatgatgttcccgcgaccaacgtgctggttgaaggcagcattgataaggaacagataatcttaagcaacattggcgcagacattgcgcgcggtgccttaaccggcgtggcgcgacgcaacgcggacggcagttgggtggtggaaaatctgcgtctgaacgacatccggctacaaagcgataaatcgctgaccgacttttttgccccgctcaccgctatcccgtctctgcaaattggccgtcttgaagtgaccgatgcccgcctgcaaggcccggactgggcagtaaccgacctcgatctcagtttgcgcaacctgacgttcagcaaagatgactggcagacgcaagagggcaaactgtcgatgaatgccagcgagttcatctacggttctctgcatttcttcgatcccattctgaatgccgaattctcaccgcagggcattgcgctacgccagttcacgacccgctgggaaggcggtatggtcagaacatccggcaactggctgcgtaatggcaaagcgctaatcctcgacgatgccgccattgccgggctggaatacacgctgccggaaaactggaagcaacagtggatgaaacctctgccaggctggttaaacagcctgacgctgaaaaaattcagcgccagtcgcaacctggtgattgatatcgacccggctttcccgtggcagctcaccgcgctggatggttatggcgcgaatctgggactggtgcagaaccatcaatggggtatatggagcgggaacgcaacgcttaacgcggcagccgcgacgtttaaccgagtggacgtgcgtcgcccctccctggcgctggcggcaaacagcagcacagttaacatcaacgagctgagcgcatttacggagaaagggctgttagaagccacggccagcgtttcacaactcccccagcgccagacaaaagtcagcctgaacggacgcggcgtgccaatgaacgtattgcagcaatggggatggcctgcgctgcccatttccggcgacggcaacatccagcttaccgccagcggtaatatccaggcggacgccccactgaagccaacggtaaacggtcagttgcacgcggtaaacgccgataaacagcaggtgacgcaaataatgcgggcaggcgttgtgtcaggagcggaagtcacgcaaccacagcctgcgcaatag

SEQ ID NO: 72987 - DNA, 909 bp, Citrobacter koseri
atgttccggcttgaagatctcacgttgtttgttcgcgcggcggcgctaaacagttttagcgatgcggcgcgggaagccggggtacagcctgcccaggtcagttccgccatcaaacggctggagtctacgttaaacattcgcctgttcgcacgctcgacccgcagcttacggctgacgccggaaggcgaggtctggttgccttacgccaggcagatgcttgaggtgatgcacgccgggctgcaaaaaattcagacgccggaagatgagatctccggtacgctgcaaatcgccgtgccctccgatcttgggcgcaatttactgctcccggtattccagtcgtttcgccatcgccaccctgcgttgcgcctgcgggtgtttttctccgatcaggtcgccgatgtatttaaagatccggttgatgtcgcgttccgttacggcaatacggaagatgcttcttacatcgcgctgcccgtctcccccgataaccggcgtgtgctggtggcttcgccggactgggtcgcgcaacacggcgatccacgtcatcccgatgatttagcgaatctgaatgcgttaacgttcgtcttgcgcggacgcctgcatgaccgctggacgttcatccgcaacggtgacgtcagcagcgtacaggtcaacggcaccatgatgagcgatgatgctgaagttatccggcggctggctatcgccggagaggggatggcgtataaatcctggcttgatgtctctgaagatgtgcgtgacgggcgattgcagcgcctgatgccagattatcagggagagaaagtcccgctgagcatgatctgcccgcaccgcaaacagctttcgacggcagtccgcctgctgcacgaagcggtaaaagcgcgctgcgaaaggctggaactccccccgatgtga

SEQ ID NO: 72988 - DNA, 1008 bp, Citrobacter koseri
atgaaagccatcgcaattacccgcgccacgccagaaggcagcaatattgagtttttacaggacattgacctccctgttccggtcgccgccggacatgacctgctggttgaggtgaaagccatctccgttaacccggtcgataccaaagtacgcgcgggttttaacgcagagaccccgcgcgtgctgggctgggatgccacaggcgtagtgaaatcagtcggcgaggcggtgacattgttcgcaccgggggatgaagtctggtatgccggcgcgttgggccgtccgggaagcaacagcgagttccagcttgttgatgagcgcatcgtcgcgttgaaacccaaaacgctggataatgccgccgcagcagcgctgccgctgacctcgatcaccgcatgggaaatgttgtttgaccgcctcggcgttgaagaaggcggcaacgaaggggataccttgctgattgtcggcgccgcaggcggcgtgggctccatcctgacgcagctggcccgcaaactcacccgactgacggtgatcggcaccgcgtcgcgcccggaaagtcagaaatgggtacgcgaagccggtgcgcatcatgtcatcgaccatagcaaaccgctgacggaagagctggcgcgaatcggcatcaacgcggtgacgcacgtcgccagcctgacccacactgataagcattacccgcagctcatcgaagccctggcaccgcagggtaagctggcgctgatagacgatccagcaacgctcgacgcacgaccgctgaaaacaaagagtatttcgctgcactgggagtttatgtttacccgctcaatgtttgaaaccgacgacatgctcgcccagcatcagctactgacccgcgtggcacagctcattgatgctaaggtgattcacaccacgctgggcgagcattacggagccatcaacgcggcgaatattcagaaagcgcacgcacagcttgaaacgggccgctccgtcggcaagattgtgctggaaggcttctga

SEQ ID NO: 72989 - DNA, 1089 bp, Citrobacter koseri
atgatcaaaacgctgcacatcgaaaactaccgctcgattcgccatcagtctctggaactggaacagctcaatatcgtcttcggccctaacggcaccggaaagtcgaatatctataaggcgattcacctgatgcacagtgcggcgcaggggcagttctcacaggcgctggcgaacgaaggcggtattttgaaggtattctgggccgggaaaacgcgcagcgaccagttgcggcgcatgactctggcggtagaaacagaaacctatgaatacgagttacaggtagggtttgtcgagaaactcccctacccgtcgcagttcgatctcgacccggtcatcaaagaggagtctgtctggttgagcgggcacgctcgccgcccctcctcacagttgatgaaacgtaaaaaccaggtcgtattcctcaataatatccatcacgagaaagtcacccacagcggcacgctgtatgagaacgagtcggtattcggccagttgggagagccacacctctacccggaggtatcgcagatgcgagaaatgctgcgcaactggcgcttttatcatgagttttcagtctcgtctggttctgcgattcgtgttccgcaggtgggattccgctcaccggttctggccagcgacggagcaaacctggcggcagcgttccagacaatcgtcgagattggcgatgaactgctgctgatgcggattctcgatcgggcatttcccggttgcgtgttctacagcgataacagcggcggccgctttcgcctgatgatgaaacgcgaagggttgacccgtccgctggaacctgcggagttctcggatggcacgctacgtttcctgtgcctggccgtagcgctgttaagcccgcgaccgccagcttttatcgcgctcaacgaaccggaaaacagcctgcatccgcagatgttgcccgccctcgcccaactgatcgccgaagccagccgccattcgcaaatctggctcaccagtcattcgcctgaactggccaatctgatcgagaaacatgccgcgttttcgctgtatcaactggcgatggaggacggtgaaacacagcttacccgactgtcgtaa

SEQ ID NO: 72990 - DNA, 903 bp, Citrobacter koseri
atggggtccaccagaagagggatgctgaacgtcctgattgccgccgtattatggggaagttcaggggtttgcgcgcagtacattatggaacaaagccagatgtcgtcgcagtttctgaccatgacacgtctgatattcgccgggttgattctgctgatgctctcgtttgttcacggcgacaaagtattttccattttcaaaaaccgccaggacgccctaagcctgctgttcttttccatcatgggggcgcttaccgtacagctcaccttcctgctcaccattgagaaatccaatgccgccaccgcaacggtgctgcaatttttatcgccgacgattatcgtggcgtggttctcgctggtacggaaagcgcgccccggcattctggtgctgacggccattctcacctcccttattggcacctttttgctggtaacgcacggtaatccgacatcgctgtctatctcgcctgccgcgctgttctgggggattgcctccgcgtttgccgcagcgttttatacaacctggccctctacgctgatcgcgcgttacggcacgcttcctgtcgttggctggagcatgttgatcggcggcgtgatattgctgcccttctatgccgggcagggaacggattttgtggtcagcggcagcctgattctggcgtttttctatctggtggtcatcggcacatcgctgactttcagcctgtatctgaaaggggcgcaaatgattggcgggccgaaagcgagcattctgagttgcgcggaaccgctaagcagcgcgttgttatcgctgctgttgctgggcatcagcttcaccctgccggactggcttggtacattgctgatcctctcgtcggtggtgctgatttcaatggattcccgccgtcgcgcccgggcggcataa

SEQ ID NO: 72991 - DNA, 639 bp, Citrobacter koseri
atgcttaattttaacccttcatccttacgttttaaatttatttacctgacgaaaaatatttatgatggtattgccattcatacactttttgaagatgccctgcatgaatcaggattgaaaatggggcttaatgaagatataccctttcacctgatcgataagtacagtaattttattccgttttcattgcggtttgatgcgacgtataaacaacgcagtcgcacgctcgaacacgatattaccctctcggcaaaaggggaagagataaagcgaatgcgttttaatcatatactcttttttgtcgatatgtataaccctgaccatacctcttttctttcggtcgccggactgcatggccttacggcggtcagggagcgcatggatgctttcatggtgcattgtaatgcggtgattaatggcaatagaaaatgccgttcaagtagtttcttgttcacgctgcgtgagcagcaaattgtgtttcatctcttacaaggcatgtcggttaaagaaatcgcactggaattaaatgtgagcgataaactggtttatcgggagcgctgggcgctgacgcgtaagcttatcgaccagaaaaattgcagattatacaaaaggctaataaacattaacgcgacattataa

SEQ ID NO: 72992 - DNA, 732 bp, Citrobacter koseri
atggcgaaacggctaaaatatgttctgaaccacttcctgattttacttttattgccgtcatcggctatgtcggcaacgtatattaattacacgcgagtgataattaatgaaaaggcgcgcgaaacatcatttactatttacaatgaagggctgaaacccgttttattgcagttgtggactgaaaaagacaatatttttgatcgtcccgaggagattaaaacaccgtttatcattttacctccgatttttcggcttgaaggaaaaacatcccgagcggtgcgggtacagtttactggcgaccagcatacattacctgctgacagagaatctttattctggctgaacacgctggaagtccctcctgtggctgatggtaaagcggagaagggcgcgctacaggtcgcttttcgtactcgggtgaagttattctggcggcccactgcactggcagcaatcacccttgaggaaagtataaaagaattacacatctctttatctgattgtggagggaaacgctgcctgttagtaaagaataactcacctttgtacgtaacattaatggatcttacgttgaatgacggtacagaaataaagcaattacctgatgatggtctttgggcgccattgtcaactaaaacggttgttttacccaaaaaaacaaagggggacggcacagtcaaaacattctcatggattgatgattatggcgtggtcaatacctataactactaa

SEQ ID NO: 72993 - DNA, 1086 bp, Citrobacter koseri
atgaaaactatcgtaacgggcattgccctctcttttctggcactggcggcgatgtgcggcgtggcgcgagcggacgggacgtgggtgaactgtgagcgtaccaatggctactaccagtactttgactctacgaccgtacaggtgggtaaagatgctgccgtcggtgatttattaggtacctgggcgacctcttacaacccgacggcatggacttgctctcatcgtactaattatcaaagctacgccatcccgatggcggtacaggggtatcccccctacaccgtttggggaactacccaggtcgatgggcaaacgtatactgtctataacacgacggtaaaaaccgggttggggtatatcgctcgctggcgctatacggtaaaagggcaaaccagcgactggtatcctcttactattgcgaccggagggcagcagacgccttcgcagttatttacggtgacaggcgatggaagttcatggaatctcggcgtggatgtccaaatccgttttgtaaaaacctcgacatcgttaaccgcaggcagcacttccgtctttgacccgatgtatatgcgacactaccagacatacgggggcagtacgtctgttggcagcggcacctatatgatcgctgattttctggcgggagggctgatcatatccaccaccgggggaacctgtacgacgtcggatgtcacggttaatttaccggctgttagccgaactgattttagtggcataggttataccgccgcgcgtactgattttaatctgaactttacaaaatgcccggcagggttatcgagcatcagctatttgtttacgccgaccacggccattattgataacgccaacggtgtttttgcgctggcgagcacctcaacggcgagcggcgtgggtatccagttgttggatgatcagaatatccctctgtcgtttaatacggcatatctcctgacggattatgatccggctcaggacaatgcgaattataccgtgccactgcgtgccggtttatatcagactgcggcaaatgtctcttctggcgatgtcagaggtgcagtgacattcacccttgtctataaatag

SEQ ID NO: 72994 - DNA, 2544 bp, Citrobacter koseri
atgagcaaaaattacaaagtagcccataacgttatttcttgtcctctgagattaacccgcattgctcagttcgttgttttatcttttatttctgttcaggttgccttcgctgaaaatgatgaagtgcaatttaatagcgattttttacgctcagcgattgatgttagcaactattctcagggaaacccggttccgcagggacaatataatgtcgatctgtatgtgaacgacaaatggcgagggcgtggtgaagttaagttcgaaaatgataaaagcaatgccgtggtagccaaaccgtgttttacgctgaagctgatatcaacgctgggaatcgatattgataaaattgatccaatgctgcgccagtcgttaaagaataatgaaagttgtgtgcgtattggtgatatatcttctgatttaacagcttattacgatgtgacgacacagcgcatcaatgtgcaggcgcctcagatatggctgcttcgccaggttcgcggctatgttaatcctgaattatgggataacggtattcctgctgcgacgttgcaatatgattacaacgcatggcatgcagagatgtctggaacggactctatgtcatctcagtatctgagcctgatgggagggctcaattgggatgcctggcgcttacgctatcgcggtgttttcaactggaacaacgatcagggttggcattatgactcaaccagcacttatcttgagcgcggcattattccgctgcgcagcaaactggtgatgggtgattccaccacggatggccaggtcttcgacagcgttggttttcggggcgtaatgctgacttctgacgatcgtatgtatgaggattcccagcgaggctatgcgccagtcattaccggtgttgcgaacaccaacgcactcgtcagcgtgagtcagcgcggcgcgcgtatctatcaaacgacggttccgcctggcgcgttccgtattgatgacctgtaccccaatggcaccggcggcgatctgctggtaacgattaaagaggccgatgggagtgagcacagttttaccgtgacctatgcttccatcgctgaactgctccgcccgggaaccagtcgctattcgctgatggcggggcgctatcggaatacctccgtgaatgagaaaccacagattgctatggggacattccgtcatggttttactaacttactgaccacttacaccggtgcgatgggcggggaggattatcaatcggtcgcaggtggcgtcgcgctcaatacgctcattggcgcgctttctgctgacataacgcatgcgcgaacgacgcttgcggataacagtaaacgtgaaggccagagcatccgcttttcatttgccaggattctgcccgtcgttgataccaatatcaccctggcgagctatcgctattccagctccggttattacgatattgacgatgcgatgttgatgcgtgatttagagcggacaaataaaggggcttattccagcagcattaaccgcaagaatcgtctgcaactcagcgcaacgcaaactatttccgagacgcttgggagcattaatctcagtgccagcactcaggattactggaacaaaagcgggcgtgataccgagtatcagttgggttacaccaatgcgttcaagtggttcaattttaacctcaacgccagccgtacccgcgatttagtgaaagacaaatgggataacaaaatcgcgatagggatttccctgccgttagggaacagcgcgcgctcggcttatctcagtaccacctatgttcaggaaagcgggcatcgggggctgcaaaactcaatcgccggcacctccggggagaaccgtcagtataactggggcgcgttcgtcaatcaggatgactacgaccatagcagcaataaaaccacgggcggcgtcagtggtaactggacttcgccgtggaccagcatgggcggcagtttctcagcaggccagggctaccagcaatacggcatgaacctctctggcggtgttgtcgcctggcaaaatggcgttgtgctgacgccgatcatgggggacaccatggcggtcattgaagcggaacatgcgggaggcgcaaaggtggcaaacaacagcagccttagccttaaccgcaatggcaatgccgcagtgccttacctctcaccctatcgccagaacacgattgagctcgatccccgggggctatcgaatgatatctccctggacgtcaccagccagaacagcgtccctaccgcaggcgccgtggtgttgatgaaatacgccacggatacagggtattccgtgcttttcactctccgccatgccggtgatgtgctgccttttggcgccgatgtggtcgatgagcgcggcaatactgtcggttacatcgcccagggtgggcaaagttttgcgcgcgttaagaatctggcgggcaaattgcgcgtgaaatggggaagtggatcgggtcaggagtgccagttcagttaccgcttatcagagcagaaaagcgcagatgtcgccgacttacgtcgggctgatgcggtatgccagtaa

SEQ ID NO: 72995 - DNA, 747 bp, Citrobacter koseri
atgttaaagatattatcttccgggctggtattgttattttcggcgttctcactgaacgctatggctgacgttgtgattaacggaacacgcattgtatttaatgcaaaagacaaggaatcaacggtacagttaaaaaaccgggggaataatccttatcttttacaaatatggatggatgatggtaacccaaatgcaaagcctggggagatcacggttccgttcctcattgctcctcccgttgttcgtattgatccggcgaaggggcaagctgtgcgaatcatggcgacgaacccgtcattgccgcaggacagggagtccttgttttggttcaacatgctggaaattccgccaaaagcacaggattcaacgtcgggcaaaacacatatgcaactggcatttcgtacccgaataaaattattctaccgcccggataatctgcaaccaacaccattacagtcttataaagaattaaaaatattccaacaagggaacaacataaaagtagtaaacgactctccctattacatcactttcagcaaggttgagattcgtcgaacaacagggtcagctgtattagctgctgtagaaaacttcccccagcgtatggtgaagccaaaaagcgaaatagtattcccgctcgttaataaaaaatcgacgcaattgagcggtgcttcagttttttacagtgtaataaatgattatggtggagaaacaacaaatgagcaaaaattacaaagtagcccataa

SEQ ID NO: 72996 - DNA, 558 bp, Citrobacter koseri
atgcgtaaatataattatgcgttatccgcgttagcaatggttatcacttccgcatttactgcttcagcatttgcggtggatggaactattacaattaacggacaaattactgatacaacttgtactatttctgtcgacggtggcagtaatgatgcaacggtaacgctgccaaccgtttcgtctactacgctcggcgcagcaggcgcaacggcaggtgctacgccgttcactatctcgctgagtaactgctcaggaacatctttaaataccgccagcacctacttcgaacctggcgcttatgttgatagcacaaccggtcgtctgaacattgattcagcagcggcagatgcagcgactaacgtgcaggttcaattattaaacgccgatcgtgacgccattgttgcaggggcttcagtagcgaatggccagaatgatatccctgtcgatatctcttctggaaacggtacgctgaattactttgcgcaatattatgctactggcgcatctactgcgggttctgtaacgactcaggtcgattacaccatggtttacgagtaa

SEQ ID NO: 72997 - DNA, 819 bp, Citrobacter koseri
gtgaaattgacgatatctcatttacgggcaggggcggcggtactgttggcgggcatattgctggcggggtgcgatcagcaaagcagcgacgcgaaacacatcaaagtcggcgtgattaacggcgccgagcaggatgtggcggaagtcgcgaagaaagttgccaaagagaagtacggtcttgatgtggaactggtaggattcagcggttcattgctgcctaacgatgcgaccaatcacggcgaactggacgccaacgtgttccagcatcgaccgttcctcgaacaagataacaaagcccataactacacgctggtagcggtaggcaacacctttgttttcccgatggcgggctactcgaaaaaaattaaaacggttgatcaactgaaagacggggcgacgatcgccattcctaacgatccgaccaacctcgggcgtgcgctcctgctgctgcaaaaagagaagttgattaccctgaaagaggggaaaggtctgttaccaacggcgctggatatcaccgacaacccacgtcatctgaatattatggagctggaaggcgcgcagctgccgcgcgtcctggacgatgcgaaagtggatgtggcgatcattagcaccacctacatccagcaaaccggactttcgccggtacatgacagcgtctttatcgaagataaaaactcgccgtatgtgaacatactggtggcgcgggaagacaacaaagatgctgaaaatgtgaaagcgtttttacagtcttatcagtcgccggaagttgcgaaagccgcagagactatctttaacggtggggcggtgccggggtggtga

SEQ ID NO: 72998 - DNA, 744 bp, Citrobacter koseri
atgcagcagattaatttttatcgtaatcgtgtggcgattaacgtactggcgaaagatatcgccaatgccagggaaatctatgatgctgccgaaggccatgcggcgatcggcgtcctctccgcacagtttgcctcagtggaagacggtgttcaggaggtaaaacgctggatggcagaagtgccgtgcatctccgtggggctgggagcgggcgatccggcgcaatactataaggcggcgatgattgctgcaaaggtacacccggcgcacgtcaaccagacctttaccggatgtggttttgccgctggcgcgctggcggcaacgggcggcgaaaaaacgcatatcaacgcgctggtcagcccgacaggcacgccgggcgaggtgcttatctccactggcgttcgcagcagccaggggacgccggcccgcgtttcctgcgatgccgcggtacgcatgatgcaggatatgggggcgcacgcggcgaagttttttccgatgggcggcgagacgtcgttaccggagctgtatgtgctggcaaccagcgcagcccgcaacgggatgacgctgatcgaaccgaccggcggcatttccctggaaaatttcggcgttattttgcaaacctgtctggaggcgggcgtgccgcgcgtgatgccgcatgtttacagctcgattatcgatccgcaaaccggaagcacccggcctgaagatatcgtcaggttaatggagatcgtgaaagcgctggtttga

SEQ ID NO: 72999 - DNA, 1110 bp, Citrobacter koseri
atgacacagaatatttatcaacagctggggctaaagcaggtgattaacgcctgcggcaagatgacgattcttggcgtctccagcgtcgcgccggaggtgatgcacgccacggcgcgtgcggcctccgcttttgtcgagatcgacaagctggtggaaaaaaccggtgagcgcgtctcccgctataccggcgcggaagacagttatgtcacctcatgcgcctcggcgggaattgcgattgccgttgccgccgccattacccgtggcgatcgggcccgggtcacgcagatgccggacagttccggtatggccaatgaagtggtgatgctgcgtgggcataatgtggattacggcgcgccgatcaccagcgcaatccgtttgggtggcgggcgcgtagtggaagtagggtcgagcaacctggccgcgcgctggcaactggagagtgcgattaccgatgacaccgccgccctgctgtatgtgaaatcacatcactgcgtgcaaaaggggatgttgggcattgaagacttcgtccaggtggcgcagatccacaacctgccgttaattgttgatgccgctgccgaggaggatttgcacgtctgggtggcaagcggtgcggatatggttgtctacagcggcgcgaaagccttcaatgcgccaacctctggatttatcaccggcaagagaacgtggatcgccgcctgcaaagcgcagcatcacggcatcgccagagcgatgaagatcggtaaggagaatatggtcgggctggtgtatgcgctggagaattatcaccaggggcagacgatagtcaccgccgaacagcttcagccggtagccgatgccatttcagcgattcgtgggttgagtgcggatatcgagcaggatgaggccgggcgcgcgatctggcgtattcgtattcgggtgaatgcccgtgaactggggctggatgcccgcgaagtcgaagctcagctgcgcggcggcgatatcgccatttatgcccgccgctataacctccaccagggcgttttcagcctcgacccgcgaacggtcgcagaaggggaaatggcgttaatcgtggcgcgactgaaggagattgccgaccatgcagcagattaa

SEQ ID NO: 73000 - DNA, 858 bp, Citrobacter koseri
atgagcagcgacgtaatgcaacatgaactggttgagcgtgcgcgggaaaccggagcgctgaccaaagcggacatcactagggcgtggtttatctactggctgggcgcggaggtttctaactcctatgaacgtttacagagcctgattttctgcgcctcgatgacgccgatcatcaaaaaactctacccgcaaaaagaggaacaggtggaagcgctgaagcgccatctgaacttctttaactcagaacagacctttggcgcggtgatccagggcatctccatcgctatggaagagcagaaaacgcgtggcgaaccgatcagcgacgcctccatcaccgggattaaaaccggcctgatggggccgctggccgggatgggcgattccatcgtctgggcggcggtgatgccgctgttgattgcgatttttattccgttcgccgccaatggcagcgcattcgggggtattgcgccgctgattctctatccggccattacgctggcgatcagctacggcctgattcacaaaggctatacgctgggacgtgattccatcgtcgggctgttgcaaggggggcgaatcaaggaactgatctacggcgctaacgtgctggggctgatcatgatgggggcgctgtcggcgagctacgtcaagatcaccaccccgctgaaaatcagcgccctgaaaggttctgaagtggtggttcagcagatcctcgattcgattgcgcctggcctgctgccgctggcggcagtatttgccatctatatctttctggtgaagaaagggccgcgttataccaccattctgctgtcgattgtggcgcttagcgtggtctgctcgctgctgggagtgttgtaa

SEQ ID NO: 73001 - DNA, 750 bp, Citrobacter koseri
atggatactttagtctttgcaagcctgatggggttgtattactggtttgcccgattacgccttggctacaccttctccgccatgctacttcagccggtggttgtcgcggtctttgtggggctgctgctcgggaatatgcagacggcgatgatcatcggggcgggtatgcagctcgtctatctgggcgtgacctcgacgccgggcggcaacgtgccgtcagatccggcgctggcggcctgtatctcgatccccattgcggttaaagccggaatggaccccaacctggcgattgcgctggcgattccgtttggcgtgatcggcgtattcctcgaccagctacgccgtacgctgaacgccgcctgggtacatatggccgacaaacacgcggaaacggcaaacatggcgggcattatgcgttgcgctttcctttacccggcgttactcggtctggcgctgcgtttcccggtggtgttcgccgccaactatttcggccagaacgtagtagaaagcttcctcaagctgatgccgcactggctgacccactcctttgaaattatgggcgggattctcccggcgctgggcttcgccatcaccattatggtgatcggcaaaaagagtctgctgccgtggtttatcggtggattcttcgcggtgctgtacctcaaggtcgacatcatggcgatggcaatcttcggcacctgtgtggccttcctgattaaaggtctggcgaaaaatgaaggagcagcatga

SEQ ID NO: 73002 - DNA, 486 bp, Citrobacter koseri
atggcaaacatcgtgttatgtcgcatcgacagccgtctgattcatggacaggtcgtgacgaagtgggtcggacaatcccaggcgaaccggattgccgtggtcagtgacgaactggacgccgatccgtttatgaaaaacatctacctgatggccgcgccgccaaacatcaaagtggattgctacagcaaccagagctttgcggcatcgtggaaagaaaaccaactcggcgacggcaatgtgctggtgttgttcccgtctctggcggctattcaacaggccgtgcagcagggatttgatgtcaccaccattcaggttgggggcttaggcggtgggccaaaccgcaaagcggttttccagaacattacgctcgatgaaaaagacgttggcattcttaacgacctgaaaagtcgtgggattcaggtgttcttccagactatcccggaagataaaccacagtcgctggacgatatcctgaaaaaattctaa

SEQ ID NO: 73003 - DNA, 426 bp, Citrobacter koseri
ttgactaccactgaatccttgccccagatcctgctgctgacgcatggcggctggggacaacagctctgcaacagccttcgcatggtgatgggggaaattaaaggcgtaacagaaattgcgctcatgcccgtggatacgctgggcgagttttatcaacgtgtcgaagccgtggtgaaaaccatgccggaaggctcacttattctgaccgattttgttggcggcacgacctccaacgtggcggcacgactgagtgcggattatccggtggcggtggtttccgggctgaacgcctcgctgctgctggaggcgctggatcggcgcgaacacggcccgcttaccgcctgcgtgagcggtctggtggaagccgggcgcagcagttgtctggatgtcgtcgcccatgttcgtcaattacaacaatcacaataa

SEQ ID NO: 73004 - DNA, 2799 bp, Citrobacter koseri
atgagacggattgaggtaatactgggggaactcgaacggctgacgcgcgggctgaatcttgccgatctggcgcaggagacggcatttacggcggaagccattggctttaacctcgggctggcgcgcaactcggtcagtaaagatctcaatcaactctgcaatgatggtctggcgattaaaagccggggccgcccggtgtttttcctgcaccgtcaggcgctggaaacgctgctggggcgtaagctggatgacgccgaacgtgaagtacgtacgattgccgatctgttgccgcgtcaggaaggacacacaatcgacgatccctttaccggtctgattggctacgatcgcagcctgcgcgatgcagtagaaaaaggccgcgccgcagtgctttacccccacgggttgcatgtgttgctgaccggaccttccggcgttggcaaaaccttctttgctgaactgatgcaccgttttgcctgcgagcacgccgcaggctccctgccgccgctggtctattttaactgtgcggaatatgcccataacccggaactgctctcttcgcacctgtttggtcatcgacagggggcgtttaccggagcgagcgagaataaacctggcctggtggagcaggcggacggcggctatctgctgctggatgaggtacaccgtctgccatatgaagggcaggaaaagctgttctccattctcgataaaggtgaataccgtccgctgggggcaagcagcaaggcgcgttcgatatcggtacgcctgatttgcgcgacgacagaaccggtaagttcggcgttgttgcgtactttccagcggcgtattcaggtctgtatcgatctgccgggcattcgccagcgttcaatcgaagaacaggtggagctgattgtcggctttttgcaacgtgaaagtcgcaaaattgagcgcacggtgagtatcgacaagacgctgctgctctggctgctgaataagccgctggaaggcaacatcggccagctcaagagtgatatccagttcctctgcgctcaggcatgggcgtcggggatgacggagcataacgatacgctgcaactggataaacggctggcggaaatgccgtttaacgccacgccggagcaacgtctgctggtggacacgctgtttgatggcaaagagcgcttgaacgttgacgcgcgcacgttgcccgccttgaaaacgtcgctggcgacgggcgccgagattgaagagagcgatctcttttacagcttcctgacccgcgaatacgtcaatctgcgcaacagtaacgtgcctccggcggaaacgctggcgatcctgaaaaataagctcagctcgatttttgaatatggcctctacagtcgcgacaatattgcgcatccgccgcgttatggcgaccagattgaggaacgcgtgacgctgcttattggctgcgtggagcaggtgcttacgtttacgctgccggagaacctggtaaatccgctgcgtaaacattttctggcgctgattggctacgttcagcgcggcctgatcccgcagctttattcttccagcctgatcctcgatcgttgcaaagatgagtacgataacgccacattattgtgccgaaaaatcaatgaattgctgcatattcagtgtccggcgacggaagtggtctggctgtgtctgttcctcaaagagtgtcgtcattatcgtcagcgtatcgacgccagcccggactgcggggtgatcctgattgctcacggcgcaacaacggccacaagcatggcgcagtatgtgaatcgggtgctggagcgcgagttgttcagtgctatcgatatgccgtttgagcagtcggtgcatgacacgctggaaaccctgacccagatgattcagacccgacgttatcagcggctgatcctgatggtggacatcggctcgctggtacattttggcagtacgatcagcaaattattccagattgacgttctgctgatgccaaatataaccctgaccagcctgctggaggtggggctggatttaagctatgaaaccagcgacctgccgcaactggcggcgttaatgcagggtaaaagcatcccctgtcagctttgtacgccacagcaggaaaacggcggcaaagtgctggttatctcctgtattaccggcatgggcacggcggaaaaaatcaaaaaggtgctggaggagagttttggcgagctgatgtcgcaggacacgcggatggtgatcctcgattacaacgatgttcgcagcctggagcgcgtccagcagtcgctgcatgccagtgaacgactggcgggtattgttggcaccttccagccggggctgccggatattccattcatttcgctggaggaattgttctctgagcaggggccggaactggtgttgagcctgttaacgccggacctcaccagcgctgaacgccgcctggaaatggaacgcagcgcaatgcgctttatcagcgcgctgacgatggagagcatcatcaaccatatttcagtgcttaacccgcagcgcattctgaaagaaatggaaggggtgcttaaccatctgaccaccgcgctttcgctgaaaccaagccgccaggtgacactgcgcttcctgatccactgctgctgtatggtcgagcgtatcgtgattaaccgaaaaccgttacagatagcgctggaaaacaaaccggatctggatgcccgcgcgtttagtgtcatcaaatcggctttcctgccgattgaagaggcttatgccatccgtttatcggacgcggaatatttttatatctacgaattactctatagctga

SEQ ID NO: 73005 - DNA, 294 bp, Citrobacter koseri
atgaaacaaaccgctctgctgctctttaccgcccttctcgcgctgccaggcattgcgttggctaactcgccttatagctcgcttcagaccgctaacgaaaaaagcaccgtcctgaaagagctacgcaaaatgtgtacgccgcaggcatcgctgtcggatgaggcatgggaaaagatgatcatgtcgaatgagagtaatcaacagcacatccgcgaagccatcgtggcgatagaaaggaacaaccagaataactactgggaagcgctcggcaaagtcgaatgcccggatatgtaa

SEQ ID NO: 73006 - DNA, 1242 bp, Citrobacter koseri
atgttacactgcacggcttttctggcagagaaagacgcaggtaacgaaatgagtgcaagaatcgaagaacaatcccatgctgagacgattatccggccaaactggtcggctgttttcgctgtggcgttctgtgttgcctgcctgatcaccgttgagtttttgcccgtcagcctgctgacgccgatggcgcaggacctcggaatctctgaaggcgtcgccgggcagtcggtaacggtaacggcgtttgtcgccatgtttgccagcctgtttatcacccaaattattcaggcgaccgatcgtcgctatgtggtgatcctgtttgccgttttattaacgctttcctgtctgctggtctcgtttgcaacttccttcacgctgctgttggccgggcgtgcctgcctggggctggcgctggggggattctgggcgatgtcggcttcgttgacgatgcgtctggtgccgccgcgtaccgtgcctaaagcgttgtcggttatttttggcgcggtctccatcgcgctggtgatcgccgcgccgctgggcagttttttaggtgggattattggctggcgtcatgtttttaacgcggcggcggtgatgggcgtactgtgtgttatttgggtagtgaaatcgttaccttcgctgcctggcgaaccgtctcaccaaaaacaaaatatcttcagtctgttgcaacgtcccggcgtaatggcggggatgatcgccatctttatgtcctttgccggacagttcgcgttctttacctacatccgcccggtgtatatgaatctggcgggctttgatgtcgatggcctgacgctggtgctgctgagctttggcattgccagttttgtgggaacgtcgctctcctcttttattcttaaacgctcggtcaaactggcgctggcaggcgcgccgttggttctggccgtcagcgcgctggtgctgacgttgtggggaagcgaaaaagtggtggcggcagggatcgcgattgtctgggggctgtcgtttgcgctggtgccggtagggtggtcaacgtggatcacccgtacgcttgccgatcaggcggaaaaagccgggtccgttcaggttgcggtgatccagcttgccaatacctgcggtgcggctgttggcggctatgcgcttgataaccttggtctgctgtcgccgctggcgctctccggcagcctgatgttgctgacggcgctgctggtgacggtaaaagttcgcatacaaacgacgcgataa

SEQ ID NO: 73007 - DNA, 453 bp, Citrobacter koseri
atgatttggatcatgctggccacgctggtcgtggtgtttattgttggcttcagggtgctcacctcgggggcccggcgtgcgattcgtcggttaagcgagcgtctgggcatcagcgtggtgccagtggaatcaatgatcgaccagatgggcaaagcgcctggagaggcgtttttacagtacctgcatcgtcctgatgaatcacatctgcaaaatgccgcccagatattgctaatctggcagatcgtgattgtggatggcagcgatcagaacctgcaacagtggtatcgtcagctgcaaaaaacgcgtctggccgcgccaattactgacgcgcaggtacgcctggcgctggggtttctgcgcgaaatagaaccggatatgcaagagattaacgccttccagatacgctacaacgccctttttcaacctgaagatggcgtgcactggttgcattga

SEQ ID NO: 73008 - DNA, 756 bp, Citrobacter koseri
atgagccaggatattacgacctctgttcccgcactggataagacggtaaaaatctgtaattacctcttcaatacaccaggggcgacgttcagccagatccaacaagatttagcattacctaaaagcagcacgtcatcattgttaaacgcattggtcgaacatcaccttttgcgtctggaaaaggggcgctttttcctgggcctgaaattgtacgaatggggtaatcgttcgctggagcaatttgatatccgcaacgttgctctgcctgttctggagaaattgcgtgagcaaaccgatctgacctgccatctgggtatcctggatgaagtcgcgcccatttacctgatgaagcttgagaacactcagccaatcggtattcgtacctgggtcggtaaaaagctgccgatgcacagttccggcgtggggaaagcgctttgtgcctggttaccgcaggacaaaatggacgaacttttgccggatgagcagttaccgcaatacactgagaccaccatcaccagtaagaaagccttgctaaaggagtttgccagaatccgtgagcaaggatgggtctttgataacgcggaagattccccaggtatttattgtatcgctgcgccggtgtttaatcgtaatcatgaggtgattgctgcgatcagtatcagcggtgttgaattgcaaatgccaaaagagtgcattccacaatattcgcagtgggttcgtgaagcctgtcaggcactttctgcaaagttggtttaa

SEQ ID NO: 73009 - DNA, 900 bp, Citrobacter koseri
atgtcgaacgtatttaaaggtatctttccgccagtcccaaccattgttgacaatcatggcgaattagatcgcgccggaatggccaccatgattgaccatgtcattaacaacagggctgacggaatgctgattctgggcagcggcggtgagttttcacatttttccactgagcagagaaaacagatcgccgaattcagtctgcaatatgttgcaggaagagtaccggtgttaattggtattgcctgcgccagcaccgcagaaaccatccagttaggtgaacacgcacaaaacgcaggcgctacgggcgtactggtggtgaatccttactatgcgaaactcagtgatgacgcgcgtttcacgcattacaaacgcattgccgaagcactcagtatacctgtctttttgtataacttccctgagttaactggccaggatatcggtctggacgtgatcacccgactcgcccgtgaagtgcctaatattgtaggaattaaagacaccattgataacatcagccacacccgggaaattattaatcgcgtccacccattccgcccggagtttattgtctttagcggttatgacgaatatttgcttgatacgctattgttgggcggtcacggtggaatccctgcaacatttaactttgccccacacattaccagaggcatatatcaggcatttattcgtgaagacctcactacggctaaagcactacagcagcaactggcaacgctttctcctctgtatgcattagaacagcctttttttggcgtcatcaagacagctatcaaattaactggagtggatatttcaactgccgtagttccaccagccttaccactcaatgaggaaaaaacagcccttgttcgaaatattctggcccgtattactctgtaa

SEQ ID NO: 73010 - DNA, 1518 bp, Citrobacter koseri
atgaacatcaaccctgtactaaaactcaatccaaaagatgatgtggttatcgcaagacagtgtgttcccgctggcacctggcttgaagaagaacaaattacagttatcagcgacattcccgcaggacataaaattgccctacgctcactaaacatcggagaggcagtgaaacggtatgggcagattatcggtttcgctacccaacctattcaagccggcgagcatatacatatgcacaacctgggcatgggcgattttgagcgtgattacgcctggggcgtggatcggcattcccccacacccgccgaacatcaggatatatttcagggaattcgtcgcactgacgggcgtgccgccacgcgtaactatattggcattttaagttcggttaactgtagcgcgacggtcgtcagagcgattgaggatcattttcgtctacacggtctggccgattacccaaatgtcgatggcgtggtgtcgcttccacaaagttttggttgcgcgattggctctaaaagtgagtccatggcggtcatgcggcgcacgatggcaggttacgccacacacgccaactttgctggcgtcattattattgggctgggttgtgagtccagccaaatcaaagacatgatgaatgcccatgggttggaagatggtccaatgatgcacagctatactatccaggacgttggcggaacacggcatgccattcagaaagggattgatctggtaaatcaaatgcttcccctcgcgaaccgggtcatccgcgaacccattcccgcctcggaaattattctggcgctggaatgcggtggctctgacagctattccggtatttccgccaatccagcgctcggctatgcggtggataagctggtacagcagggtggcacggccattctgtctgaaacatcagaaatttatggcgcagaacatttattgacccgccgcgctgtctcgcgcgaggttggcgaaaaactgattgcgcggattcactggtgggaagactactgtcgtcgcagcggaagcgaaatgaataacaacccttcagcaggtaataaggttggcggacttaccacgattctggagaaatccctcggcggtattgccaaagccggaaccactaatctgacagaggtttatgaatacgcagaaccagttacagcaaaagggttcgtctttatggatacccccggctatgaccctattgccgttaccgggcaaatcgcaggcggcgcgaatctgctttgcttcaccactggccggggttcggcatttggatccaaaccaacgcccagcctgaaactggctaccaacaacgcgctctggctgcgccaacaggaagatatggacattaactgcggcaccattgtcgaaggtgaagagacgatcgcagaagtcggtgaacgtatttatcaaatgatccttgatatggcatccggcaaaaaaacaaaaagtgaagaatttggctatggtagtcaggaatttgtcccctggacaattggctccataatgtaa

SEQ ID NO: 73011 - DNA, 1311 bp, Citrobacter koseri
atgtctattgttaacgtaaatactgaagaagaaaaattaaaggctacaacagtaagatggcgaatatttattattatgcttttgttgggtgcgattaattatattgatcgcacatcgctttctattgccatgccctatattaccgatgaatttggcattactgatacccgggttgtcggtgttatccatagcgctttcttctgggcttatgcgctgatgcaaattcccagcggcgtgattgcagataagttcaaagccagaaatattatcgcactggctaccatcttatggggagcattccaggccgttgccgccttatgtcactccattttcacgctttcgctttcccgtcttggtctgggcgtcacagaatcccctatcatgcccgcaggcgcaaaattaatgggaacatggttaacgccaactgagcgtgggcgcggctcaatgttgctcgatggcggcgcgccattaggaaccgcgctgggtgcggtcatcatcgccgggttgattgcctttttcgactcgtggcgtatggcgtttgttgtcgcgggggttggcacgatgctcgtcggtttactggcatggtggtatatccgtacttacccgtcagaacacccacgtattaaccaggcggaactggaccatatcaccgcggcaaacggcccagccaccaacagtaaaaaataccgtctcgctgatatcaaaccttacctcaagcagcgcaatgtgcttgcgttgatcggcggatgggtatgctacagctttgtgttctatggcctgatgacctggctgccgctctatttccaggccacttatggctttgatattaagtcgatgggtggcgcgatggcgctgatcttcctgctgtgctttattggtcagctcacaggcggttacatcatggataaatggcgcagtaaaggcgcaaaaaccagccgcgttatgcataccatgttggcaatttccgccactaccgcaggggtagggatttttctgtgcgcccaaagttcaacaccagccattgcgattacgttgctgacaatcgcgctcttcccgttacgttgggccagtgtctactggtcaataccgggtctgctgggagcacaatcggtagcagggactatctgtggcaccatgaactttaccagtaacctgttcgctgccattttgcctatttttatcggcttcctggtgcaatctaccggtaattactatgccgcgatgatgttctttgcgctggccgcagtgggttacctcatctgctcgctgctcattaacttcgataaaaaaatggatattgctgaaaagtaa

SEQ ID NO: 73012 - DNA, 903 bp, Citrobacter koseri
atgttcaattcagagaactttattgccgtcgactggggctccagcaacctacgcctatgggtttaccagaaggggagctgtgtctggcgtcacgccagtcatgatggggtgatcaatcaccatgcagggcagttcaaagatatttggctgacattgctcgaacagtgcccacacactctggcagataatacgacggttatcatgagcggcatgattggcagcaatattggctgggtagacagtcactatttactctgtccggtctccctgcaaacactgtcgcagcatctcactcaagttcatgacgcgggccatctccctgtattcatcattcctggtttgcagttagcgggatctgaaacctgtaacgtgatgcgcggtgaagaaacacagcttcttggcgcgttatcagaaaatagctggtatgccttccctggcacccacagtaaatgggtacgcatggagaacgatacggtccgtgattttcaaaccatcatgaccggcgaatttttccacctgctgacccgacactccatcgtgggaaaacacgcaacggtacaacagcacaatgtcgatgcttttttagcgggcgcaaaacgtggtcaacatgaaaactgcctttctcgcggcgtctttgatctcagagcacgaacactaagtcatatccttcctcaggacgcgctttttgatgccttatccggtctgctgatcggccatgaaatcgcacaaatgctgcaacattacgcaatccctgcacacgaagaaattgtactggtcggcagcgacgagctgctcgtccgctaccagaccgtattccagctttttggccagcgctgtcgcctcctcaacggtgaaacagcattcattaacggcatcaggagtgttttacatgaacatccgtaa

SEQ ID NO: 73013 - DNA, 615 bp, Citrobacter koseri
atgaacatccgtaatcctttggtcgcaatactacgaggtataacgcccgatgaagttctggcgcatattgatgtactcgcaacagcaggttttaccaccgtagaaattccgctgaattcccccgactggcaaaccagtatcgccatagccgttgcacactatggtcagacgatacatatcggcgcaggaaccgtgaccgccgttagcgaagttaacctgttatccgcattcaagtgctcgtttattttgacgccgaataccgacccgtcagttattgacgcggcacgagatgccggaatgacgacctgtatcggctgtcataccgccagcgaagcgtttgtcgcgatccatcacggcgccagcgcattaaaaattttcccggcaggcgaactggggccaggatacatccgcgcattaaaagccgttctaccgacgcatattccactctatgccgtcggtggcatccgtcccgacaatctggctgactatctgaatgcaggatgcattggcgcaggattaggcagcgatctgtaccgcgccggacaaaccgtaaaccagacggcaagaaatgcccaggcctttatcgaggcgtggaacgcctgtaagcagcaataa

SEQ ID NO: 73014 - DNA, 1392 bp, Citrobacter koseri
atgctgaacttcttaaaccaggtgcgtaagccgaccctggatatgccgctcgatgtacggcgcaaaatgtggttcaaaccgttcatgcagtcctatctggtggtctttatcggctacctgaccatgtacctgatccgcaaaaacttcaacatcgcccagaacgacatgatctccacctacgggctgagcatgacgcaactggggatgattggtctgggcttctcgatcacctatggcgtaggcaaaacgctggtttcctactatgccgacggcaaaaacaccaagcagttcctgccgtttatgctgattctttccgctatctgtatgctgggcttcagcgccagcatggggagcggttccgttagcctgttcctgatgatcgccttctacgcgctgagcggtttcttccagagtaccggcgggtcgtgcagttactccaccatcaccaaatggacgccccgtcgtaagcgcggcaccttcctcggcttctggaatatctcccacaacctcggcggcgctggcgcggcaggcgtggcgctgttcggcgcgaactacctgttcgacggccatgtgatcggcatgtttatcttcccgtcgatcatcgcgctgattgtgggcttcatcggcctgcgctttggcagcgactccccggaatcttatggtcttggtaaggcggaagagttgttcggcgaagagatcagcgaagaggacaaagagaccgaagaaaatgagatgaccaagtggcagatctttgtggaatacgtcctgaaaaacaaagtgatctggctgctgtgcttctccaacatcttcctgtacgtggtgcgtattggtatcgaccagtggtctaccgtttacgcattccaggaactgaaactttctaaagaagtggcgattcagggctttaccctgtttgaagtgggcgcgctggtcggcacgctgctgtggggctggctgtcggatctggcgaacggtcgtcgtgcgctggtggcctgcgttgcgctggcgctgattatcgccaccctcggcgtttaccagcatgccagcaaccagtacgtctacctggcgtccctgttcgcgctcggtttcctggtgtttggcccgcagttgctgatcggcgtggcggcagtcggcttcgtcccgaaaaaagcgatcggcgcggcggacggcattaaaggcaccttcgcttacctgatcggcgacagcttcgccaagctggggctggggatgattgccgacggtacgccagtctttggtctgaccggctgggcgggcaccttcgccgcgctggatgccgctgccattagctgcatctgcctgatggcgatggtcgcggtgctggaagaacgtaaaattcgccgtgagaaaaaaatacagcaactgaaagtcgcttaa

SEQ ID NO: 73015 - DNA, 1329 bp, Citrobacter koseri
atgctgacgtttctgaaagctccggcaaatgcgccgttgataaccgataaacacgaagttgatgcgcgttaccgctactggcggcgacagatcttacttaccatctggcttggctacgcgctgttctatttcacccgtaaaagttttaatgccgccgtgccggagatcctcgtcagcggcgtgctgacccgcagtgatatcggcctgctggcgacgctgttttacatcacctatggcctgtcgaagtttgtctccggcattgtcagcgaccgttccaacgcccgttattttatgggcattgggctgatcgccaccggcgtggtgaatatcctgttcggtttctccacgtcgctgtgggcctttgtattactgtgggcgttgaatgccttcttccagggctggggagcgccggtgtgcgcccgtctgctgacgtcctggtactcgcgtaatgagcgtggcgggtggtgggccatctggaataccgcgcataacgtcggtggggcgctgattccgatcgtcatggctgctgccgctctgcattacggctggcgcgccgggatgatgattgccggaacgctggcgattatcgtcggcatttttctctgctggcggctgcgcgacaggccacaggctatcggtttgccagcggtcggggactggcggcatgatgagctggaaatcgctcagcagcaggagggcgcggggttgacccgcaaagagatcctgaccaaatacgtgctgttgaatccctatatctggctgctctcgctgtgctatgtgttggtgtacgtggtacgcgcggcgatcaacgactggggcaacctgtatatgtcggagacgctgggtgtcgatctggtcaccgccaacacggcggtcacgatgttcgagctgggcgggtttatcggcgcgctggtggcgggctggggctcagataaactgttcaacggcaaccgtgggccaatgaacctgattttcgctgccggaatactgctctctgtcggttcgttatggctgatgccgttcgccagttacgtgatgcaggcggcgtgcttcttcaccaccggcttttttgtctttggcccacagatgctgatcggcatggcggctgcggaatgttcgcacaaagaggcggcgggggcggcaaccggttttgtcggtctgtttgcctatcttggcgcatcgctctccggctggccgctggcgcaggtgatggaaacctggcactggaccgggttctttgtggtgattgccattgcggcgggcatttccgccctgctgctgctgccgtttttgaacgcgcaggcgccgcgcgaggccagcattacgtga

SEQ ID NO: 73016 - DNA, 1503 bp, Citrobacter koseri
atgaaaaccatcctctcccggttaattaccgttattgcctgcttttttatcttctccgccgcgtggttttgcctgtggagcatcagcctgcacctggttgagcgcccggagctggcagtactgctgttcccgtttggtttacgcctggggctgatgttgcagtgtccgcgcagctactggccggtattgctgggcgcggaatggctgctggtctggtggctggcgcaggaagtggcgctggcgcatctaccgcttttgatgatcggaagcctgttgacgctgttgcctgtggcattaatctcccgctatcgccatcagcgcgactggcgcaccctgctgttacagggcgcggccttgacggcggcggcattgttacagtctctgccctggttaggccagggggaagagacgttaaacgcgctgctgctgacgcttaccggcgggttgacgctggcgcccatctgtctggtgttctggcattacctgaccagcaccacctggttaccgctcggcccggcgctggtctcgcagccggtgaactggcgcgggcggcatctggtctggtatctgctgctgttcaccgtcagcctgtggctacagctgggtctaccggctgagctgtcacgctttacgccgttctgccttgctctaccgattattgcgctcgcctggcattacggctggcaaggggcgctgatcgcgacgttgatgaacgccatcgcgctgattgccagccagacctggcacgatcatcccgttgatttactgctttctctgctggcgcaaagcctgaccgggctgctgcttggcgcggggattcagcgcctgcgcgaactcaaccagtcgctgcaaaatgagctggcgcgtaaccatcgtctggcggaacgcctgctggaaacggaagagagcgtgcggcgcgacgtagcgcgggaactgcacgacgacatcggtcagaccatcaccgccattcgcactcaggcgggaattgtacagcggctggcggcggataatggcggcgtaaaacagagcggggcgcacattgagcaactgtcgctgggcgtgtatgacgcggtgcgtcgcctgctggggcgcttgcgtccacgccagttggatgacctgacgctggaacaggctatccgttcgctgatgcgggaaatggagctggaaagtcgcggcatcatcagccatctcgactggcgaatagacgagtctgcgctcagcgaaagccagcgggtaacgctgtttcgcgtttgtcaggaagggctgaacaacattgtgaaacacgctaatgccagcgcggttacgctacagggctggcagcaggatgagcggctgatgctggtgattgaagacgatggcagcggcctgccgccggattccggccagcaaggctttggtctgaccgggatgcgcgagcgcgtgacggcgcttggcggcgtgctggccatctcctgtacgcacggcacgcgcgttagcgtgtcgttgcctctgcgttacgtttaa

SEQ ID NO: 73017 - DNA, 591 bp, Citrobacter koseri
atgatcaccatcgcccttattgacgatcaccttatcgtccgctccggctttgcgcagctgctggggctggaacctgatttacaggttgtggccgagtttggctcggggcaggaggcgctggcgggattaccggggcgcggcgtgcaggtctgcatctgcgatatctccatgccggatatctccgggctggagttattaagtcagcttcctaaagggatggcgacgataatgctgtcggtacatgacagtccggcgctggtggaacaggcgctgaacgccggtgcgcgcggcttcctttccaagcgctgtagccctgacgagctgattgccgcggtacacacggtggcgacgggcggctgttacctgacgccggatatcgccgttaaactggcggctggacggcaggacccgctgaccagacgtgaacgccaggtggcggaaaagctggcgcagggaatggcggtgaaagagatcgccgccgagctggggctgtcgccaaaaacggtacacgtacatcgcgccaatcttctggaaaagctgggcgtcagcaacgatgttgaactggcgcgccgcatgtttgatggctggtaa

SEQ ID NO: 73018 - DNA, 1002 bp, Citrobacter koseri
atggaaatcgttgagcatctttttattgtttgctccccgcttcagctcagaattgtttctaagattaaagcgaggtataaacacgcacgttttcatatcatctaccttaaaacaaaggtagagttaaaatcctatatatatgaaacggttaataatgaattctcttctggcttagtcgccagtatggattatggctttattaacatgctgaaaatcaatcgctttctttctcataaaacaatccattatgtctatatggcgaatatcagccatctttcagtgcaatacattctaaaaatgttgtctgatgacgttaagattagaacgtttgatgatggcattctgagtatcaactccgcaggctatcttgataaacaaataaaactacgaaaaggccccggtcgtaagttgacgcggatgtggcttggtcagcattataatatcagggatatcgcgaaaagaagtgaactgcatttctctatcgtaaagcataaaagcaaaagtagaaatgtagactgcgatattgtttatattgatgttctctcagaggagaaacagcgcttgcatactgagcgcagtgcgcctgtctatgccggggagatcaatgtttttgtgggctcgaaatttaaagatatccttgatgtgaaaaatgattccaaccttattgcgttgattcataagatagagacgctcgcagcgcactatccttcactccagtacctcaggcacccaagagagtacagccagcaggtgtttggcatgacggaaattacgctgaacgccatttctgaagattatatttgccagttatcctcggcttaccagcgagtgaatgtctttggttttgcaagcacttgccagcttaatgtgatgaaattagagaatgtctacatcacactgctcaaaaccaccctgatccggcctgatattcgggattcctttgcgcttttttctgatagcgacaaagtgcgtatctgcgacctggacagtatggaaccgtaa

SEQ ID NO: 73019 - DNA, 291 bp, Citrobacter koseri
atgcagaaacaatcacatgagaacgttatcctggaactcaccgtccgtaaccaccctggcgtcatgacgcacgtttgcgggctgttcgcccgtcgcgctttcaacgtggaagggattctttgtctacccatccagagcagcgaccagagccgcatctggctactggtcaacgacgatcagcgtctggagcagatgattagtcagatcgataaactggaagatgtggtgaaagtggcgcgcaatcagtccgatccgtcaatgtttaataaaatctcggttttctttgagtaa

SEQ ID NO: 73020 - DNA, 1695 bp, Citrobacter koseri
atggcaagttcgggcacaacatcaacatccccgcgtacgcgctttacgggcgcagagtttatcgttcattttctggaacgtcagggcattaacatcgtcactggcattccgggcggttcgattctccccgtttacgacgccttaagccaaagtacgcaaattcgccacatcctggcgcgccatgaacagggggcggggtttatcgctcaggggatggcgcgaaccgacggtaaacccgcggtatgtatggcctgtagcgggccgggcgcgactaacctggtcaccgccattgccgacgcgcgtctcgactccattccgttggtatgcatcaccggtcaggttccggcctcgatgatcggcaccgatgcgtttcaggaagttgacacctacggcatctctatccccatcacaaaacataactatctggtcagagatatcaatgagttgccacaggtaatgtgcgatgcgtttcgccttgcccagtccgggcgccctgggccggtgtggatagacattcctaaggatatacagacggcggtgtttgacattgaagcgttgcctgctccggctgaaaaaatggcggcgccggaattcagcgctgagagcattcgtgatgcggcggcgatgatcaacgccgcgaagcgcccggtgctgtatcttggcggcggcgtgattaacgcgcctgcgcgcgtgcgtgaactggcggaaaaagccagactgcccaccactatgaccctgatggcgctgggcatactgccgaaggcgcatccgctttctctggggatgctgggcatgcatggcgcgcgcagcacaaactatattctgcaagaggcggatctgctggtggttctgggggcgcgttttgatgaccgggcgattggcaaaaccgaacagttctgcccgaatgccaaaatcatccatgtggatatcgatcgcgcggagctgggtaaaattaaacaaccgcacgttgccattcaggctgatgttgatgacgttctggcgcagttgattccgcacattgaggctcagccacgcgaagagtggcatcaactggtggcggatttgcagcgcgagttcccgtgcgcgatccctgaagccagcgatccgctcagccattacgggctgattaatgccgttgccgcctgcgtagatgacagcgcgattatcacgaccgacgtaggccagcaccagatgtgggccgcacaggcttatccgctcaaccgtccgcgtcagtggctgacttccggcgggctggggacgatgggttttggcttgcctgcggcgattggcgcggcgctggcgaacccggacaagaaagtgttgtgcttctccggcgacggcagcctgatgatgaatattcaggagatggcgaccgccagcgaaaaccaactggatgtaaaaattatcctgatgaataacgaagcgttggggctggtgcatcagcaacaaagcctgttctacaagcagggcgtgtttgctgccacctatccggggatgatcaactttatgcagattgccgcgggttttggtctggaaacctgtgatttaaataatgaagccgatccgcaagcggcgctgcgggaaatcatcagccgcccaggaccggcgctgatccatgtacgtattgatgcagaagaaaaagtttatccgatggtgccgccgggtgcggccaatactgagatggtgggggaataa

SEQ ID NO: 73021 - DNA, 861 bp, Citrobacter koseri
atgacaaccactgacgatacccaaaccatgaccctttccattttctgcattttgctgttcgccgcgctgctgcatgccagctggaacgccatcgtgaaggcgggaaatgacaaactttactccgcaatcagcgtcagtggttccgcagcgttgatggcgctggcgtgtctgcccttcgccccgccccttcccgccgccagcatcccttttttagccgcctccaccgccttacaggtggtttataccgtgctggtcgccaaaacctatcaggtttcggatatgagccagacttaccccctgatgcgcggcaccgcaccgctgctggtggcgataattagcgtcctgtttcttggcgatagcctttccacaatggcctggctcggtatcgcggtaatttgcctggcgattctcggcatggcctgtaacggtcgcacccgctcccggcggggtatcacgctggcgctgatcaacgcctgttttatcgctggctatacgctggtggacggtacgggcgtgcgggtgtcggaaaccgcgctgggttatacgctgtggaccttcttgttgaacggcacctgtctgcttggctgggcgatgattgcccggcggcgggaagcctcgcgctatctggcgcagcactggaagaaaggcatttttggcggtatcggcacgatgggttcctatgggctggcgctgtgggcgatgactcaggcgccgctggccgtggtggccgcactgcgtgaaacatccattctgttcggcgcgctgattgcctggctgctgctcaatgagaaagtcgccgggctacggttggtcgcggctggcgggattgccgccggggcgatattgctgcgtttatcctga

SEQ ID NO: 73022 - DNA, 1185 bp, Citrobacter koseri
atgaaaaggcagagaagcgtcaatttgttgttgatgttggtattactggtggccgtcgggcagatggcgcaaaccatttatatccccgccattgccgatatggcgcgtgaactgaacgttcgtgaaggggcagtacaaagcgtcatggccgcttacctgctcacctatggcgtatcgcaactgttttacggcccgctttccgatcgggtagggcgccgcccggtaatcctcgtcgggatgtccatttttatgctggctacgctggtcgcgattaccacccacagcctgacggtattgattgccgccagcgcgttgcagggcatgggcaccggcgtcggcggcgtgatggcgcgtacgctgccgcgcgatctgtatgaaggtacgcagttacgccacgctaacagcctgttgaatatggggattctggtgagtccgttgctggcgccgctgattggcgggctgctggataccgtctggaactggcgcgcctgttacgttttcctgctggtgctctgcgcaggcgtcaccttcagtatggcgcgctggatgccggagacgcgccccacaggcgcaccacgtacccgcctgatcgccagctacaaaacattattcggcaacggcgcatttacctgttatctgctgatgctgattggcggactggcgggaatcgccgtctttgaagcctgctccggcgtgctgatgggagcggtactgggtctgagcagcatggtggtgagcatcctgtttattctgccaattccggcggcgtttttcggcgcatggtttgcgggtcgcccgaataagcgcttcgcaacgctgatgtggcagtcggtattcagttgcctgttggcgggcgtcatgatgtgggtcccaggtctgtttggcgtgatgaacgtctggacgctgctgatccccgccgcgctgttcttcttcggcgccggaatgctgttcccactggcgaccagcggcgcgatggaacctttcccgttcctcgccggaacggctggcgcgctggtgggcggcctgcaaaacatcggctccggcgtgctggcgtggctctccgcgatgctgccgcaaaccgggcagggtagcctcggctttttgatgacacttatggggctgctgattttactgtgctggctgccgctggcgtcgcgtgtgccgcatcaggggcagacgatttaa

SEQ ID NO: 73023 - DNA, 1062 bp, Citrobacter koseri
gtgttaaagccgcttgcttctctcttcctgctcgtcagcgccacggtgtgcgcggctcagccgccgttgaccgcttcgcgctatgcgcagcagcttggtgtggggatggacgttgactgggcgcgcaccgaacggggtatccgggagtttgatcctctggtggtgcgtgattttcaggcgaagggatttaagcatgtgcgcatacgcgtcgcgggagagccgacggaagcgcgactcatccacctgcgaaaactggtggaggcgtgtgagcagtatggcgtgattccaatcattgcttatcaggccgatgagtataaaaacgaccccagccccggcaatgaacaagaggtgatcaactggtgggtggccgtcgcgcgctattttgcgcaacgttcgccgctgctggggtttgacctgatttatgaaccggcggagaaactcaaccacagccaggcttccctgaaccgggtatatgacaaaaccatccgcacccttcacgcgattgacccccaacgcatgatttttgtcgcgcctcgtttgcgcgccgcgccggaagcgttgtcggccctaaaactgcccccgcaaagccagaattacgtgctggcggagtggcatatctttccgtgggggccgttgaaaaataacggtaaatacccgtggacgtcgggcacggcggcagagaaagcggcgattcgcgcgcgaattaacgccgccgtgcgctggcagcaaaaaaccggccatgtcagttgggttggcggctgggcgccgggcgaatcaatcaaaaatagcccttccgcttcgcagctcgcgtttgcccgatttatggcgtgcgagttgcaaagggtgaatattccgtatgcgattaacgcggatacgcagttttatgacggggaagaaggggcgtggcgcccggcgctggagccgctcctgaccacgatgatctcgccggtatgtgaaaagcccggcgggaaaccgggccatcattcgattaaatcgtctgcccctgatgcggcacacgcgacgccagcggcagccagcacagtaaaatcagcagccccataa

SEQ ID NO: 73024 - DNA, 927 bp, Citrobacter koseri
atggaccccttacgcgacggcagaaaccgtttactcaacggctggcaattatcaaagctgtacacctttgaagtggcggccaggcatcagtcttttgcgctggcggcggatgagctgtcgctaagtcccagcgcggtcagccatcgaatcaatcaactggaagaggagctggggattcagctctttgtccgttcgcaccgcaaagtggaactcacccatgagggcaagcgggtattctgggcgttgaaatcgtcgctggatacgctgaatcaggaaatcctcgatattaaaaatcaggagttgtcagggacgctgaccgtctattcgcggccttcgattgctcagtgctggctggtgcctgcgctgggagattttactcgtcgctatccgtccatctcgctgaccatgttgaccggtaatgacaacgtgaatctccagcgggcagggattgatttagcgatctattttgatgatgcgccctcggcgcagctgacgcatcacttcctgatggatgaggccattctgccggtgtgcagccccgaatatgcccgtcatcatgacttaacgaatgcgcgggttaacctgcgccactgtacgctcctgcatgaccgacaggcatggagcaacgactccggcaccgatgaatggcacagttgggcgcagcattttggcgtgaatctgccgacatcgtcgggcattggcttcgatcgttccgatttagccgttattgcggcaatgaaccatatcggcgtggcgatggggcgtaaacggctggtgcaaaagcgtcttgatagcggcgaactgattgcgcctttcggtgagatgacgctgaaatgccaccagcactattatgtgaccactctgcctggcagacagtggccgaaaatcgaggcgtttatcggctggttgcaggagcaggcgacgtag

SEQ ID NO: 73025 - DNA, 1338 bp, Citrobacter koseri
atgcactctcaaatttgggttgtgagcacactgctggtaagcatcgtgctaatcgtgctgaccatcgtgaaattcagattccacccgtttctggcactgctgctggccagtttctttgtgggcgcgatgatgggcatggggccgctggagatggtcaatgcgattgaaagcggtattggcggcacgttgggcttcctcgccgccgtcatcggtctcggaaccattctcggcaaaatgatggaagtgtccggcgcggcagaacggatcggcctgacgctccagcgttgccgctggctttccgctgacgtgatcatggtgctggtggggctgatttgcggcatcacgctgtttgtggaagtgggtgtggtgctgctcatcccactggcattttcgatagcgaagaaaaccaacacgtcgctgctgaagctggctattccgctgtgtaccgcgctaatggcggtgcattgcgtggtgccgccgcatccggctgcgctgtttgtggcgaataagctgggcgcggatatcggttccgttatcgtctacggtttgctggttgggctggtggcgtcgctggtcggcgggccgctattcctgaagttcctcggcaaccgcctgccgtttaagccggtgccgacggagtttgcggatctcgaagtgcgcgatgaaaatacgctgccttctttacgcgcgacgctgtttaccgtcctgctgccgattggcctgatgctggtaaaaaccgttgccgaactgaatatgacgcagggcggcacgctgtatacgctgctggagtttatcggcaacccgatcaccgcaatgtttatcgccgttttcgtggcctattacattctcggcctgcgtcagcatatcggtatgggtacgttgctgacccataccgaaaacggctttggctcgattgctaacatcctgctgattatcggtgcaggcggcgcgttcaacgctatcctcaaaagcagcggtctggcggatacgctggcggtgatcctctccaatatgcacatgcacccgattctgctggcctggctggtggcgctgattctgcacgccgcagtgggttccgcaacggttgcgatgatgggcgcgacggcgattgtcgcgccgatgctgccgctctaccccaacgtcagcccggagatcatcgccattgccatcggttccggcgcgattggctgcacgatcgtgaccgattccctcttctggctggtgaagcaatactgcggcgccaccctgaatgaaacatttaagtactatacaaccgcgacatttatcgcgtcggttgttgctctggcgggcacattcctgctttcctttatcatctaa

SEQ ID NO: 73026 - DNA, 1329 bp, Citrobacter koseri
atggaaaacgctaaaatgacttcactcatcgctcagtatcctctggtagaggatctgatcgccctcaaagaaacgacctggtttaacccaggcaccacctctcttgcggaaggtttaccctatgttggtctgacagcgcaggatgtacaggatgcgcatgcccgcctggcccgtttcgcgccgtatctggcaaaagccttcccggaaaccgccgcaaccggcgggattattgagtctgaactggcgatcatccccgcaatgcagcagcggctggaaaaagagtacggacagaaaatcagcggcgaacttctgctgaaaaaagacagtcacttaccgatttccggttcgataaaagcccgtggcgggatttatgaagtgctggcccacgcggaaaaactggcgctggaggcgggtctgctgacgaccgaagatgactacagcgtaatgctttcaccggagttcaggcagttcttcagccagtacagcattgccgtgggttcaaccggtaatctggggctgtcgattggcattatgagcgcctgtatcggctttaaggtgacggtgcatatgtccgccgacgcccgcgcctggaagaaagctaaactgcgcagccacggcgtaacggtagtggaatacgaagaggattacggcgtggcggttgagcaagggcgcaaagcggcacagtccgatccaaactgtttcttcattgacgatgaaaactcccgcacgctgtttttgggctatgcggtggccgggcagcgcctgaaggctcagtttgcgcagcaggggcgcgtggtggatgccgaccatccgctgtttgtctacctgccgtgcggcgttggcggcggccctggcggcgtagcttttggtctgaaactggcatttggcgacaacgtccactgcttcttcgccgaaccaacccactctccgtgcatgttactgggcgtatataccggtctgcatgatgccatttccgtccaggagattggcgtcgataacctgacggcggcagacggcctggcggtggggcgcgcatccgggtttgtagggcgggcaatggaacgtctgttggacgggctgtacaccctcgacgatcggacgatgtacgacatgctgggttggctggcgcaggaagaaggcattcgcctggagccgtccgcactggcgggaatggccgggccgcagcgtgtttgccgttcgacggattaccagcagatgcacgccttcagcgctgagcagcttaatcacgccacgcatctggtgtgggcgaccggcggcggtatggtgccggaagaagagatggcgcagtacctggcgaaagggcgctaa

SEQ ID NO: 73027 - DNA, 1095 bp, Citrobacter koseri
atggctaaaccggccagctcacgttgtaaccttgattgccattactgtttttatatcgataaaccctctcaacccgttatggataacgcgaccttagaggcttttatttgccagcatattgccgcgcagccggttgatgatgtgctgtttgcctggcagggcggagagccgacgctgtgtggactcgatttttttcaccgcgtggtcgcgttgcaaaaacgctatggagaggggaaacgcatccagaataccttccagactaacggcattttactcagtgacgagtggtgccgattcttacgcgataatggctggctggtcggtatctcactggatggccccgccgatttacatgatgcttaccgcgttagccgtagtggaaaaccaacgcatcataaggtggtggaagcgatagcaaggctggttgcccatcgcgtggacttcaacctgctggtggtggtgaatcggctgaacagccagcagcctgcgcgtatgtatcgctatcttcgccagcttggcacgccttttcttcagttcattccgctggttgaacatgacgatagcgacaaactgaccgctgattccgtgacgtcggaagactgggggcattttctcaacgatgtgtttgatctctgggttcgggaagatattgggcgcgtttttgtgcaactgtttgattcgatgctgggcgtgtggagcgggcatccggcacaaatgtgcgcgcttagcgaaacctgcggtcacgcgttcgccctggaagcaaacggcgatctctatcagtgcgatcactatgtctacccggcgttccggctgggtaatatccatcaaacgccgctacatatgctgaatgccagcccgcaggcgagtgaatttggacagcagaaaaaatcaacgctgggggcggattgcctggactgcgccttattgcgattctgcaacggtgattgtccaaagcatcgggatttaagcgggaaaagcgtgctgtgcggcgggtataaagcgtttattaaccacacgtcgccgcatatgcgcgtcatgcgggatctgattaaacagcatcgctcaccgatggagctgatggcgatgctgcgttaa

SEQ ID NO: 73028 - DNA, 363 bp, Citrobacter koseri
atgccggatagccgcaaagcccgccgtcaggttgatcccggtctacagccggagcgcacgtcgctggcctggtttcgtaccctgttaggctatggcgcattgatggcgctggcgctgaaacataactggcatcaggcggggtttctgttctgggtttctattggcgtgctggcgattgtcgcgctcatcctctggcgctatacccgcagccgtaacctgatggatgtggcgcacagtgatttttccgaatctcgcgccgtgcgtgacaaatttttgatctctctcgcggtgttgtccctcgcaatactgtttgctgtaacgcatattcgtcaacttatcgtctttattagggatgttgcatga

SEQ ID NO: 73029 - DNA, 348 bp, Citrobacter koseri
atgaagatttcccgcctcggagaagcgccggattaccgcttctcgctggcaaatgagcgtacctttctggcgtggattcgcaccgcgctggggtttctggcggcgggcgtcgggcttgaccaactcgcgccggacttcgccacgccggtgattcgcgaactgctggcgctgctgctgtgtctctttgcgggcggcctggcgatttatggctatctgcgctggctacgcaacgaaaaagcgatgcgtctgaaagaagacctgccgtacacccatagcctgatgataatcagcctgatgctgatgattgttgcggtgattgtcatggcgctggtgttgtatgccggatag

SEQ ID NO: 73030 - DNA, 1494 bp, Citrobacter koseri
atgacccgtccgaattttctgttcattatgaccgatacacaggcgaccaatatggtgggctgctatagcggtaagccactgaacacgcagcatattgacagcctggccgctgaagggattcgttttaactccgcgtatacctgctcgccggtgtgtacgccagcccgcgcggggctttttaccggtatttatgccaatcagtccggcccgtggacgaacaacgtcgcaccggggaagaacatctccacgatggggcgttattttaaggatgcaggctatcacacctgctatatcggcaagtggcacctcgacgggcacgattactttggcaccggcgagtgcccgcctgagtgggatgccgactactggtatgacggtgcgaactacctttctgaactgacggagaatgaaatcagcctgtggcgtaacggactgaacagtattgaggatttgcagaccaataatattgatgagacctttacctgggcgtatcgcatcagcaaccgggcggttgattttctccatcagccagcgagagatgacgaaccgttcctgatggtggtctcttatgatgagccgcatcatccgtttacctgtccggttgagtatctggagaagtatcaggatttttattatgacctgggcgcgaaggcgcaggattcgctgagcaataaacctgagcaccatcggctatgggcgcaggcgatgccgtctccggtaggcgatgatggctgttatcatcatccactctactttgcctgcaatgactttgttgacgatcagattgggcgggtgatcaatgcgttaaccctggaacaacgtgagaatacctgggtgatttatacctccgatcacggtgaaatgatgggggcgcacaaactcatcagcaaaggggcggcaatgtatgatgacattacccgcatcccgctgattatgcgcccgccgcagggagcgccgcagcagatcgatacgccggtcagccatattgacctgctgcctacgatgatggcgctggcggggattgataagcccgatattcttccgggtgaaaacatcctggccgttgaagcgccgcgcggggtgatggtggagttcaaccgctatgagatcgagcatgacagctttggcggctttattccggtgcgctgctgggtgacggataactggaagctggtgctgaacctgtttaccagcgatgagctgtacgacaggcgtaatgacccggatgaactgcataatctgattgctgcgccggaatttgccggtgttcgcagtcagatgcacgacgcgctgctggattacatggataaaatccgcgacccgttccgcacgtatcagtggagcctgcgtccgtggcgtaaagatgcccggccgcgctggatgggggcattccgcccacgtccgcaagacggttattctccggtggtacgtgattacgataccggtttgcccacgcaaggcgtgaaagtagaagagaaaaagcagaagttttga

SEQ ID NO: 73031 - DNA, 1716 bp, Citrobacter koseri
atgaatacgctacaaattttgagctttgttggttttacgctactggtggcggttatcacctggtggaagttacgaaaagcggataccggttcgcagcagggatattttctggcgggacgttcgttaaaagcgccggttattgccgcctcgctgatgttaactaacctctcaacggaacaactggtgggattaaccggccaggcttaccgcagcggtatgtcggtaatggcatgggaagtcatctccgcaattccgcttatttttctggcgctgatctttctgccacgctatctgcaacgcggcattgcaacgatcccggattttattgaagagcgctatgacaaaaccacccgcatcattatcgattgctgttttttgattgcgacgggaatctgttttttacccatcattctgtattccggcgcgcttgcctttaacagcatgtttcatgtcactgaaacctttggtatttcacaacatacggcgatctggctgatggctgtcgtgctggggattagcggcatcctgtatgctgtcgtcggtgggatgcgggcgattgccattgccgatgtgattaacggtatcggcctggtgattggcggcctgatggtgccgctgtttggtctgatggcgatggggaaaggcagtctgagcgaaggtattacgcgtttaacccaggatcacagccagatgctgaactcgattggcggcagcaacgacccggtgccgattggcgcggcgttgaccgggcttatcctggtcaatacgttctactggtgcaccaaccaggggatcgttcagcgtacgctggcatcaaaaagtttatcggaagggcaaaaaggggcgctgcttacggcggtgttgaagatgctggacccgctgattctggtgctgccgggcgttatcgcttttcatctctttcaggatctaccgaaagcagacatggcctatccggcgctggtgaacaaagtgatgccgctgccgctgattggcttttttagcgcggtgctgtttggcgcgattatcagcgcattctgcggttttttgaacagtgcttcgaccctgtttagcctcggtatctatcgccgactgattaatgaacaggccagccccgataaactggtcactgttggtcgtcgctttggctttattgtggccgtgatctccgtactggtagcgccgtggatcgcctatgcgccgcaagggctctacagttggatgaaacagctcaacgggatttataacgtgccgttggtgaccattgttattatgggcttcttcttcccgcgtattccggcgctggccgcgaaggtcgcaatgggactcggtattgtcagttacatcaccatcaactacctggtgaaatttgattttcatttcctctatgtgctggcctgtaccttctgtatcaacgtcgtggtgatgctgctcattggcgtgattaagccgcgtgcaacgccgtttaaatttcatgatgcgtttgcggtcgacatgaaaccgtggaaaaacgtgaagatcgccgccgttggcgtcctgttcgcgatgattggcgtctattctggtctggcgcagtttggtggctatcagacccggtggctgaccattctcagctacgctatcaccgctgcggtggttgtttacctgatttacagctcatggcagacgcgccattccgcgcctgtggtttatgtttctgacgctaaggataaagcatga

SEQ ID NO: 73032 - DNA, 1002 bp, Citrobacter koseri
gtgccgggtcaggcagtcagatttcttaattacaaacatcgcctccctgaagcattcactttctgttatgttcaggttgtgggcatcattctccggcgagaaaataaaatgaatggaaacttgctaagttcgcatgtaaaaaacgaaactacgtacaatattcccctgctgattaatgaaaatgtgatctccagcggaatttcattgatctcgctgtggcatacctacgctgacgaaaattaccgtgttatatggccgcgagataagaaaaagccgctaatcgccaattcgtgggtcgcggtctataccgtacaggggtgcgggaaaatcctgctgaaagacggcgagcaaattacattaaacggcaactgcattatctttttaaaacccaccgatatacagtcttaccattgcgaaggtttattgtgggagcaatattggatggagtttaccccaaccagtattatggatattcctatccgacaacaaagcgttatttataacggtgacgtttataatcaggaactggccgaagtttcacaattaattaccagcccggaaccgattaaaaataatctcgccgtcgcgtttctcacgaaaattatttatcagtggatttgtcttattgactcaaacgggaaaaaagacccacaacgcatacaggttgaaaagttaattgcagcgttacatgccagcctgcaacgccgctggagcgtggcggatatggcagccacgatcccctgtagcgaagcctggctgcgtcgtctgtttttacgctataccgggaaaacaccgaaagaatattatctggacgcccggctggaactggcattatcgctgttaaaacaggaagggaatacggtgggtcaggtagcggatatgctcaacttctttgactcatttcatttcagcaaagcatttaagcataaatttggctacgcgccgtcggcggtgttgaaacatcctgaccggcacccgctggatgccggtcaacaagattag

SEQ ID NO: 73033 - DNA, 1323 bp, Citrobacter koseri
atgaaaaaattctcagtggttatcgcaggcggcggcagcacatttacgccgggcatcgtattgatgttgctggcaaaccaggaccgttttccgcttcgcgcgctgaaattctatgacaacgacggcgctcgccaggaagtgattgccgaagcgtgcaaaatcatccttaaagagcaggcgccggagattgagtttagttacaccaccgatcccgaagcagcgtttaccgatgttgattttgtgatggcgcatatccgcgtgggtaaatacccgatgcgggaaaaagacgaaaaaatcccgctgcgccacggcgtgttaggccaggaaacctgtggcccgggcgggattgcgtatgggatgcgttctattggcggcgtgctggagctggtggattacatggagaaatactccccgaacgcgtggatgctgaactactccaacccggcggcgatagtggccgaggcgacgcgacgtctgcgcccgaacgccaaaatcctcaatatctgtgatatgccgatcggcattgaagggcggatggcgcagattgtcggcctgcaagatcgtaagcaaatgcgcgtgcgttattacgggctgaaccactttggctggtggacgtcgattgaggacttgcagggtaacgacctgataccgaaactgcgggaatacgtcgcgaaacacggttatgttccgccatctaacgatccgcatactgaagcgagttggaatgatacgttcgccaaagcgaaggatgtgcaggcgctggacccggacaccatgccgaacacctatctgaaatactatctgttcccggactatgtggtgcagcactcgaacccggcgcgcacgcgtgctaatgaggtgatggatcaccgtgaaaaacaggtatttggctcctgccgcgccattattgaagcgggccactcctccgctggcgagctggaaattgatgaacacgcgtcttatatcgtcgatctggcaacggcaatcgcctttaatacgcaggaacggatgctgctgattgtgccaaacaacggggcgattcataactttgatgatgaagcgatggtggagatcccttgcctggtggggcataacgggccggaacctctgacggttggcgatattccgcagttccagaaagggctgatgagccagcaggtggccgtcgagaaactggtggtcgatgcctgggagcatcgctcctatcagcgtctgtggcaggcgattacgctctccaaaaccgtgccgagcgcgtctgtcgccaaagcgattcttgatgatctgattgaagccaacaaagaatactggcctgaactgcactaa

SEQ ID NO: 73034 - DNA, 1620 bp, Citrobacter koseri
atgctcagtcaaatacaacgctttggcggcgctatgtttaccccggtactgctgttcccgttcgccggtattgtcgtgggtatcgccatcatgctgcgcaacccgctttttgttggcgaagcgctgaccgatcccaacagtttattcgcgcaaatcgttcatattattgaagagggcggctggacggttttccgtaatatgccgctgattttcgccgtcggcttgccaattggcctggctaaacaggcgcaaggccgagcttgtctggcggtgctggtcagcttcctgacatggaactatttcattaatgccatgggcatgacctgggggcatttcttcggcgtggacttcagcgtagacccgacggcaggcagcggtctgacgatgatggccggaataaaaacgctcgataccagcattatcggcgccatcatgatttcgggcatcgtcaccgcgctgcacaaccgctatttcgataagccgttgcccgtgttcctcggtatttttcagggcacgtcgtttgtggtgattatcgcgttcctggtgatgatcccctgcgcctggctgacgctgctcggctggccaaaagtgcagatgggcattgaatccctacaggctttcctgcgttcagcgggcgcgctgggcgtgtgggtctacaccttcctcgaacgtattctgatcccgacagggctgcatcacttcgtctatggccccttcatttttggcccggcggcggtagaaggtggcattcaggtttactgggcgcaacacatgcaggcgttcagccagagcacggaatcgctgaagacgttattcccggaaggcggttttgccctgcacggtaactcaaaaatctttggctccgtcgggattgcgctggcgctctattacaccgcatcgccagaaaaccgggtgaaggtcgccggtttgctgatccccgccacgttaaccgctgtactggtgggcattacggaaccgctggaattcactttcctgtttatctctccgctgctgtttgccgtacacgcggtgctggcggcctcaatggcgacggtgatgtatatctgcggcgtggtaggaaatatgggcggcggactgctggatcagttcttaccgcaaaactggatcccgatgttccacaaccatgccggaatgatgtttacccagataggcatcgggctggcattcaccgccctctattttgtggttttccgcaccctgatcctgcgcttcaacctgaaaacgccgggtcgtgaagagagtgaagtcagactctacagcaaagcggattacaaggccgcgcgtggacagacaacggcgcccgcgccggacgcaaaacttgggcaggcagccggattcctccaggcgctgggcggtgcgggcaatatcgaaagcattaataactgcgccacgcgcttacgtatcgcgctccacgatatggcgcagacccagagtgatgacgtctttaaagcgctgggcgcgcacggcgtggttcgccgtggcaatggcatccaggtgattgtcggcctgcatgtgccccaggtgcgtgaccagcttgaaacgctaatgaaatcccccttatcgaccgaacaaatccccatgacggaggcagtatcatga

SEQ ID NO: 73035 - DNA, 723 bp, Citrobacter koseri
gtgatctacaaatcgatagcggaacgactaagaatccggctcaactcatctgattacaacatcggtagcccgttgcctggtgaaaaaaagctggcggaagagtttgctgtgtcacgaatgaccatccgcaaagccgtcgatatgctggtggggtggggactggtggtgcggcggcacgggagcggcacatacgtggcgcgtaaagacgttcatcatgaaaccaccaacctgaccggactggcggaagtgctgcggcgtcagggaaaagaggtcaccagccaggtactggtgtttgaagtgatgcctgcgccccccgccattgccagccagttgcggattcagatcaacgaacgtatctacttttcccgccgcgtgcgctatgtggatggcaaaccgctgatgctggaggacagctatatgcccgtcaggctgttccgtaacctctcgctgatccacctggaagggtcgaaatttgattatattgagaaagagtgcggcatcaccatcagtggcaactatgaaagcctgacgcctgtactggccgataaacagctctccgcgcaaatgaacgtccccgagcaaacgccgctactgcggatcacatcgctttcttacagcgacagcggggaatttttgaattattcggtcatgttcagaaatgccagcgaataccaggtggactaccatttacggcgcgtccacccggatgcaaacctgacctag

SEQ ID NO: 73036 - DNA, 1662 bp, Citrobacter koseri
atgagtgatatagcattgacggtcagcgttctggcgttggtggcggttgtcgggttgtggatcggcaatatcaaggtgcggggtgtcggttttggcattggtggcgtactgttcggcgggattatcgtcggccactttgtcgatcaggccgggatgacgctgagcagtgacatgctgcactttatccaggaattcggcctgatactcttcgtttacaccattggtatccaggtggggccggggttctttgcctctctgcgcgtctcagggttgcgccttaatctctttgccatcctgattgtcattatcggtgggctggttaccgccattctgcataaaatcttcgctatcccgctaccggtggtgctggggattttctccggcgcggtcaccaatacgccagcgctgggggccgggcagcaaattctgcgcgatctgggaacgccaatggaagcggtggatcagatggggatgagctatgcgatggcctatcctttcgggatttgcggtattttgctcaccatgtggttgatgcggatgatttttcgcgtcaacgtggaggcggaagcgaagcagcatgaagacacgcttagcaatggacactcgttaatccagaccatgaatatccgtgttgagaacccgaatctcaacaatatggcgatccaggatgtgcctatcctgaacagcgataaaatcatctgttcgcgtctgaaacgcgacgagacgctgatggtgccttcaccgggaacgatcatccagtcgggcgacctgctgcatctggtgggacagcccgccgatctgcataacgcgcagctggtcattggtcaggaggtggacacttcgctctcaacgcgagggacggatttgcgcgttgaacgcgtcgtggtcactaacgaaaaggtgctcggaaaacgcattcgcgacctccattttaaagagcgctatgacgtggtgatctcccgtctgaaccgtgcgggcgtagagctggtggccagtagcgacgccagcctgcaatttggtgacatcctcaatctggttggccgtccctcttcaattgatgcggtggccaatgttgtgggtaacgcccagcaaaaactgcaacaggtgcagatgttaccggtgtttatcggtattggtctgggcgtgctgttggggtcgattccgttgtttgtccctggattcccggtagcgttaaagctgggactggcgggcgggccgctgatcatggcgctgattctgggacgtatcggcagcattggcaagctgtactggtttatgccgccaagcgccaacctggcgctgcgtgagctggggatcgtgctgtttctcgcggtggtcgggctgaaatctggcggtgactttattgatacgttgactcagggtgatggtctgagctggattggttacggcatctttattactgccattccgctgattaccgtcggtcttctggcgcgtatctttgccaaaatgaactacctgacgctatgcgggatgctggcggggtcaatgaccgatccgcctgcactggcgtttgctaacaacctgcatgccaccagcggtgcggcggcgctctcctacgccaccgtttatccactggtaatgttcctgcggattatcaccccgcaactgctggcggtgcttttctgggggttaggctag

SEQ ID NO: 73037 - DNA, 429 bp, Citrobacter koseri
atgcgtaattacgatttatccccactgctgcgtcaatggatcggttttgacaaactggccaacgccctgcaaaacaccggtgaaagccagagcttcccgccctataacattgaaaaaagcgatgacaaccactaccgcattaccctcgcgttagccggtttccgtcaggaagatctggatattcaactggaaggcacgcgcctgaccgtaaaaggcacgccagcgcagccggaaaaagaaaccaaatggttgcatcagggcctggtgacacagccattcagtctgagttttactctggcagaaaatatggaggtcagcggcgcgaccttcaccaatgggttattgcacattgatttaacccgcaacgagccggaaaccatcgctccgcagcgtatcgccattagcgaacgtcccgcgttaaatagctaa

SEQ ID NO: 73038 - DNA, 414 bp, Citrobacter koseri
atgcgtaactttgacttatccccgctgtaccgttctgccattggttttgatcgtctgtttaaccttttagaaaacaaccagagccagagtaatggcggttatcctccgtataacgtcgaactggtggatgaaaaccattaccgcattgcgattgccgttgcaggctttgcggaaagcgaactggaaattaccgctcaggataatctgctggtggtaaaaggcgctcatgcggatgagcaaaaagaacgtacctatctctaccagggtatcgcagagcgtaactttgaacgcaaattccagttagcagagaacattcatgttcgcggcgctaacctggtgaacggtctgctgtatatcgacctggagcgcgtgattccagaagcgaacaaaccgcgccgtatcgaaattaactga

SEQ ID NO: 73039 - DNA, 333 bp, Citrobacter koseri
atgataaaaaatgtgttgttaacgctgatgatgtgcagtggattggttttactgggtggctgctccagcgtaatgtcacataccggcggcaaagaggggacctaccccggcacacgcgccagcgccgaaatgatcggcagcagtgatacaaactggggcaccaaatcgctggcaatcctggatatgccctttaccgccgtcatggatacgatactcttgccgtgggacttcttccgcacagacagctcagtgaagtcgcgagtggaaaagagcgaggagaaaacgaagatgaccaacgccgttatccccccggcaaaaatgcccgctcactga

SEQ ID NO: 73040 - DNA, 1227 bp, Citrobacter koseri
atgaaacaaatcactttcgcttcgcgtcatcatcagcttacgaataccaacacctggacggcggacagccagtggctggtttttgatgtgcgtccgtcaggcgcctcgtttaccggtgagacgattgagcgcgtcaacgtacggactggcgagattgaggtcatttatcgcgctacgcagggcgcgcacgttggcgtggtgactgttcatccacaagacgatcgctatgtgttcattcatggcccggagaacccggacgagacgtggcgttatgatttccaccatcgtcgcggcgtgatagcggcgcaaaaccgcgtgacgaatctggatgcaatggacatcaccgtgccgtatacgcccggcgcgctgcgcggcggcagccatgtgcatgtgttcagtccgaacggcgagcgtgtcagcttcacctataacgaccatgtactgcatgagcgcgatccggtgctggacttgcgcaacgtcggcgttgcggtgccgtatggcccggttacggtagcggttcagcatcctcgggagtacagcggcagccactggtgcgtgttggtgagccagaccacgccggcgccacggccgggcagcgatgacattaaccgtgcctacgaagagggttgggtgggcgatcatgcgctggcgtttattggcgataccttgtcggcgaagggtgaaaaagtgccggagctgtttctggtggcgttgccgcaggatgaaaaaggctggaaacaggcaggcgatatgccgctgaccggaacagaatcaacgctgcctgcgccgcctgcgggcgtcgttcagcgccgtctgacctttacgcacgatcgcgctttccctgggctggtaaacgttccgcgccattgggtgcggagtaacccgcaagccacggacattgcgtttttgatgcgcgatgatcgcggtattgtccagctctggctgatcccggtgcaggggggagagccgcgccagcttacgcataacgcgaccgatattcagtcagcgttcaactggcacccgtcaggccagtggttggggtttgtgctggaaaaccgcattgcctgctgcgacgcgcagagcggggcaatcacctttttaacggcgagtcatgacagcccgccttcagcggacgccgttgttttttcgccggatggagcgttaatcgcgtggatggaagaggttgacggtttccgccagctttgggtgacggaaaccgaacgataa

SEQ ID NO: 73041 - DNA, 879 bp, Citrobacter koseri
atgcgaaaaaaaataatcctgacttctttgatagcgttagccagtctgagcctgagctcctgtagccagcctgcatcaataaaccagaataaaccattacaaacagcctgtgtttctgacgggcaaatagttgatttaaaaagcaataaaaccattaccaaacaagagcttttggctgagcttgccgttgcccggcagcttattattggcgaaaaacacgataatgccggacatcatcagattgagctctggcttattcaaaacctgcccacccggcgaccacaggggagtgtgctgcttgagatgctgacggcagaccagcagccccgcgttaaccaggttaaacgctggctgaaagatgatcccgtggtccgggatggccgtattcaggaactgcttaactggcaaaaagggtggccctgggagatgtatggcgacatagtcatgcaggcattacgtgcgccttaccctctgctcaatgccaacattgaccgggatcgggtaatggcgctgtacaaaaaaaacgaatttcctgaagggaaaaaatctacagctcctgcggtacaagaagctctgcgcgaaaccatcatagccatgcatgaaggcagcattgaaggccagcaactggcgtcaatgctctctgttcagcaacagcgggatcgctacatggcccgccagcttctggatgccccggctccgtcgttgttgattgcaggaggttatcacgcgtcaaaaagtatcggcgtaccgttacacatagaagatctcgcccccggcacccagcctgtggtgctgatgctcgcagaaaaagggatgaacatcaccatagatcatgctgactacgtgtggttcgtgacgccagacactgcaaaacggtaa

SEQ ID NO: 73042 - DNA, 786 bp, Citrobacter koseri
atgaatattctctaccttccacgaccggcaaaatggagcggctggtttatctgttcactgctgcttcatggactgcttttccttgcgtttgtctggcggttttccgacgtacagcccgccacgcctcctgccccggcgataatgctgcaatgggccgataatatcgaggctccttcttctcctcttccgcttccggtgggaatcgctcagcaggaatccgcagcggcagaagaaaagcagcaggctgaggacaggcagcagcatcctgtcactgaagacagggatgcgaccattgaaataaccaggaagaaaaaggcatccgacggggaaaagaaaaagccacgtccgccacgtaagataaaggatcaaaccagcgacagcagccacgcagcagtttccagtaatgccgcgcctcaggccccggtcgaatcatcccgtattgctgcgcctttcaacagcgactcagcgaagcgagacaattccggtgcatcctgggaaagcagagtgaaaggccaccttaaccgttataaacgttacccaggcgatgccagaaaacgcgcacgaaccggcacagccatagtgacttttaccgttaacgcacaaggcaccgttgtcagtaattctctggcaacgtcttcgggaaccctctctctcgatcgcgaagctgttgccgttttagaacgcgctcaaccacttcccagaccaccagctgaaatattagagggaggcttctttaaagtaaaaatgccgattacctttgatctgacggagttaagggaaaattag

SEQ ID NO: 73043 - DNA, 2262 bp, Citrobacter koseri
atgaacattattaaactggccatcggctcaggcatattattgctcaactgcggtgcttacgcacaatccatcagtgaaaaaacaggtaccgataaaaaaggagcggcagaattcagcccgctcaacgtttctatcgggaagacgaccagtgagcaggaagctcttgagaaaacaggcgcgaccagttcccggacaacggacaaaaacctgcaatcactcgacgcaacgctgcgcagcatgcccggtacttatacccaaatcgatccaggccagggagcagtaagtgtgaatattcgcggcatgagcggatttggccgcgtaaacactatggtggacggtatcacccaaagtttttacggctcctcaacctccggtaccactgcacatggctcaaccaacaatatggctggcgtacttatcgaccctaattttctggtagcagttgatgttacgcgcggcgacagcaatggcccggcaggagtcaacgccctggccggtagtgcaaacatgcgtactattggcgttgacgatgtgatatttaacggcaatacatatggccttcgttcacgtttctcagtcggcagcaatgggcttgggcgcagcggaatgatcgccgtcggtggaaaaaccgacgcttttacggatacaggcagcgttggcgttatggccgctgtgagcggcagttctgtttactctaatttctcaaatggctctggaattaacagcaaagagtttggttatgataaatatatgaagcagaaccccaaatcccagctgtataaaatggatatcagaccagacgaatttaacagtttcgaactttccgctcgaacctatgaaaataaatttacacgtcgtgatataaccagtgacgactattacattaaatatcattacacccctttttctgaattaattgactttaacgtaacggccagtaccagccgcggtaatcaaaagtatcgtgatggctcgctgtatactttctacaaaacctcagcgcaaaatcgttctgacgcgctggatatcaacaataccagccggttcactgtcgcggacaatgacctggagtttatgctgggcagcaaactgatgcgtacccgctatgaccggacaattcactcagcggcgggcgacccgaaagcgaatcaggaatcgatcgagaacaatccgttcgcaccctccggccagcaggatatttcagcgctgtataccgggctgaaggttacgcgcggcatctgggaggcagatttcaatctcaactacacacgtaacaggatcacagggtacaagcccgcctgcgattcacgcgttatctgcgtgccacagggtagctacgatattgacgataaggagggtggcttcaacccttcagttcagctttctgctcaggtaacaccatggcttcagccgttcattggctacagcaaatccatgcgcgccccgaacatccaggagatgttcttctctaattcaggaggcgcatccatgaacccattcctgaagcctgaacgtgcagaaacctggcaggcgggttttaacattgataccagagatttactggtcgaacaggatgccctgcgctttaaggctctggcgtaccgcagcaggatccagaactacatctacagcgagtcttatctggtttgttctggaggtcgtaaatgcagtatggctgaggtgattggcaatgactgggagggcatgagcgatgaatacagcgacaatatgtacatctacgttaactcggcaagcgacgttatcgcaaagggcttcgaactggagatggattatgatgcaggttttgcttttggccgactctctttcagccagcagcaaacagaccagccaacctccatcgccagcacctactttggcgcaggggatatgaccgaactgcccagaaaatacatgacgctggataccggtgttcgcttcttcgataacgcgttgaccctgggcactatcataaaatacacaggcaaagctcgtcgcctgtcgcctgattttgagcaggacgaacataccggcgcaataatcaaacaggatttgccgcagattccaacgattatcgatctctatggtacttacgagtacaaccgcaatctgacactgaaactttcggtacaaaacctgatgaacagagattattcggaggcgctgaataagctcaacatgatgccaggtcttggtgacgagacccacccagccaattccgcgcgtggcagaacatggatatttggcggggacattcgtttctga

SEQ ID NO: 73044 - DNA, 1176 bp, Citrobacter koseri
atgaatattttcactttatccaaagcaccgctatacctgttaatttcactatttttacccacgatggccatggctatcgatccacctgaacgcgaactttcgcgatttgccctgaaaacgaattaccttcagtcccctgatgaaggcgtctatgaactggcgtttgataatgccagtaaaaaggtgtttgcagcagtcaccgatcgtgtaaatcgtgaagccaataaaggctatctgtattcgtttaattcagattcgctgaaagtcgaaaataaatacacgatgccataccgggcattttcgctggcgataaatcaggataaacatcagctctatatcggacacacccagtcagcgtccctgcgtatcagtatgtttgacacctcaaccggcaaactggtaagaaccagcgacaggttaagttttaaagcggcaaacgctgcagattcgcgttttgagcatttgcgccatatggtttacagccaggattccaataccctgtttgtgagttatagcaatatgctgaaaacggccgagggcatgaagcctctgcataagctgttaatgctcgacgggacgacgcttgccttaaaaggcgaggttaaggatgcttacaaaggtacagcgtatggtctgacgatggatgaaaaaacacagaaaatctacgttggcggaagagattacatcaacgaaattgatgcgaaaaatcagacgctgctgcgtaccatcccgttgaaagatccgaaaccacaaatcacaagtgtgcagaacctggcggtggactccacttctgaccgtgcctttgtggtggtattcgaccatgacgatcgctccggtacaaaagatggactctatatttttgacttacgcgacggtaaacagcttggctatgtgcacacaggagccggagctaacgcggtgaaatacaatccgaaatataacgaactgtatgtcaccaacttcactagcggcaccatcagcgtagtggatgccaccaaatacagcatcacccgtgaatttaacatgccggtctacccaaaccagatggtgttatcggacgacatggataccctttacattggcatcaaagaaggctttaaccgcgactgggatccagatgtgtttgtagaaggggctaaagaacgcattctgagcattgatttgaataagtcgtga

SEQ ID NO: 73045 - DNA, 813 bp, Citrobacter koseri
atggctatcaaactcattgctatcgatatggatggcacccttttgctgcccgatcacaccatttcacctgcggtaaaaacggcgattgccgccgcgcgcgcccgtggcgttaacgtggtgctgaccactggccgtccgtatgcgggtgtccatagctatctgaaagagcttcacatggaacaacccggcgactactgcatcacctacaatggcgcgctggtgcagaaagcgggcgatggcagtaccgttgcgcaaacggcgctgagctatgacgattaccgctttctggagaagttgtcccgcgaagtcggctcacatttccacgcgctggatcgcaacacgctgtacaccgcaaaccgtgatatcagctactacaccgtacatgaatcctatgtcgccaccattccgctggtgttctgtgaagcggagaaaatggacccggcaacgcagttcctgaaagtgatgatgattgatgaacctgtcatccttgatcaggccattgcgcgtattccggcggaagtaaaagagaaatataccgtgctaaaaagtgcgccgtacttcctcgaaatcctggataaacgcgtcaataaaggcactggcgtgaagtcgctggccgatgcgctggggatcaagccggaagaaatcatggcgattggcgatcaggaaaacgacatcgcgatgatcgaatatgcaggcatgggtgtggcgatggacaacgcgattccgtcggtgaaagaggtggccaattttgtcaccaaatccaacctggaagacggagtggcatacgcaattgagaaatttgtgctgaattaa

SEQ ID NO: 73046 - DNA, 2415 bp, Citrobacter koseri
atgtcgaattcttatgactcctccagtatcaaagtcctgaaagggctggatgcggtgcgtaagcgcccgggtatgtatatcggcgacacggatgacggcaccggtctgcaccacatggtattcgaggtggtagataacgctatcgacgaagcgctcgcgggtcactgtaaagacattatcgtcaccattcatgccgataactccgtatccgtgcaggatgacgggcgtggcatcccgaccggtattcacccggaagagggcgtttctgctgcggaagtgatcatgaccgtgctgcacgcgggcggtaaattcgacgataactcctataaagtgtccggcggtctgcacggcgtgggtgtttccgtggttaacgccctgtcccagaaactggaactggttatccagcgcgataacaaaatccaccgtcagatctatgagcatggcgtaccgcaggcgccgctggcggtgaccggcgaaactgacaaaaccggtacgatggtgcgtttctggccgagcctggaaaccttcaccaacgtcaccgaatttgaatacgaaattctggcgaagcgtctgcgtgagctgtccttcctgaactccggcgtctctattcgtctgaaagacaagcgcgacggtaaagaagaccatttccactacgaaggcggcatcaaagcgtttgttgagtacctcaacaagaacaaaacgccgattcacccgaatatcttctacttctccaccgaaaaagacggtatcggcgtggaagtggcattgcagtggaacgatggtttccaggaaaacatctactgctttaccaacaacattccgcagcgtgacggcggtacgcaccttgcaggcttccgtgcggcgatgacccgtaccctgaacgcctatatggataaagaaggctacagcaagaaagccaaagtcagcgccaccggtgacgatgcgcgtgaaggcctgattgccgtggtttccgtgaaggtgccggacccgaaattctcctcccagaccaaagataaactggtctcttccgaggtgaaatcggcggtggaacagcagatgaacgagctgctgagcgaatacctgctggaaaacccgtccgacgccaaaatcgtggtcggcaaaattatcgatgcggcgcgtgcgcgtgaagccgcgcgtcgtgcgcgtgaaatgacgcgtcgtaaaggcgcgctggatctggcgggtctgccgggtaaactggcggattgtcaggaacgcgacccggcgctgtctgaactgtaccttgtggaaggggactccgcgggcggctctgctaaacagggtcgtaaccgcaagaaccaggcgattctgccgctgaagggtaaaatcctcaacgtggagaaagcgcgcttcgacaagatgctctcttcccaggaagtggcgacgctgatcaccgcactgggctgcggcatcggtcgtgacgagtacaacccggataaactgcgctatcacagcatcatcatcatgaccgatgcggacgtcgatggctcgcacatccgtacgctgctgttgaccttcttctatcgtcagatgccggaaatcgtcgagcgcggtcacgtctacattgcgcagccgccgctgtacaaagtgaagaaaggcaagcaggaacagtacattaaagacgatgaggcgatggatcagtaccagatctccatcgctctggatggcgcaacgctgcacaccaatgccagcgcaccggcactggcgggcgaagcgttagaaaaactggtttctgattacaacgcgacgcagaaaatgattggccgcatggagcgtcgcttcccgaaagcgctgctgaaagagctggtttatcagccgacgctgacggaagccgatcttagcaacgaacaggctgtcacccgttgggtgaacgcgctgattaccgagctgaacgagaaagagcagcacggcagccagtggaagtttgacgttcgcgagaacgccgaacagcagcagttcgaaccgattgttcgcgtgcgtactcacggcgtggataccgactatccgctggatcacgagtttgttaccggcggcgaataccgtcgcatctgcacgctcggcgagaagctgcgcggtctgatcgaagacgatgcgttcattgaacgcggcgagcgccgtcagccggttgcgagcttcgagcaggcgctggagtggctggtgaaagagtcccgtcgtggcctggcgattcagcgctataaaggtctgggcgagatgaacccggatcagctgtgggaaaccacgatggacccggaaagccgtcgtatgctgcgcgtcaccgtgaaagatgcgattgccgccgaccagctgttcactacgctgatgggcgatgccgttgaaccgcgtcgcgcctttatcgaagagaacgccctgaaagcggcaaacatcgatatctaa

SEQ ID NO: 73047 - DNA, 1074 bp, Citrobacter koseri
atgtcgctcacccgcctgttgatccgcgactttcgcaatattgaaaatgcggatctcgctttatcccccggctttaacttcctggttggcgcaaacggtagcggcaaaaccagcgtgctggaggccatctatacgctcggccacggccgggcgtttcgcagtttgcagattggccgcgtcattcgtcatgagcaggagtcgtttgtcctccacggacgtttgcaaggggaagagcgcgaaaccgctatcggcctgacgaaagacaagctgggcgacagcaaagtgcgcatcgacggcaccgacggccacaaagtggcggagctggcgcacctgatgccgatgcagttgattacccctgaggggtttactttactcaacggcggccccaaatacagaagagcgttccttgactggggatgctttcacaacgaagtcggtttttttaccgcctggagcaacctgaagcggttgctcaagcagcgcaacgcggcgctgcgccaggtaagccgttatgaacaattgcgtccgtgggataaggagttgattcctctcgcggaacaaatcagtacctggcgtgctgagtacagtgctggtattgcgcaggatatggcggatacctgccagcaatttctaccggagttctccctcaccttctcttttcagcgcggttgggaaaaagagacggattatgccgaggtgctggagcggagcttcgaacgcgatcgcatgttgacctacaccgcgcatggcccgcacaaagcggatttccgcattcgtgctgacggtgcgccggtggaagataccttatcgcgtgggcagcttaaactgctgatgtgcgctttacgactggcgcaaggggagttcctcacccgtgaaagcgggcggcggtgtctctacctgatagatgattttgcctctgaacttgatgatgcgcgtcgcgggctgctggccagccgcttgaaagcgacgcaatcacaggtctttgtcagcgcaatcagcgctgaacacgttctggacatgtcggacaaaaattcgaagatgttcaccgtggaaaagggtaaaataacggattaa

SEQ ID NO: 73048 - DNA, 1101 bp, Citrobacter koseri
atgaaatttaccgttgaacgtgaacatttattaaaaccgcttcagcaggtcagtggcccgctgggcggtcgtcctacgctgcccattctcggtaacctgctgttgcaggtggctgacggtacgctgtcgctgacgggcaccgatcttgaaatggaaatggtggcgcgcgttgcgttgattcaacctcatgaaccaggcgcaactaccgtcccggcgcggaaattctttgatatctgccgtggcttgccggaaggggctgaaattgccgtccagctggaaggcgatcggatgctggtgcgctccgggcgtagccgtttctcgctttccacgctgcctgccgccgatttccctaatctggatgactggcagagcgaagtcgaattcaccctgccgcaggcaacgatgaagcgcctgattgaagccacccagttctcaatggcgcatcaggacgtgcgttactacttaaacggcatgctgtttgagactgaaggtgaagagttgcgtaccgtcgcgaccgacggtcaccgtctggcggtctgctctatgccggtcgggcaatctctgcctaaccattcggtgattgtgccgcgtaaaggcgtgattgagctgatgcgtatgctcgacggcggcgaaaccccgctgcgcgtacagatcggcagtaacaacatccgtgcccacgtcggtgattttatctttacgtccaagctggttgatggtcgtttcccggattatcgccgcgtattgccgaagaacccggacaaaacgctggaagcgggttgcgatattctcaagcaggcgtttgcccgcgcggcgattctctccaacgagaaattccgtggcgtacgcctgtatgtgagcgaaaaccaactcaaaatcaccgccaacaacccggaacaggaagaagcggaagagattctggacgtcacctacggcggtactgagatggagatcggctttaacgtcagctacgtgctcgatgtgctaaacgcgctgaaatgtgaaaccgtgcgtattctgctgacagactccgtttccagcgtacagattgaagatgcggcgtctcaaagtgctgcgtatgttgtgatgccaatgagactgtaa

SEQ ID NO: 73049 - DNA, 1404 bp, Citrobacter koseri
gtgtcactttcgctttggcagcagtgtcttgcccgattgcaggatgagttaccagccacagaattcagtatgtggatacgcccgttgcaggcggaactgagcgataacacgctggctttgtatgcgccaaaccgttttgtgctcgattgggtaagagacaagtacctcaataatatcaatggactgctgaataatttctgcggagcggatgccccacaactgcgttttgaggtcgggacgaaacccgtcactcaaacgctcaaaacgccggtcaacaatgttgttgcgcctgcgcaggtcgctcaggcgcagccacagcgtgcggcgccagccgcggcgcgcccgggctgggataacgtgccggctccggcagaaccgacctaccgctctaacgttaacgtgaaacacacgtttgataacttcgtcgaaggtaaatccaaccaactggcgcgcgcggcggcgcgtcaggtggcggacaaccccggcggcgcctacaatcccttgttcctctacggcggcaccggtctgggtaaaactcacctgttgcatgcggtgggcaacggcattatggcgcgcaaaccgaatgcgaaagtggtgtatatgcactccgagcgctttgtgcaggacatggttaaagccttgcaaaacaacgcgatcgaagagtttaaacgctactaccgttccgttgacgcactgcttattgatgacattcaattcttcgccaataaagaacgatcccaggaagagtttttccacacctttaacgccctgttagaaggtaatcagcagatcattttgacgtcggatcgttatccaaaagagatcaacggcgttgaagatcgtctgaaatcccgcttcggttgggggttgacggtggcgatcgaaccgcctgagctggaaacccgcgtggcgatcctgatgaaaaaagcggacgaaaatgatattcgtttgcctggtgaggtggcgttctttattgccaagcgactacgctctaacgtgcgtgagctggaaggggcgctgaaccgcgtgatcgctaacgctaactttaccggacgcgctatcactatcgactttgtgcgtgaagcgctgcgcgatctgctggcgttgcaggaaaagctggtcaccatcgacaatatccagaagacggtggcggagtattacaaaattaaaatcgcggatctgctttccaagcgtcgatctcgctcggtagcgcgcccgcgtcagatggctatggcgctggcaaaggagctcaccaaccacagtctgccggaaattggcgacgcgtttggtggacgtgaccacactaccgtacttcatgcctgccgtaaaattgagcagctgcgtgaagaaagccatgatattaaagaagatttctcaaacttaatcagaacattatcttcgtga

SEQ ID NO: 73050 - DNA, 327 bp, Citrobacter koseri
ttgttaactcccagtcatttcacatttgtcttccagcagccacaacgggctggcacgccgcaaatcaccattctcggccgcctgaattcgctggggcatccccgcatcggtctaaccgtcgccaagaaaaacgttcgacgcgcgcatgaacgcaatcggattaaacgtctgacgcgtgaaagcttccgtctgcgtcaacatgaactccctgcaatggatttcgtggtggtggcgaaaaaaggggttgccgacctcgataaccgtgctctctcggaagcgttggaaaaattatggcgccgccactgtcgcctggctcgcgggtcctga

SEQ ID NO: 73051 - DNA, 1647 bp, Citrobacter koseri
atggattcgcaacgcaatcttttagtcatcgctttgctgttcgtgtctttcatgatctggcaagcctgggagcaggataaaaatccgcagcctcagacccaacagaccacgcagacaacgaccaccgcagcgggtagcgccgccgaccagggcgtaccggccagtggccaggggaaactgattacggttaagaccgacgtgcttgatctgaccatcaacacccgtggcggtgatgttgagcaggccttgctgccaacttacccgaaagagctgggttctaaagaaccgttccagttgctggaaacgactccgcagtttatctaccaggcgcaaagcggcctgaccggtcgtgatggcccggataacccagctaacggcccgcgtccgctgtacagcgtcgataacgacacgtttgtcctcgcggatggccagaacgaactgcatgttccgatgacctggactgacgccgctggcaacaccttcaccaaaacgtttgtcctcaaacgcggtgaatatgcggtcaacgtcaactacagcgtgcagaacgccggtgagaaaccgctggagatctccacctttggtcagttgaagcaatccatcaatctgccgtctcatcgcgacaccggtagcagcaactttgcactgcataccttccgtggcgcggcgtactccacgccggatgagaagtacgaaaaatacaaattcgacactattgccgataacgaaaacctgaacgtcagctccaacggcggttgggtcgccatgttgcagcagtacttcgcaacggcatggattccgcgtaacgacggcaccaataacttctataccgctaatctgggtaacggcattgccgctatcggctataaatctcagccggttctggtacagccgggtcagactggcgcaatgaccagcaccctgtgggttggcccggaaattcaggataaaatggcggccgttgcaccgcacctggatctgaccgttgattacggttggctgtggttcatctctcagccgctgttcaaactgctgaaatggattcatagcttcctgggtaactggggcttctccatcatcgttatcacctttatcgttcgtggcatcatgtacccgctgacgaaagcgcagtacacctccatggcgaagatgcgtatgctacagccgaagattcaggctatgcgcgagcgtctgggcgatgacaaacagcgtcagagccaggaaatgatggccctgtacaaagctgagaaggttaacccgctgggcggctgcttccctctgatcatccagatgcctatcttcctggcgttgtactacatgctgatgggctccattgaactgcgtcatgcgccgttcgcactgtggatccatgacttgtccgcacaggacccgtactacatcctgccgatcctgatgggcgtgacgatgttcttcatccagaagatgtctccgactaccgtgaccgacccgatgcagcagaagatcatgacctttatgccggtcatcttcacggtattcttcctgtggttcccgtcaggtctggtgctgtactatatcgtcagcaacctggtaaccatcatccagcagcagctgatttaccgtggtctggagaaacgtggcctgcatagccgcgagaagaaaagctcctga

SEQ ID NO: 73052 - DNA, 1365 bp, Citrobacter koseri
atgagccataacgacactatcgtcgcccaggctaccccaccgggacgcggtggcgtcggtatcctgcgcatttccggcctcaaggcgcgcgaggtggccgaagccgtattgggcaagctaccaaaaccgcgttacgccgattacctgccgtttaaagatgccgatgacacggcgctggatcaggggatcgcgctgtggtttcccggcccgaactcgttcactggtgaagacgtactggaactgcaagggcatggcggcccggtcattctcgacctgctgttaaaacgtattctgacgctccccggcctgcgcattgccagaccgggcgaattctccgagcgcgcgttcctcaatgacaagctcgacttagcccaggcagaagcgattgccgacctgatcgacgccagttccgagcaggcggcacgctcggcgctgaactcgctacagggggcattttccgcgcgtgtaaatcatcttgtggaagcacttactcacctgcgcatctatgtggaagcggccattgacttcccggacgaggagatcgactttctctccgacggcaaaattgaagcccagctcaacggcgtgatcgccgatctcgatgcggtacgcgccgaagcgcgtcagggcagcctgctgcgtgaagggatgaaggtggtcattgccggacgccctaacgccgggaaatcgagcctgctgaacgccctggcgggccgtgaggccgccattgtcaccgatatcgctggcaccacccgcgacgtgctgcgcgagcatattcacatcgacggaatgccgctgcacatcatcgataccgccggtctgcgcgatgccagcgatgaagtggaacgtattgggattgagcgcgcctggcaggagatagaacaggccgaccgcgtgctgtttatggtggatggcacaaccaccgatgccgttgatccggcggaaatctggccggactttatcgcccgtttaccggcgaaactgccgatcaccgttgtgcgcaacaaagctgacatcactggcgagacgctgggtatcagcgaggtgaatggtcactcacttgtccgtctttccgcccgtaccggcgaaggcgtggatgtgttgcgtaaccatctcaaacaaagcatgggctttgacaccaatatggaaggcggcttccttgcccgccgtcgccatcttcaggcgctggcagaagccgcagaacatctccagcagggcaaatcacagctgcttggcgcctgggctggcgaactgctggcggaggagctgcgtctggcgcagcaggcgctgagtgagatcaccggcgagtttacctccgacgatctgctgggccgtattttctccagcttctgtattggcaagtga

SEQ ID NO: 73053 - DNA, 1173 bp, Citrobacter koseri
atgacccgctttctaatctgtagttttgcccttgttttactctacccagccggtatcgacatgtatctggtcggtttaccccgtattgccgccgatctgaacgccagcgaggcgcagctgcacatcgcgttttcggtatacctggccgggatggctaccgcaatgctgtttgcgggtaaagttgcagaccagtcagggcgcaaaccggtggcgatagcgggcgcggtgatattcatcatcgcctccatgctttgctcacgagcaacggacgggtcgctgttcctgaccgggcgctttattcagggcatcggggcggggtgctgttatgtggtggcgtttgcgattctgcgcgacacgcttgacgatcgccgccgggcaaaggtgttatcgctattaaacggaattacctgcattgtgccggtattagcgccagtgttagggcatttgattatgcttaaattcccgtggcaaagtctgttttacacgatgatagcgatgggtatcgcggtatgcctgctctcggtgtttatcctgaaagaaacgcgcccggcaacatgctcatcgacctcgcgccctcagcaaaatgcagagtcgctgctcaaccgctttttcctcagccgtctggcgatcaccacgttgagcgtgtcggtgatcctcacatttgtaaacacctcgccggtgttgctcatggaaatgatgggctttgatcgcggtgaatacgccaccacaatggcgctgacggcaggcatcagcatggcggtgtcgttctcaacgccctttgcgctgagcgtatttaaaccgcgcacgctgatgctcacgtcgcaagggctgtttctggctgcgggcatcgtactcagcctctcatcctctcacgccgtcacgctctttggcctgacgctcatctgcgcaggtttttcagttggctttggcgtggcgatgagccaggcattaggcccattctcactgcgtgctggcgtcgcaagctctgtactcggcattgcacaggtctgcgggtcatcgctatggatatggctggcggcagtcattggctttaacgccctgaatatgctgatcgggattctgattggctgtagcatggtctgtatcctgttactgatgaccatacagcccgcagcgcactatgaaaaaatccatcaccagtctcgatcttaa

SEQ ID NO: 73054 - DNA, 960 bp, Citrobacter koseri
atgaaaaaatccatcaccagtctcgatcttaatctgttgttatgtttgcagcttctgatgcaggagcgcagcgtcaccaaagcggcgaagcggatgaacgtcacgccctcggcggtgagtaaatcgttgtcaaagctgcgaacatggtttgatgacccgctgtttgtgaacacgccgctggggctgacgccgacgccgctgatggtcaatatggaacaaagcctggcggactggatgcagatgagcaatcagctgcttgataaaccgcatcacgaatcgccacgcggcctgaaatttgaactggcggcagaatcgccgctggtaatgatcatgttcaattctctgtcgcagcagatttatcagcgctatccgcaggccacaatcaaggtgcgtaactgggattacgactcgctggatgccatcacacgcggcgaggtggatctcggctttaccggaagggagagccatccccgttcgcgggagcttctcagcctgctgccgctgtctatcgattttgaagtcctgttcagcgacctcccctgggtctggctgcgggaagatcacccggcgctacaagaagagtggaatctggaaacatttttacgctatccgcatatcagcatttgctgggagcaaagcgacacctgggcgctggatgatgtattgcaggagatgggccgcaaacgcaatatcgccttaagtttaccggggtttgaacaatcgctgtttatggccgcccagccgaaccactcgctgctggcgaccgcgcctctctactgccagcgttataaccagctccaccagctaccgttggtcgcgcgtcctctcccttttgacgccgcccagcgagaaaagctgatggtgccttttaccctcctttggcataaacgtaacagccataaccctaaaattatctggttaaaagagaccatcaaaacgctctatagccacctctcctga

SEQ ID NO: 73055 - DNA, 750 bp, Citrobacter koseri
atggcgacacattttgccagagggattcttacggagggacacctgatttcagtccgtctgccttctccatgccacatcgaagccagaaaccttcccgctcaccgccggacacgttttttggcttcacgcggcttactcgctgaactgatgtttatgctctacggaaccagcgagctgccagaaattgctattcaggccaaagggaagcctgtctttcgcgataaaaatctgcctgcgttctccatctcatatgggaatatggtaggcgtggcgctgacaacggagggggaatgcggcctggatatggaattacagcgagccatgcgaggcttccatagcccactctcagccgagagcccggcgttctccagcaacgaaaatctgtggatcaacaatcagagcgatcccaacgaagcgcgcgcgcaactgatcaccttacgccagagcgtgctaaagctaaccggtgacgtactgaatgacgatccgcgtgaactccagctccttcccggcgcaggccgcctgaaatgcgcccacgttacgcaggtggaggcaatatgcgacgcggaagatattctggtctggtcggtggcggttacgccagccattgaaaaactgaatgtttgggagtttgatagtaagcaaggatggaaaagcctggccgatatccagacccgggcgaatgaacctaccggtcgcctgatgcgattcgctcaattatccacagcaaagtcatcttatacacttagctga

SEQ ID NO: 73056 - DNA, 567 bp, Citrobacter koseri
atgtccgaaacgttgaatgttgttacgttactggggagcctgcgcaaaggttcatttaacggtatggtcgcccgcacgctgccgaaaattgccccggcaggcatggaggtcagcgcattaccttcgattggcgatattccgctgtatgacgctgatgtgcagcaggaagaggggttcccggcgagcgttgaagcgctggcggagcaaatccgtaaagcggacggcgtcgtcatcgtcacaccggaatacaactactcggtgcctggcggactgaaaaacgcgatcgactggctgtcccgcctgccagaacagccgttagccgggaaaccggtgctgatccagaccagctcaatgggggcaatcggcggcgctcgctgtcagtatcatctgcgccagattctggtattccttgatgcgatggtaatgaacaaaccggagtttatgggcggcgtgattcagaacaaagttgacccgcaaaccggggaagtggttgatcaaagcacgattgatcatcttaccggccagctaaccgcgtttggcgattatattcagcgtgttaaagcgtga

SEQ ID NO: 73057 - DNA, 1338 bp, Citrobacter koseri
atgagtcaacaacacaccacccagacttctggtcagggtatgctggaacgcgtgtttaaactgcgcgaacatggcacgacggcacgaaccgaagtgatcgccggttttaccaccttcctgacgatggtttacatcgtttttgttaacccgcagattcttggcgttgctggcatggacaccagcgccgtcttcgttactacctgtcttatcgcggcgttcggcagcattctgatggggctgtttgctaatttaccggtcgcgctggcgccggctatgggtctgaacgcgtttttcgccttcgtggtcgttggcgcgatggggctgtcctggcaggttggtatgggcgcaatcttctggggagcgatcggcctgttgctgctgaccatcttccgcgtgcgttactggatgattgctaacattccggtcagtctgcgcgtgggcatcaccagcggtatcggcctgtttatcggcatgatggggctgaaaaacgcaggcgttatcgtcgcgaacccggaaaccctggtgagcatcggtaatctgacctctcacagcgtactgctcggcgtgctgggcttcttcatcatcgctattctggcatcacgtaacattcatgccgccgtgctggtctctattattgtaacgacgctgctcggctggatgatgggtgatgtgcattacaacggcattgtctctgcgccgccaagcgttagctctgtgatcgggcatgtggatctggcgggctcgtttaacattggtctggctggcgtgattttctccttcatgctggtgaacctgttcgactcctccggcacgctgattggcgttaccgacaaagccggtctggctgatgaaaaaggtaaattcccgcggatgaagcaggcgctgttcgtcgatagcgtctcttctgtgaccggggcgtttattggaacctcgtcggttaccgcctatattgagtcctcatccggcgtatccgtcggcgggcgcacgggcctgaccgccgttgttgtcggtttgctgttcctgctggttatcttcctgtcgccgctggcgggaatggtgccgggttatgccgctgccggggcgctgatctatgttggcgtactgatgacttccagtctggcgcgcgtgaaatggcaagaccttaccgagtctgttccggcgtttattactgccgtgatgatgccgttcagcttctcgattaccgaaggtatcgcgctgggctttatttcttactgtgtgatgaaaatcggtaccggacgtctgcgtgagttgagcccttgcgtggtggttgtggcgttgttgtttgtgctgaagattgtgtttatcgacgcgcactaa

SEQ ID NO: 73058 - DNA, 666 bp, Citrobacter koseri
atgtcccagattcaagcggtatttttcgactgcgacggtacgctggtcgacagtgaagtcatttgctcccgcgcgtatgtcgcgatgttccaggaattcggcatcacgctcgatctcgaagaggtgttcaaacgctttaaaggcgtaaaactctacgaaatcatcgatatcattaacgaggagcagggtgtgtcgttagcaaaagcggatttagaacccgtttaccgcgccgaggtcgcacgcctgttcgactcagaactggaggtgatcgcaggggcgaatgcgctgctggacagcatgacggtgccgatgtgcgtcgtctctaacggcccggtcagcaaaatgcagcattcactgggcaagctgggcatgttgcatcattttccagaaaaattgttcagcggctatgacattcaacgctggaagcccgatccggctctgatgttccacgcggcgaaagccatgaacgttaacgtggagaattgcattctggtggatgattccagtgccggcgcccggtcgggaatcgatgcgggaatggaggtgttctacttctgtgccgatccgcataacaaaccgatcgatcatccaaaagtaacgacgtttaccgatctggcgcagttgccgggattgtggaaggcgcggggttggaatatcgtcgattaa

SEQ ID NO: 73059 - DNA, 726 bp, Citrobacter koseri
atggacaacctaaaccttaacaaacacatttccggccagttcaacgcagaactggaaagcatccgcacccaggtgatgactatgggcggtatggtggagcaacagctttctgatgcgatcaccgcgatgcataatcaggatagcgaactggcgaagcgcgttattgacggtgataagcacgtcaacatgatggaagtggcgatcgatgaagcgtgcgtgcgcatcattgccaaacgccagccgacagcgagcgacctgcgcctggtgatggcgatcatcaaaaccatcgctgaactggagcgcattggcgacgtggcggacaaaatttgtcgcaccgcgctggagaaattctcccaccagcaccagccgctactggtgagcctggagtcgctggggcgtcacaccgtacagatgctgcatgatgtgctggacgcgttcgcgcgaatggatattgacgaagcggtgcgtatctaccgtgaagacaagaaagttgaccaggaatacgaaggtatcgtgcgtcagctgatgacctacatgatggaagattcgcgcaccattccaagcgtgctgaccgcgctgttctgcgcacgctccattgagcgcatcggtgatcgctgccagaatatctgcgaatacatcttctacttcgtgaaggggcaagacttccgtcacgtcggcggtgatgaactggataagctgctggcggggaaagatccgaaggaataa

SEQ ID NO: 73060 - DNA, 774 bp, Citrobacter koseri
atgagtatggttgatactgctccgggtaagattcaggttcgtgatttgaacttctactacggcaaattccatgccctgaaggatatcaacctggatatcgcgaagaaccaggtcacggcgtttattgggccgtctggctgtggtaaatccacactgctgcgtacctttaacaaaatgtattcgttgtatccagagcagcgtgcggaaggcgagatcctgttggatggcgataatatccttaccaacacccaggatatcgctctactgcgtgccaaagtggggatggtgttccagaagccgacgccgttcccgatgtctatctatgacaacatcgcttttggcgtgcgcctgtttgagaaactgtctcgcgccgatatggacgaacgcgttcagtgggcgttgaccaaagccgcattatggaacgaaaccaaagataaattgcaccagagcgggtactctctctcgggtggtcagcagcagcgtctgtgcattgcgcgtggtatcgccattcgcccggaagttctgctgttggatgagccgtgttcagcgctggacccgatttccaccgggcgtattgaagagctgatcactgagctgaagcaggactacaccgtggtgatcgtgacgcacaacatgcagcaggctgcgcgttgttccgaccacacggcgtttatgtatctgggcgagttgattgagttcagcaacacggacgatctgttcactaagcccgctaaaaagcaaaccgaagattatattactggccgctacggttga

SEQ ID NO: 73061 - DNA, 891 bp, Citrobacter koseri
atggctacgcttgaaatgcaaacgaccgcagaactggcggaatcccgccgtaaaatgcaggctaagcgccgcacgagaaaccgcatcgcattgacgctctcaatggcgacgatggcgtttgggctgttctggctcatctggatcctgatgtccaccattacgcgtggtttcgacggcatgtcgctggcgctgtttactgaaatgacgccgccgccgaataccgctggcggtggtctggcgaacgccctggcggggagcggactgttaattttgtgggcgacggtatttggtacgccgcttggcatcatggcggggatctacctggcggaatatggccgtaaatcctggcttgcggaagtgatccgtttcattaacgacatcctgctttccgcgccgtctatcgtggtcggtctgtttgtttacaccatcgtggtggcgcaaatggagcacttctccggttgggcgggcgtgattgcgctggcgctgctacaggtgcctatcgtcattcgtaccacagagaacatgctgaaactggtgccggatagcctgcgtgaagcggcctatgcgctggggacgccgaaatggaaaatgatctcggcgattaccctgaaagcctcgatttccgggatcatcaccggcgtactgctggcggttgcccgtattgcgggtgaaaccgcgcctctgctctttactgcgctttctaaccagttctggagcaccgacatgatgcagcctatcgctaacctgccggtcactatctttaaatttgcgatgagtccgtttgcggagtggcagcaactggcctgggctggggtgttgatcattaccctgtgcgtattgttgctgaatattctggcgcgcatcatttttgcgaagagtaaacacggttaa

SEQ ID NO: 73062 - DNA, 960 bp, Citrobacter koseri
atggctgcaaccaagcctgcttttaacccgccgggtaaaaagggtgacatgatattcagcgcgctggtaaaactggctgcgctgattgtgctattgatgttgggtggcattattgtctcgctgattatctcctcctggccaagcattgagaagtttggcttctcgttcctgtggactaaagagtgggatgcgccaaacgatatctacggcgcgctggttcccatttatggcacgctggttacctcgtttatcgctctgctgatcgccgttccggtgagcttcggtattgccctgtttctgacggaactggcaccgggctggctgcgtcgcccgctgggcatcgccatcgaactgctggcggctatccccagtatcgtctacggcatgtggggcctgtttatcttcgctccgctgtttgctacctggttccaggaaccggtcgggaatattctttccaacatttcgtttgttggcgcactgttctctggcccggcatttggtatcggtattctggcggcgggcgttattctcgccattatgatcattccttacatcgcggcagttatgcgcgatgtcttcgaacaaaccccggtgatgatgaaagagtcggcctacggcatcggctgcaccacctgggaagttatctggcgtatcgtccttccgttcaccaaaaatggggtgattggcggcgttatgctgggactgggtcgtgcgctgggtgaaaccatggcggtgacctttatcatcggtaacacctaccagctcgacagcgtttcgctgtacatgccgggcaacagtatcacctctgcgctggcgaacgaatttgccgaagcggagtctggtctgcacgttgccgcgttgatggaactgggtctgattctgtttgtgattaccttcattgtgctggcgatttctaagctgatgattatgcgtctggcgaagaatgagggggcacgctaa

SEQ ID NO: 73063 - DNA, 1041 bp, Citrobacter koseri
atgaaagtcatgcgtaccactgtcgcaactgttgtcgccgcgaccttatccatgagcgcgttctctgctttcgcagcagcgagcctgacaggtgcaggtgcaactttccctgcgccggtgtatgccaaatgggctgatacctatcagaaagagaccggtagcaaagtaaactaccagggtatcggctcctccggtggtgtaaaacaaattacggctaacaccgttgatttcggtgcatccgacgctccgctgtctgacgaaaaactggagcaggaaggtctgttccagttcccgaccgtcattggcggcgtagtgctggcggtgaatatcccgggtctgaagtctggcgaactggtgctggatgggaaaaccctgggtgacatctacctgggtaaaattaagaagtgggatgatgaagccatcaccaaactgaacccgggtctgaaactgccttctcagaacatcgccgttgtgcgtcgtgcagatggttccggcacttctttcgttttcaccagctacctggcgaaagtgaacgaagagtggaaatctaaagtcggcgctggctctaccgttaactggccgaccggtctgggcggtaaaggtaacgacggtatcgccgcattcgtacagcgtctgccaggctctatcggctatgttgaatacgcttatgcgaagcagaacaacctggcttacaccaaactgatttcagcggatggtaaacccgtaagcccgaccgaagagagctttgctaacgccgcgaaaggcgctgactggagcacctctttcgctcaggatctgacgaaccagcaaggtgacgatgcgtggccaatcacttccaccaccttcatcctggtccacaaagagcagaagaaacctgagcagggcgctgaagtgctgaagttcttcgactgggcgtacaaaaatggcggcaaacaggcgaatgacctggattacgccagcctgccggacagcgttgttgagcaggttcgtgcagcatggaagaccaatgtgaaggacagcagcggtaaagcgctgtactaa

SEQ ID NO: 73064 - DNA, 1830 bp, Citrobacter koseri
atgtgtggaattgttggcgctatcgcgcaacgtgatgtagctgaaatccttctcgaaggtttacgtcgtctggaataccgtggttatgactctgccggtctggccgtggttgatgcggaaggtcacatgacccgtctgcgtcgccttggtaaagtacagatgctggcccaggcagcggaagaccatcctctgtctggcggcaccgggattgctcacacccgctgggcgacccacggcgaaccttcggaagcaaacgcgcatccgcatgtttctgaccacattgtggtggtgcataacggcatcatcgaaaaccatgaaccactgcgtgaagaactgaaagcgcgtggttataccttcgtttctgagaccgacaccgaagtgattgctcacttagtacactgggagctggaacagggcgggacgctgcgtgaagcggttatgcgtgcgattccgcaactgcgcggcgcgtacggcacggtaatcatggatacccgtcacccggatacgctgctggcggcgcgctctggcagcccgctggttatcggtctgggtatgggcgaaaactttatcgcttccgaccagctggcgctgctgccggtaacccgtcgcttcatcttcctggaagaaggcgatattgcggaagtgacccgtcgttcggtctccattttcgataaatccggcgcggaagtgaaacgtcaggatatcgaatccagtctgcaatatgatgcgggcgataaaggtatttaccgtcactacatgcagaaagagatctacgaacagccgaatgcgattaaaaatacgctgaccgggcgtatcagccacggtgaagtggatttaagcgagctggggccaaaagcgaacgaactgctgtctcaggttgaacatattcagattatcgcctgcggcacgtcgtataactccggtatggtctctcgctactggtttgaatcgctggccggtattccgtgcgacgtcgaaatcgcctctgaattccgctatcgcaaatctgccgtacgtcgtaacagcctgatgatcaccctgtctcagtctggcgaaacggcggatacccttgccggtctgcgcctgtcgaaagagctgggctatctgggttctctcgccatctgtaacgttccgggttcttccctggtgcgtgaatccgatctggcgatgatgaccaacgccgggacggaaatcggcgtggcctccaccaaagcgtttaccactcagctgaccgttctgctgatgctggtggcgaagctggcgcgtctgaaaggtctggatgcgtctatcgagcacgatattgttcacggtttgcaggcgctgccgagccgtatcgaacagatgctgtctcaggacaagcgtatcgaagcgctggcggaagatttctctgacaaacaccatgccctgttcctgggccgtggcgatcagtatccgatcgcgctggaaggcgcgctgaagctgaaagagatctcttatattcacgcagaagcgtatgcggcaggtgagctgaaacatggcccgctggcgctgatcgacgcagatatgccggttatcgtggtggcgccgaacaacgaactgctggaaaaactgaaatccaacatcgaagaagtccgcgcccgtggcggccagttgtacgtcttcgccgaccaggatgccggttttgtcagcagcgacaacatgcacatcattgagatgccgcatgtggaagaggtgattgcaccgatcttctacaccgttccgctgcaactgctggcgtatcacgttgcgctgatcaaaggcaccgatgtggaccagccgcgtaacctggcgaaatcggttaccgttgagtaa

SEQ ID NO: 73065 - DNA, 1371 bp, Citrobacter koseri
atgttgaatagtgctatgagcgtagtgatccttgccgcaggcaaaggcacgcgtatgtattccgatcttcctaaagtgctgcatacccttgcgggaaaagcgatggttcagcatgtcattgatgccgctaatgaattaggcgcatctcaggtgcatctggtctatggccacggcggcgatctgcttaaaaacacccttaaaaatgacaacctgaactgggttttgcaggcagagcaactggggacgggccatgcgatgcagcaggcggcgccgttctttagcgatgacgaagacattttaatgctctatggcgatgtgccgctgatctctgtggaaaccttacagcgtctgcgtgacgccaaaccgcagggcggcattggtttgttaaccgtgaagctggacgatccgagcggttacggtcgtattacgcgtgagaacggtaaagtgaccggcatcgttgagcataaagatgccaccgacgaacagcgtcagatccaggaaattaataccggtatcctgatcgctaatggtgcggacatgaagcgctggctggcgaaactgaccaacaataatgctcagggtgaatattacattaccgacatcattgcgctggcgtatcaggaaggccgcgaaatcgctgctgtacacccggatcgtttaagcgaagtggaaggcgtaaacaaccgtttgcaactctctcgtctggaacgcgtttatcagtccgaacaggccgaaaagctgctgctggccggtgtgatgctgcgcgatcccgcgcgttttgacctgcgcggcgctctcacccacgggcgcgatgttgaaattgatactaacgttatcatcgaaggcaacgtcacgctgggtcaccgcgtgaagattggcgcgggttgcgttattaaaaacagtgtaattggcgatgactgtgacatcagcccgtacagcgtggtggaagatgcgcacctggaagcggcctgtactattggtccgtttgcccgtctgcgccctggcgcggaactgcgggaaggcgctcatgtcggcaacttcgttgaaatgaaaaaagcgcgtctggggaaaggttcgaaagcgggccacctgagctatctgggtgatgcggaaattggcgacaacgtgaatatcggcgcgggcaccattacctgcaactacgatggcgcaaataaattcaaaacgattattggcgatgatgtgtttgtcggttctgatactcagctggtggcgccggtcactgtggggaaaggtgcgaccatcgccgccggcacaaccgttacccgcgacgttgcggataacgaactggtgttaagccgcgtgccgcaggtgcataagcagggctggcagcgtccggtgaagaagaagtaa

SEQ ID NO: 73066 - DNA, 420 bp, Citrobacter koseri
atggcaatgacttaccacctggatgtcgtcagcgcagagcaacaaatgttctctggtctggtcgaaaaaatccaggtaacgggtagtgaaggtgaactgggtatttacccgggccacgcgccgctgctcaccgccattaagcctggtatgatccgcatcgttaaacagttcggtcatgaagagtttatctacctgtctggcggcattcttgaagtgcagcctggcagtgtgaccgtactggctgataccgcgattcgcggccaggatctcgacgaagcgcgagctctggaagcgaaacgtaaggctgaagagcgcattaagagctctcatggtgacgtggattacgctcaggcatctgcggaactggccaaagcgatcgccaaactgcgcgttatcgagttgaccaaaaaagcgatgtaa

SEQ ID NO: 73067 - DNA, 1383 bp, Citrobacter koseri
atggctactggaaaaattgtccaggtaatcggcgccgtagttgacgtcgagttccctcaggatgccgtaccgcgcgtgtacgacgcccttgaggtgcagaatggtaatgaacatctggtgctggaagttcagcagcagctcggtggcggtatcgtacgtaccatcgccatgggttcttccgacggcctgcgtcgtggtctggatgtgaaagaccttgagcacccgatcgaagtcccggtaggtaaagcaacgctgggtcgtatcatgaacgtactgggcgaaccagtagacatgaaaggcgagatcggtgaagaagagcgttgggctatccaccgtgcggcaccgtcctacgaagagttgtcaaactctcaggaactgctggaaaccggtatcaaagttatcgacctgatgtgtccgttcgcgaagggcggtaaagtgggtctgttcggtggtgcgggtgtaggtaaaaccgtaaacatgatggagctgatccgtaacatcgcgatcgaacactccggttactccgtgtttgcgggcgtaggtgaacgtactcgtgagggtaacgacttctaccacgaaatgaccgactccaacgttatcgacaaagtatccctggtttacggccagatgaacgagccgccgggaaaccgtctgcgcgttgcgctgaccggcctgaccatggcggagaaattccgtgacgaaggtcgtgacgttctgctgttcgtcgacaacatctaccgttacaccctggccggtacagaagtatccgcactgctgggtcgtatgccttcagcggtaggttaccagccgaccctggcggaagagatgggtgttttgcaggaacgtatcacctccaccaaaaccggttctatcacctccgtacaggcggtatatgtacctgcggatgacttgactgacccatctccagccaccacctttgcgcaccttgacgcaaccgtggtactgagccgtcagatcgcgtctctgggtatctacccggccgttgacccgctggattccaccagccgtcagctggacccgctggttgttggtcaggagcactacgacaccgcgcgtggcgtacagtctatcctgcaacgttaccaggaactgaaagacatcatcgccatcctgggtatggatgaactgtctgaagaagacaaactggtggtagctcgcgcacgtaagatccagcgcttcctgtcccagccgttcttcgtggcagaagtatttaccggttctccgggtaaatacgtctccctgaaagacaccatccgtggctttaaaggcatcatggaaggcgaatacgatcacctgccggagcaggcgttctacatggtcggttccatcgacgaagccgtggaaaaagccaaaaaactttaa

SEQ ID NO: 73068 - DNA, 864 bp, Citrobacter koseri
atggccggcgcaaaagagatacgtagtaagatcgcaagcgtccagaacacgcaaaagatcactaaagcgatggagatggtcgccgcttccaaaatgcgtaaatcgcaggatcgcatggcggccagccgtccttatgcagataccatgcgcaaagtgattggtcaccttgcgaacggtaatctggaatataagcacccctatctggaagaacgcgacgttaagcgcgtgggctacctggtggtgtcgaccgaccgtggtctgtgcggtggcttgaacattaacctgttcaagaaactgctggcggatatgaaagcatggtccgataaaggcgttcagtgcgacctcgcaatgatcggctctaaaggcgtgtctttctttagttccgtaggtggcaatgttgtcgcccaggtgacgggtatgggggataacccatccctgtccgaactgatcggcccggtaaaagtgatgttgcaggcctatgatgaaggccgtctggacaagctttacattgtcagcaacaaatttattaacaccatgtctcaggttccgactatcactcagctgctgccgttaccggcttcagaagatgatgaactgaaacgtaaaacctgggattacctgtacgaacccgatccgaaagcgctgctggataccctcctgcgtcgctatgtggaatctcaggtttatcagggcgtggtagaaaacctggccagcgagcaggccgcacgtatggtggcgatgaaagccgcgaccgacaatggcggtagcctgattaaagagttgcagttggtatacaacaaagctcgtcaggccagcattactcaggaactcaccgaaatcgtcggtggtgcatccgcggtataa

SEQ ID NO: 73069 - DNA, 1542 bp, Citrobacter koseri
atgcaactgaattccaccgaaatcagcgaactgatcaagcagcgcattgctcagttcaatgttgtgagtgaagctcacaacgaaggtactattgtttctgtaagtgacggtgttatccgcattcacggcctggccgattgtatgcagggtgaaatgatctccctgccgggtaaccgttacgctatcgcactgaacctggagcgcgactctgtaggtgcggttgtgatggggccgtacgctgaccttgccgaaggcatgaaggttaaatgtactggccgtatcctggaagttccggttggccgtggcctgctgggccgtgtggttaacaccttgggcgcgccaatcgacggtaaaggtccggttgagcacgacggcttctctgctgttgaagctatcgcgccgggcgtaatcgaacgtcagtccgttgatcagcctgttcagacgggttataaagctgttgactccatgatcccaatcggtcgtggtcagcgtgaattgatcatcggtgaccgtcagaccggtaaaaccgctctggcaatcgacgccatcatcaaccagcgtgattccggcatcaagtgcgtctacgtggctatcggccagaaagcgtccaccatctctaacgtggttcgtaagctggaagaacacggcgcgctgcaaaataccatcgttgtggttgctaccgcatctgaatctgccgcactgcaatacctggcgccgtatgccggttgcgcaatgggcgaatacttccgcgatcgcggcgaagatgcgctgatcatctacgatgacctgtccaaacaggctgttgcttatcgtcagatctccctgctgctccgtcgtccgccaggacgtgaagcattcccgggcgacgtattctacctccactctcgtctgctggagcgtgctgcgcgtgttaacgttgaatacgttgaagccttcacgaaaggtgaagtgaaagggaaaaccggttctctgactgcgctgcctattatcgaaacccaggcgggtgacgtttctgcgttcgttccgaccaacgtaatttctattaccgatggtcagatcttcctggaaaccaacctgtttaactctggtattcgtcctgcggttaacccgggtatctccgtatcccgtgttggtggtgcagcgcagaccaagatcatgaagaaactgtccggtggtatccgtaccgcgctggcgcagtatcgtgaactggcggcgttctcccagtttgcatctgaccttgacgatgcaacccgtaaacagcttgaccacggtcagaaagtgactgaactgctgaaacagaaacagtatgcgccgatgtccgttgcgcagcagtctctggttctgttcgcggcagaacgtggttatctggcggatgtagaactggcgaaaatcggtagcttcgaagccgctctgctggcttacgtcgaccgtgatcacgctccgttgatgcaagagatcaaccagtccggtggctataacgacgaaatcgaaggcaagctgaaaggcatcctcgattccttcaaagcaacccagtcctggtaa

SEQ ID NO: 73070 - DNA, 534 bp, Citrobacter koseri
atgtctgaatttgttacggtagctcgcccctacgccaaagcagcttttgactttgccgtcgaacaccaaagtgtagagcgctggcaggacatgctggcgtttgccgccgaggtaaccaagaacgaacaaatggcagagcttctctctggcgcgctggcgccggaaacgctcgctgagtcgtttatcgcagtctgcggtgagcagctggacgaaaacggtcagaacctgattcgggtgatggctgaaaataatcgtctgaacgcgctcccggatgttctggagcagtttattcacctgcgcgccgcgagtgagtccacctctgaagttgaggtaacttccgccaccgcattgagtgaagaacagcttgcgaaaattagcgctgcgatggaaaaacgtctgtcacgcaaagttaagctgaattgcaaaatcgataagtctgtaatggcaggcgttatcatccgagcgggtgatatggtcattgatggcagcgtacgcggccgtcttgaacgccttgcagacgtcttgcagtcttaa

SEQ ID NO: 73071 - DNA, 471 bp, Citrobacter koseri
gtgaatcttaacgcaacaatcctcggccaggccatcgcgtttgtcctgttcgttctgttctgcatgaagtacgtatggccgccgttaatggctgccatcgaaaaacgtcaaaaagaaattgctgacggtcttgcttccgcagaacgagcacataaggaccttgaccttgcaaaggccagcgcgaccgaccagctgaaaaaagcgaaggcggaagctcaggtaatcattgagcaggcgaacaaacgtcgcgctcagatcctggatgaagccaaaactgaagcagagcaggaacgtactaaaatcgtggcccaggcgcaggcggaaattgacgccgagcgtaaacgtgcccgtgaagagctgcgtaagcaagttgctatcctggctgttgctggcgccgagaagatcatcgaacgttccgtggatgaagctgctaacagcgacatcgtggacaaacttgtcgctgaactgtaa

SEQ ID NO: 73072 - DNA, 240 bp, Citrobacter koseri; identical to SEQ ID NO: 1849

SEQ ID NO: 73073 - DNA, 816 bp, Citrobacter koseri
atggcttcagaaaatatgacgccgcaggattacataggacaccatctgaacaaccttcagttggacctgcgtacattctcgctggtggatccgcataaccccccagccaccttctggacgctcaatattgactccatgttcttctcggtggtgctgggtctgttgttcctgcttatgttccgcagcgtagccaaaaaggcgaccagcggcgtaccaggtaaatttcagaccgcgattgagctggtcatcggctttgtgcatggtagcgtgaaagacatgtaccatggcaaaagcaagctgattgcgccgctggccctgacgatcttcgtctgggtattcctgatgaacctgatggacttactgcctatcgatctgctgccgtatatcggcgagcatatcttcggtctgccggcactgcgtgtcgttccgtccgctgacgtgaacatcaccctgtcgatggcgctgggcgtatttatcctcattctgttctacagcatcaaaatgaaaggcatcggcggcttcacgaaagagttgacgctacagccgttcaatcactgggcgttcatccctgtcaacttaatccttgaaggggtaagtctgctgtccaaaccggtatcactcggtctgcgactgttcggcaacatgtatgccggtgagctgattttcattctgattgctggtctgttgccgtggtggtcacagtggattctgaatgtgccgtgggccattttccacatcctgatcattacgctgcaagccttcatcttcatggttctgacgattgtctatctgtcgatggcgtctgaagagcattaa

SEQ ID NO: 73074 - DNA, 381 bp, Citrobacter koseri
atgtctgtgtcgctcttgagtcgaaacgttgctcgtaagcttctgttcattcagcttttggcggtaatagcaagtggattgctgtttagcctcaaagaccccttctggggcgcttccgccttatgcggaggcctggcagtgttgctgcctaacatgttgtttatgatatttgcctggcgtcaccaggcgcatacacctgcgaaaggccgcgtggcctggtcattcgctttcggcgaagccttcaaggtgttagcgatgctggttctactggtggtggcgttggcggtttttaaggcggtatttttgccgctgatcgttacgtgggttttggtgctggtggttcagatactggcgccggctgtaattaacaacaaagggtaa

SEQ ID NO: 73075 - DNA, 624 bp, Citrobacter koseri
gtgcttaacaaactctcccgtctgctggatgaagcaggcatttcgcttaccgatcaccagaaaaatcagctgattgcgtatgtcgatatgctgcacaaatggaacaaagcctacaacctgacgtcggtgcgggatcctaacgagatgctggtacgccatattctggacagcatcgttgtggcgccgcacctgcaaggggagcgttttattgacgtcggtacgggaccggggctgccggggatcccgctctccattgtccgtcctgaatcgcatttcacgctgctggatagcctgggcaagcgggtacgctttctgcgccaggttcagcacgaactcaagctggaaaatattacgccagtgcagagccgcgtcgaggagttcccttctgagccgccgtttgatggcgtgatcagccgtgcattcgcctctctcgatgacatgttgagctggtgtcgccacctgccgggggaaaatggccgcttttatgcgttaaagggtcagttgccggaagaggaaatcgcctcgctgcctgcggcgttcagcgtcgagtccgtggttaaactgcgtgtcccgcagctggaaggcgaacgtcatttggtggtcattaagccaaacaaaatttaa

SEQ ID NO: 73076 - DNA, 1890 bp, Citrobacter koseri
atgttttatccggatccttttgacgtcatcatcattggcgggggtcatgcaggcactgaggccgcaatggccgcagcgcgtatggggcaacagaccctgcttttgacacacaatatcgacacgctggggcaaatgagctgcaacccggccattggcggtattgggaagggacacctggtaaaagaagtggatgcgctcggtgggctgatggcgaaagcgatcgaccaggcgggtattcagtttaggatactaaacgcaagcaaaggtccggccgttcgtgcaacccgcgcacaggcggatcgcgtgctatatcgccaggcggtgcgtactgcgctggagaatcagcccaatctgatgatcttccagcaggcggttgaagatctgattgttgaaaacgatcgcgtcgtgggcgcagttacccagatgggcctgaaattccgggctaaagcggtggttctcaccgtcgggactttccttgacggcaaaattcatattggtctggataactacagcggcggccgtgctggcgatccgccatccattccactgtctcgtcgcctgcgtgaacttccgctgcgcgtcagtcgtctgaaaaccggtacgccgccgcgtattgatgcgcgcaccattgatttcagcgtactggcgcagcagcacggcgataacccgatgcctgtgttctcgttcatgggcaacgcgtcccagcatccgcagcaggtgccgtgctacatcacgcataccaacgaaaaaacccatgatgtgatccgcaacaacctcgatcgcagtccgatgtatgccggtgtgatcgaagggatcggcccgcgttactgcccgtcgatcgaagataaagtcatgcgctttgccgatcgcaaccagcatcagatcttcctggaaccggaaggactgacctctaacgaaatttacccgaacggtatctccaccagcctgccgttcgatgtgcagatgcagatcgtccgctcaatgcaggggatggaaaacgcgaaaatcgtacgtccaggttatgccattgagtacgatttcttcgatccgcgcgacctgaaaccaacgctggagagcaaatttatccagggattgttctttgccgggcaaatcaacgggacgacaggttacgaagaagcggccgcgcaaggtttgctcgccggtctgaacgccgcccgtctgtctgcggacaaagaaggctgggcgcctgcgcgttctcaggcttacctcggcgtgctggtggacgatctttgcacgctgggcaccaaagaaccgtaccgcatgtttacctcccgcgcggaataccgcctgatgttgcgtgaagataacgccgacctgcgtctgaccgaaatgggccgcgagctgggcctggtggatgatgagcgctgggcgcgcttcaacgagaagctggagaatatcgaacgcgaacgccagcgtctgaaatccacctgggtaacgccgtcggcggaatcggccggcgaagtgaacgctcacctgactgcgccgctgtcgcgtgaagccagcggcgaagatctgctgcgtcgcccggaaatgacctacgcgcagctgacttcgctgacgccgttcgctccgggtcttgatgatgcgcaggccgctgagcaggttgagattcaggtaaaatacgaaggttatatcgcccgtcagcaggatgagatcgaaaaacagctgcgtaacgagaacacattgctgcctgcaacgctggattatcgccaggtttctggtctgtcgaatgaagttatcgccaagctgaacgatcacaaaccggtctctatcggtcaggcgtcgcgcatttccggcgttacgcccgcggcgatttcaattttgctggtgtggctgaagaaacagggaatgctgcgtcgcagcgcttga

SEQ ID NO: 73077 - DNA, 450 bp, Citrobacter koseri
atggcagacattactcttatcagcggcagcacccttggcggtgccgaatatgttgcagaacatctggctgaaaagctggaagatgcaggtttttcaaccgaaaccttgcacggtccgctattagaggatctgtcagcgtcaggaacctggctggttatcagctccacgcatggcgcgggtgatatcccggataaccttgctcctttctatgaagcgcttcagtcgcagaaccccgatctttctcaggttcgtttcggcgccatcggcatcggaagtcgtgaatatgacacattctgcggcgccatcgataaaatagaggccgcgctcaagacatcaggcgcaaaaccgatcggggaaaccctcaagatcaacatccttgaacacgatattcctgaagatccggcagaggtttggctgggatcctggattaatttactcaaaatagtgtaa

SEQ ID NO: 73078 - DNA, 459 bp, Citrobacter koseri
atggaaaattatcagatcgacaatctggatcgcggcatcctggaagcgttaatggcaaatgcgcgtacggcatacgctgaactggccaaacaatttagcgtcagcccggggacgattcacgttcgcgtagaaaaaatgaagcaggcggggatcattaccggcgcgcggattgacgtcagtccaaaacagctcggatacgacgtctgctgctttatcggcattattttaaaaagcgcgaaagactacccatccgcgctggcgaagctcgaaagcctggacgaagtgaccgaagcgtattacaccaccggccactacagcatctttattaaggttatgtgtcgatccatcgatgccctgcaacaggtacttatcaacaagatccaaacaattgatgaaattcagtccaccgagacattgatctccctgcaaaacccgatcatgcgtactatccggccgtga

SEQ ID NO: 73079 - DNA, 993 bp, Citrobacter koseri
atgaaaaccgcttacatcgccaaacaacgtcaaattagcttcgtgaaatctcacttctctcgtcaactggaggagcgtctgggtctgattgaagttcaggcgccgatccttagccgcgtaggagatggcacgcaggataacttgtcgggctgtgaaaaagcggtacaggtaaaagtgaaagcgttgccggatgcccagtttgaagtggtgcattcactggcaaagtggaaacgccagacgctgggacaacacgacttcagcgcgggtgaagggctgtacacgcacatgaaagcccttcgccctgacgaagaccgcctctccccgctccactccgtctatgtcgaccagtgggactgggaacgcgttatgggagacggtgagcgtcaattcgccaccctgaaaagcacggtagaggctatctgggaaggcattaaggcaaccgaagccgcggtaagcaaagaatctggtctggcgccgttcctgccggagcagatccactttgttcacagccaggagctgctggcacgttacccggatctggatgcgaaagggcgcgaacgcgcgatcgcgaaagagcttggcgccgttttcctggtcggtatcggcgggaaactgagtgacggtaaacgccacgacgtgcgtgcgccggattatgatgactggagttctgcttctgatctgggccatgctggtctgaacggcgatatcctggtctggaacccggtactggaagatgcgtttgagctttcctcaatggggatccgtgtcgacgccgatgcgctgaaacgccagcttgctctgaccggagatgaagatcgcctgagtctggagtggcaccaggcgctgctgcgcggcgagatgccgcaaacgatcggtggcggtattggtcagtctcgcctgacgatgctgctgctgcaactgccgcacattggtcaggttcagtgcggcgtgtggcctgcgcaggttcgtgaaagcgtcgcttccctgctgtaa

SEQ ID NO: 73080 - DNA, 1452 bp, Citrobacter koseri
atgctgacactggacacgctgaatgtcatgctggcggtcagtgaagaggggattatcgaagagattatcctcactttgctggcctccccgcagctggctatcttcttcgagaaattcccccgattaaagagagccatttccgacgatcttccccgctggcgcgaagcgctgcgcagccgtcttaaagacgcacgcgtgccgccggaactcacggaagaggtgatgtgctatcaacaaagccagcttctcggaacaacgcagtttattgtgcaattgccgcagatattagcgttgctgcaccggctacattcgccctatgccgggcaagcccagcaactggtggacagtaacgccacttttacgccagcgctgcacacgctttttctgcaacgctggcgtttaagcctgatcgtgcaaaccacggccttaaatcaccagttgctggaagaggagcgcgagcaattgctgagtgaagtgcaggaacgtatgacgctcagcgggcaactggagccggtcctggcggaaaatgaccatgcagccggccgcctgtgggacatgagcgcagggcagctcaaacgcggcgattatcagctgatcgtaaaatatggcgacttcctggcagaacaacccgaactgaaacgcctggcggaacagttaggccgctcccgggaagccaaatcggtgccgcgcaaagatgcgccgatggagacgtttcgtacgctggtgcgcgaaccggcgaccgttccagaacaggttgacggcattcagcaaagcgacgacattctgcgcctgctgccgcctgagctggcaacgctcggcattaccgaactggaatatgaattctaccgacggctggtggaaaaacagctgctcacgtaccgtctgcacggcgaagcgtggcgtgagaaagtgactgagcgcccggtcgttcatcaggattttgacgaacagccgcgcgggccattcattgtttgcgtggacacctccggctcaatgggcggatttaacgagcagtgcgcgaaagccttttgcctggcgctgatgcgcgtcgcgctggcggataaccgtcgctgtttcatcatgctgttttccacagaggtcgtgcgctatgaactgtctggcccagaaggcatcgagcaggccatccgctttttgagccagcgctttcacggcggcacggatatcgccagctgttttcgcgccatcattgagcggatgcaggggcgagaatggtttgatgcggatgcggtagtcatttcagattttatcgcccagcgcttacctgacgatgttgtgaataaagtaggggagttacagcgggtacaccagcaccgttttcatgcggtggcgatgtcggcacatggcaaacccggcatcatgcgcattttcgaccatatctggcgctttgataccgggatgcgaagccgcctgctacgacgctggcggcgttag

SEQ ID NO: 73081 - DNA, 1497 bp, Citrobacter koseri
atggctcacccacatttattagcggaaagaatttcccgtctgagcagcgccctggaaaagggactttatgaacgtagccacgccattcgcctttgcctgctggcagcgttgagcggtgagagcgtctttttacttggcccgccaggcattgccaaaagcctgatagcccgtcgtctgaagttcgcctttcagcacgcccgcgcctttgagtatctgatgacgcgtttctccacgcccgaggaggtttttggtcctctctccattcaggcgctaaaagatgaaggtcgctatgagcgtctgaccacgggttatcttcctgaagcggaaatcgtctttctggatgagatctggaaagcgggcccggcaatcctgaacactctgctgaccgccattaacgaacgccatttccgtaacggcgcgcacgaagaaaaaattccgatgcgcctgctggtggcggcctcaaacgagcttcccgaagcagacagcagtctggaggcgttatacgaccgtatgctcattcgtctgtggctggataaagtacaggataaggcgaatttccgctccatgctggtaagccagcaggacgaaagcgataacccggtgccggcctcattacaggtgactgatgaagagtattatcagtggcagaaggatatttccgccattacgctgcccgatcatgtatttgaactgattttcacgctgcgccagcagcttgatgcgctgccagacgccccctatgtctccgaccgtcgctggaaaaaagccattcgtctgttacaggccagcgcgttctttagcggacgcgacgccgttgcgccaatcgatcttatcctgctgaaagattgcctgtggtatgacgcgcaaagcctgaatctgatgcagcaacagcttgaaatattgatgaccgggcacgcctggcagcaacaggcaatgctgacgcgcctcggcggcattgtgcaacgtcgcctccagttgcaacagcagcaaagcgataaaacagcctttaccgttgttcgtcagggaggaatgttcagccgccgtccccattacgatctgccgccagaggcgagcgcgccagtgctaaccttgcttttgcaacaaccgcttaaactgcatgatatggaagtcattcatatcgcttttgaacgcagcgcccttgagcagtggctggcaaaaggcggagagatccgcggcaaactcaacgggatcggttttgcccagacgctgaatatggaagttgatagcgctcagcatctggtggtgcgcgacgtcagcctacagggcagccgtctggcgctaccgggcagttcagaagagggaatacccggcgaaatcaaacagcagcttgaggcgctggacagcgaatggcaccagcagcacagccggttcagcgaacagcaaaaatgtctgtttatccatagcgactggttaggtcgtattgaagccagcctacaggatgttggtgcgcagatccgccaggcgcagcaatgctga

SEQ ID NO: 73082 - DNA, 1869 bp, Citrobacter koseri
atgagcactgataataaacaatcattgtctgcgatcactctcgcagcgattggggttgtctatggtgatattggtaccagcccactttatacacttcgtgaatgcttgtccggtcagtttggttttggtgttgaacgtgatgccgtatttggctttctgtcgctgattttctggctgctgatctttgttgtttccatcaagtatctgacttttgtcatgcgcgcagataacgccggcgagggcgggattctgaccttaatgtcgctagccgggcgtaatacgtcggcgagaatgacgtccacgctggtcattatggggttaattggcggtagcttcttctacggcgaagtggtaattacacccgcgatctcagtcatgtcggccattgaaggtctggaaattgtggcgccggaactggatacctgggtcgtcccgctttctattattgtgcttactctgctgtttatgattcagaaacacgggacggggatggtcggtaagctgtttgcgccgattatgctgacgtggtttttgattctggccggactcggcctgcgcagtatcatcgctaacccggatgtgcttcatgccctcaatcccatgtgggcggcgaagttcttccttgagtacaaaacggtgtcgtttattgcgctgggcgccgtggtgctttcgattaccggggttgaggcgctgtatgcggatatggggcatttcggcaagctgccgattcgtctggcctggttctcggttgttcttccttcattaacgttaaactactttggtcagggcgcattgctgctcaaacacccggaagcgattaagaacccgttcttcctgttggcgccagagtgggcgctgatcccgctgctgattcttgccgcgctggcgacggttatcgcctctcaggcggtgatttccggtgtcttctcgctgacgcgccaggcggtgcggctgggatatttgtcgcccatgcgcattatccacacctccgaaatggagtccgggcagatctatattccgttcgtgaactggatgctctattttgcggtggttattgttattgtcagctttgagcgttccagcaacctggcggcggcatacggtattgccgttaccggtacgatggtgctgacctcgattctttctaccaccgtggcgcgtaaaaactggcactggaataagtattttgtcgcgctgattctggtggcgttcctgtgcgttgatgttccgctgttctcggcaaacctcgacaagctgctgtcgggcggctggttgccgctgacgctggggatcgtgatgttcatcattatgacgacctggaagagcgagcgtttccgtctgctgcgtcgtatgcatgagcacggtaactccctggaagccctgatcgcctcgctggagaaatcgcctccggtacgcgtccccggtacggcggtgtatatgtcccgcgcgctgaacgtcattccgtttgcgttgctgcataacctcaagcataacaaggtgctgcatgaacgcgtgattctgctgacgctacgcacggaagacgcgccatacgtacacaatgttcgccgggtgcagattgagcaactgtcgccaaccttctggcgtgtggtggccagctacggctggcgcgaaacgccgaacgttgaggaagtgttccatcgatgcggtctggaagggctgagctgccggatgatggaaacctctttctttatgtcgcatgaatcgctgatcctcggcaaacgtccgtggtatttgcgtttacgcggcaagctctatctgctgttgcagcgtaatgcgctgcgtgcgccggatcagtttgaaatcccgccaaaccgggttatcgaactgggaacgcaggtcgagatttaa

SEQ ID NO: 73083 - DNA, 420 bp, Citrobacter koseri
atgaagaaaggcgcggtacttaattctgatatttcatcggtcatctcccgtctggggcatactgatactctggtagtgtgtgacgcaggtttacctgttccatccagtacaacgcgtatcgatatggcgttaacccagggcgtaccttcttttatgcaggtactggatgtcgtgacccatgaaatgcaggttgaggcggctattctcgcgacggaaatcaaagaacataatccgcaactccacgaaacgttgctcagccatattgagcaactgcaacaacaccagggaaacaccatagaaattcgttacaccacgcatgaacattttaaaaaactaaccgcagacagtcaggcggtgattcgcagcggggagtgctccccgtatgcgaatgttattctctgtgccggcgtcacgttctga

SEQ ID NO: 73084 - DNA, 1506 bp, Citrobacter koseri
atggacgcattactgcaactcaaagggatcgataaagcgttcccgggcgtgaaagcgctatctggcgccgcgttaaatgtctatccaggccgcgtaatggcgctggtgggcgaaaatggcgcgggcaaatccaccatgatgaaagtcctgactggtatctatacccgtgatgcgggatcgttattgtggctgggtaaagaaacgaccttcaatggcccaaaatcctcgcaggaagccgggattggcatcattcaccaggagctgaacctgatcccgcagctcacgattgccgagaatatctttttggggcgtgagtttgtaaatcgctttggcaaaatcgactggaaaaagatgtatgccgaagcggatgttctgcttgccagactcaatctgcgcttcaaaagcgacaggctggtgggcgaactctctatcggcgatcagcagatggtcgaaatcgccaaggtactgagcttcgaatcccgagtcatcattatggatgaacccacggatgcgctcactgataccgaaacggaatcgctgttccgtgtcatccgcgagttgaaatcgcaggggcgcggcattgtctatatctcccaccgcatgaaagagatcttcgaaatttgcgatgacgtgacggttttccgcgacgggcagtttattgccgagcgtgaagtggcatcgctgaccgaagattcgctgattgaaatgatggtcggacgtaagcttgaagatcagtacccgcgtctggataaagcgccaggcgaggtacgcctgaaagtcgataacctgtgcggtcccggcgttaataatgtctcctttactctgcgcaaaggggaaattctggggatctccggtttgatgggcgccgggcgtacggaactgatgaaagtgctgtacggcgcgctgccgcgcaccagcggttacgtcacgctcgacgggcatgaagtgattacccgttcaccgcaggatggcctggctaacggtattgtttatatctctgaagaccgtaaacgtgacggcttagtgctcggcatgtcggtaaaagagaatatgtctctcaccgcgctgcgttatttcagccgcgctggcggcaacctgaaacataaagatgaacagcaggcggtgagtgactttatccgtctgttcaatgtgaaaacgccgtcgatggagcaggctatcgggttgctctctggcggcaatcagcagaaagtcgccattgcgcgtggactgatgacccgccccaaagtgctgatcctcgatgagccaacccgcggtgtggacgttggcgcgaagaaagaaatttatcagcttatcaaccagtttaaggccgatggcctgagcatcattctggtctcatctgagatgccagaagtattgggtatgagcgatcgcattatcgtcatgcatgaagggcatctcggcggtgaattcactcgcgagcaggccacccaggaagtgttaatggctgccgctgtgggcaagcttaatcgcgtgaatcaggagtaa

SEQ ID NO: 73085 - DNA, 966 bp, Citrobacter koseri
atgactatccaggctgtttctggtcgccgttatttcactaaagcgtggctgatggagcagaaatcgctcatcgctctgctggtgctgatcgcgattgtttctaccatgagtcccaacttttttaccgttaataacctgtttaacattctccagcaaacgtccgtcaacgctatcatggccgtcgggatgacgctggttatcctgacgtcaggcatcgatctgtccgttggttccctgctggcgcttaccggcgcggttgccgcttcaattgtagggattgaagtgaatgcgctggtggccgttgcggcggcgctggcgttaggtgccgccattggcgcagtgaccggcgtaatcgtggcgaaaggtcgcgtgcaggcgtttatcgccacgctggtaatgatgcttctgctgcgcggcgtcacgatggtgtacaccaacggaagcccggtgaataccggctttacggataacgccgatctcttcggctggttcgggattggccgcccgctgggcgttccgacgccggtctggattatgggtatcgtcttcctggcggcgtggtacatgctgcatcatactcgcctgggccgctatatctatgcgctgggcggcaacgaagcggcaacgcgtctgtcgggtatcagcgtcagtaaagtcaaaatcatcgtctattcgctttgtggtctgctggcctcgctggcgggcatcatcgaagtggctcgtctctcctccgcgcagccaacggcgggtacgggttatgagctggatgccatcgcagcggtcgtgttaggcggcaccagcctggcgggcggtaaagggcgcattgttgggacattgatcggcgcattgattctcggtttccttaataatggtttgaatttgttaggtgtttcctcctattaccagatgatcgtcaaagcggtggtgattttgctggcggtactggtagacaacaaaaagcagtaa

SEQ ID NO: 73086 - DNA, 891 bp, Citrobacter koseri
atgaacatgaaaaaactggctaccctggtttctgctgttgcgctgagcgccaccgtgagcgcgaatgcgatggcgaaagacaccattgctctggtgatctccacgctcaacaacccgttctttgtcaccctgaaagagggggcgcagaaagaggcggataaactgggctataacctggtcgtgctggactcccagaacaacccggcgaaagagctggctaacgttcaggatttaaccgttcgcggcactaaaattctgctgatcaacccaaccgattccgacgcggtaggcaacgcggttaagatggctaaccaggcgaatattccggttatcacccttgatcgccaggcaaccaaaggcgacgttgtcagccacattgcttccgataacgtgctgggcggcaaaatcgccggtgattacatcgcgaagaaagcaggtgaaggcgcgaaagtgattgaactgcaaggcatcgccggaacatccgcagcgcgtgagcgtggcgaaggcttccagcaggccgttgcggcacacaaatttaatgtactggccagccagcctgctgactttgaccgcaccaaaggtctgaacgtcatgcagaacctgctgactgcacatcctgatgtgcaggcggtattcgcacagaacgacgaaatggcgctgggtgcgctgcgcgctctgcaaaccgcaggtaaatctgatgtgatggtggttggatttgatggtacgccggatggcgagaaggcggtaaatgatggcaaactggctgcgactatcgctcagttgccggatcagattggcgctaaaggcgttgaaaccgctgataaagtactgaaaggcgagaaagttcaggccaaatatccggttgacctgaaacttgtcatcaagcagtaa

SEQ ID NO: 73087 - DNA, 930 bp, Citrobacter koseri
atgaaaaccgcaggcaaccttgtcgtccttggcagtattaatgccgatcacatcctcaacctcgaatcttttcctgcgccaggcgaaaccgtaacgggcacccaatatcaggtggcattcggcggtaaaggcgcgaatcaggcggtggccgcagggcgcagcggcgcaaatatcgcgtttattgcctgtactggcgatgacgatattggcgagagcgtgcgtaaacagttagccagcgataacattgatattgctccggtcagcgtgattaacggggaatctaccggagtcgcgctgatttttgttaatggcgaaggggaaaatgtcatcggcattcatgctggcgccaatgccgcattgtcgcctgcgctggtggaagcgcaacgcgagcgtatcgccggggcttctgcgctattgatgcagctcgagtcgccgattgaaagcgttctggcggcggcaaaaattgcgcatcagaacaacactaccgttgcgcttaacccggctccggcgcgtgaactgtctgatgagctgctggcgctggtggacatcattacgccaaatgaaaccgaagcggaaaagctcacggggattcgcgtcgaaagtgatgaagatgccgctaaagcagcgcaggtgctgcatgataaaggcattcataccgtactgattacgttaggcagccgcggcgtgtgggccagcgtgaagggcgaaggtcgtcgtgtgccggggtttaaagtgaacgccgttgatacgatagccgccggggatacttttaatggtgcgttagttaccgccttactggaagagacgccgctgccggaggccattcgctttgcccatgccgctgctgcgattgcggtgacacgcaaaggtgcgcaaccttctgttccgtggcgtgaagagatagaggcgtttttaggtcagcagaggtaa

SEQ ID NO: 73088 - DNA, 990 bp, Citrobacter koseri
atgaaggatgttgcccgtctggcgggcgtttccacttcaactgtttcgcacgttattaataaagatcgctttgtcagtgaagctatcaccgggaaagtggaagcggcgattaaagagttaaactacgcgccttcagcgttggcgcgtagcctgaaattaaatcagacccgcacaatcggcatgctgatcaccgccagtaccaatcctttttattcagaactggtgcgcggcgttgaacgtagctgctttgagcggggctatagcctggtattgtgtaataccgaaggcgatgagcagcgaatgaaccgcaatctggaaacgctgatgcaaaagcgggtcgatggcttattgctgctctgtacggagacgcatcaaccctcccgggagatcatgcagcgttatccctctattcctaccgtgatgatggactggtcgccctttgatgacgaaggggattgcgatctgatccaggacaactcccttctgggcggcgatttagcgacgcaatacctgattgataaaggttttacccgaatagcctgcattaccggcccgctggacaaaacgcccgcgcgtttgcggctggaagggtatcgggaagccatgaaacgcgcggggctggaaattcctgaagggtatgagatcacaggagatttcgagtttggcggcggatttgaaaccatgcaaatgctgctgtcccataaacaacgcccacaggcggtatttgccggcaatgatgcgatggccgtcggcgcgtatcaggcgctttatcaggcagggctgcgcatcccgcaggatatggcggtgattggctatgatgatattgaactggcgcgctacatgacgccgccgctgacgacgattcatcaaccgaaagatgaactgggtgagttggccatcgacgtgttgattcaccgtatggcacaacccacgctacaacagcagcgtttgcaacttactcctgttctgatggcgcgggggtcggtttag

SEQ ID NO: 73089 - DNA, 1428 bp, Citrobacter koseri
atgtcagagaaaaaagcgcgcagtatggccgggttgccgtggatagcggccatggctttttttatgcaggcgctggatgccaccattcttaataccgctctacccgctatcgcacacagcctcaaccgttctcctcttgccatgcagtccgctattatcagttataccctgacggtcgcgatgctgattccggtaagcggatggctggccgatcgctttggcacccgtcgcgtctttattattgccgtcagtctgtttacgctcggctcgctggcatgcgcgctttctggctcattagctgaattggttgtcttccgcgtggtgcaggggatcggcggcgcaatgatgatgccggtcgcccgtctggcattattacgcgcttacccccgaagtgaactgcttccggttctgaatttcgtgacgatgccaggcctggtcggccccatcctcggcccggtattggggggcatactggtgacatgggcaagctggcactggatcttcctgattaatatccccattggcattgtcggtatcctgtatgcccgtaagtacatgccaaacttcaccacgccgcgacgccgtttcgacatgaccggcttcttcctctttggtttgagtctggtgctgttctccagcggaatggagcttttcggcgagaagatcgtcgcaacctggatagcattaaccattattctgagcagtatcgtgctgctgctagcctatattcgccatgcgcgtcgacacccaacgccgttgatttcactttcgctgttcagaacgcgcacgttctccgttgggatagcaggaaacctcgccacgcgtctgggaacgggatgcgttcccttcctgatgccgctgatgatacaggtaggatttggatacccggcgctgatagccggctgcatgatggccccgacggcgctgggttctattctggcgaaatcagcggtcactcaggtgctgcgcaaactggggtacaagacgacgctggtcggcattacggtatttattggcctgatgattgcgcagttctctttgcaatcccccgccatgccggtatggatgttgattctgccgctgtttgttctgggtatggcgatgtccacgcaatttaccgccatgaacaccatcacccttgcggacctgaccgatgataacgccagcagcggcaacagtctgctggccgtcacgcagcagctttccatcagtttaggggtagcgatcagcgctgccgtattgcgtctctatgaagggattgagggaaccaatacggttgaacagttccactatacctttattacgatgggcgctattacggtggtatccgcgctgatgttcatgttgctgaaagccaaagatggccgcaatctgatcaaagaacggcacaaacctaaaccgacccccgcgccatcagaacaggagtaa

SEQ ID NO: 73090 - DNA, 705 bp, Citrobacter koseri
atgcctttaagcgcacaacagttagctgcacagaaaaatctttcctacgttctggctgagaagctggcgcagcgaatcttaaagggtgaatacgtgcccggcaccattcttcccggagaaatcgaactgggcgagcaatttggcgtgagtcgcacggcggtacgtgaggcagtgaagacgctaacagcaaaaggcatggtgttgccccgtcctcgtattggtacgcgggttatgccgcaggcaaactggaacttcctcgatcaggaactgctcacctggtggatgacagaagaaaacttccatcaggttattaatcattttctggtgatgcgtatcagtctcgaaccgcaggcatgttcactggcggcaacgatcggatcagcggaacagaaagcgcatctgaataccttaatggaagagatggtggcgttgaagaagaacttcagacgcgaacgctggattgaagtcgatatggcgtggcatgagcatatttatgaaatgagcgcgaatccgttcttaatctcttttgcctcgctgttccattcggtctatcacacctacttcacctctattacctataacgatgtggtgaagctggatttacaccaggctattgtagatgccatagccgacagtgatggcgatcgcgcctttaaagcgtgccaggcattgttgatagcgccgaacgaacaaccggacaagtaa

SEQ ID NO: 73091 - DNA, 858 bp, Citrobacter koseri
atgggaaatggatggcatgaatggccgctggtgctgtttacggtgttcggtcaatgcgttgtcggcgcattgattgtcagcggtctgggctggtttgcggcgaaagacgatgcggccagcagacagcgtattgtgcgcggtatgttctttttatgggtcgtcatggggctgggttttctggcgtcgatcatgcacctcggctcgccgttccgcgcgtttaactcgcttaaccgggtgggcgcttccgcgctgagtaatgaaattgccgctggctctgtcttttttgccgtaggcggtttctggtggctggtggctgtgctcggcaaaatgccggaagcactgggcaaaatctggctgctggtcagcatggtactcggggtggtatttgtctgggcaatgacgcgggtctatcagatcgataccgttcctacctggtataatggctacacgacgctggcgttcttcctgacggtgttcctgagcgggccgctatttgcggcgctgatattgcgcgccgcgcgcgccagattcaacggcacgacgttcgcaagcatcagcgtgctggcactgttagtctgcgcggccgtaatcatcatgcaaggcatgtcgcttggggcgatccacagctccgtgcaacaggcgagcgcgctggttccagactatggccgcttacaggtctggcgcgtagtgctgcttgctgccgggctgggttgctggatatgcccgttggtgcgccgcaaagaaccgcacgtcgtcggattgttgctggggttaatcctggtgcttggcggcgaaatcataggtcgcggattgttttacggcctgcatatgaccgtcggaatggccgttgcaggttaa

SEQ ID NO: 73092 - DNA, 615 bp, Citrobacter koseri
atgacttctttttcacaacgtgacgatttttctatggctgcacgcgtgctgggcgcgttgttttattatgcgccagacagtatcgaagccgccccgttggtttcagcgttaaaaaccgacggctggcaggcgcagtggccactttcaccggaggttctggcgccgattgcggcggtttttcaggccgacatcgaggagccgctcccgcaagcctggcaacgtctgtttgtcggtccctgggcgcttccgtcgcctccctggggatcggtctggctggaccgtgaaagcgtgttgtttggcgaatctacgctggcattacgccagtggatgcgggacaacggcatccagtttgagatccagcaaaatgaaccggaagatcattttggttccctgctgctgttggctgcctggcttgcggaaaatggccgtcatagcgaatgcgaacaactgctggcctggcatctgttaccgtggtctgcgcgcttcctggcggttttcatcgaaggcgcaaaccatccattttaccaggcggcaggtgagctggcacagcaaacgctggcgcagtggcagtctcagttgctgatccctgtcgccgtaaaaccgctgtttcgctaa

SEQ ID NO: 73093 - DNA, 711 bp, Citrobacter koseri
atgcacacctttacgttaaaacgcgtgctcgggtttactggcgcgatcgcccttgtgctggcgctgctggtctggggagtgggtctggaaaccattaaagcgcgtcaggttgatctgctttatttgggcaaacagcatttactcctcgtctttacctccatgttcttcaccttagttatcggtattcccagcggcattttactgagccgtccggcagccaaaggattcgccgaatacgtaatgcagctctttaatgtaggcaatactctgccgcctctggccgtgctggcactggcgatggtgatcatcggcattggcgacgttccggcgattttcgcgctgttcctcgcctcgcttcttcccgtcgtgcgcaatacctacgccgggctctgttctgttcccgcctccctgattgaagccgcaaacggcatcggtatgacgaaatggcagcgtctgcgtcaggttgagctgcccaatgcctggccggtgatgcttgcagggattcggatcgcgacggcgattaatgtgggtacggccccgctggcgttcctgattggggccagcagctacggcgagctgattttccccggcatttacctcaatgacttcccgacgctgattctgggcgcaacggcaaccgctctggtggcgctgattctcgacagcctgcttgccctgcttggccgcatcctcagtccgcatacggcctga

SEQ ID NO: 73094 - DNA, 903 bp, Citrobacter koseri
atgacattaaaaaaacatctgctgggatggcttgccgccgcgttgctcgttaccggacaggctcaggcggccccgttgatccttgcaaccaaaggttttaccgaacaacacatcctttccgccatgaccgtgcagtacctgcaaaaaaagggttttcaggttcagccgcgcaccaacattgcggcggtgatttcacgtaatgccatggtgaataagcagattgatatcacctgggaatacaccggcacgtccctgatcatttttaaccacattgataaacggatgagcccgcaggaatcctatgataccgtcaaacgcctggatgcgaagctcggactggtatggctaaacccggcgaatatgaataacacctacgcgttcgccatgcagcgcaaacgcgccgaagcagagaacatcaacaccctgtcggaaatggtggcgaaaatcgaacacatccgccagaccgaccctgacaataactggatgttaggtctcgaccttgagttttccgggcgcagcgacgggatgaagccgttgcaggatgcctaccagatgcagcttgaccgtccgcagattcggcaaatggacccgggtctggtctataacgccgtgcgcgatggctttgtggacgccggtctggtgtacaccacggatggccgggtgaagggttttgacctcaaggtgctggaagatgataaaggcttcttcccaggttacgctgtcacgcctgtcgtccgtaaagagatactggatgctcatccggggctggatgatgcactgaataccctttccgggctgctcaataacgacgtcatctcgacgcttaatgcgcaggtcgacatcgatcaccagtcaccccagcaggttgcgcgcacattcctgcaacaaaaaggtctgctgtaa

SEQ ID NO: 73095 - DNA, 648 bp, Citrobacter koseri
atggatacgattcattacatgatggataacgcgggttatctgacgagcctcactcttcagcatttgtggctggttgcgctggccgtcggtctggcgattatcattggcgtgccgctgggcattctgattgttcgtcataaatggctggctacgccggtgttaggggcggcgacgctgctgctcactatcccgtccatcgcattatttggtttgatgatcccgctgttttcgctgatcggtcaggggattggcgcccttcccgcaattaccgccgtttttctttactcgctgctgccgattgtgcgcaacacgcacaccgcgctcgacagtttaccgccgggcttgcgcgaagcgggacgcggaattggcatgacgttctggcagcgtctgcgctgggtagaaattccgatggccctgccggtgatttttggcgggattcgcactgccgtcgtcatgaatatcggcgtgatggccatcgccgccgttattggcgctggcggcctggggttactgttactgaacggcatcggcgggagtgacatccgcatgttaatcgccggtgcgctgatgatttgtctgttggccattgtgctcgactggttgctgcatcgcctgcaagtcgtactgacacctaaggggatacgataa

SEQ ID NO: 73096 - DNA, 1149 bp, Citrobacter koseri
atgataaaactggaaaacctcaccaaacgcttttcacagaagaacggccaaccgcttaacgccgttgataacatcaatctgaacgtgccggaaggtgaaatgtgcgtgctgcttgggccgtcaggctgcggcaagaccaccaccctgaagatgatcaaccggctgatcgcgcccagcagcggcaatattttcattaacggacaaaacaccagtgcgatggataccgtcacgctacggcgcaacattggctacgtgatccagcaaattggcctgtttcccaacatgaccatcgaagagaacatcacggttgtcccgcgtatgctgggctgggataaaacccgctgcaaacgtcgtgcggaagagttaatggacatggtggcaatggatgcgaaaaagtttctgcatcgctacccgaaagagatgtctggcggtcaacaacagcgcatcggcgtgatccgcgcgctggcggccgatcccccggtactgttgatggatgaacctttcggtgcggtggacccgattaaccgcgaggtgattcagaatcagtttcttgatatgcagcgggcgctgaaaaagacggtgatgctggtcagccatgatattgatgaagcgctgaaactgggcgacaggattgccgtattccgccagggccgcattatacagtgcgccagcccggatgaattgctggcaaaaccggcgaatgaattcgtcggctcatttgtcggtcaggatcgtacgctaaaacgtcttctgctggtttcggcgggcgacgtaaccgaccaacaacccaccctgaccgcccgcaccgccacctcgctggcagaggcgttcggcatcatggacgataatgatattcgcgcgatcaccgttgtcgacagcgacggcaagccgcttggctttgtgaagcgtcgtgaagccaggaacgccaacggcacctgcgcggatataatccacccgtttcgcgtcaccggaaaagcggaagacaacctgcgtattgtgctgtcgaaactgtacgagagtaacaccagctggatgcccattgtcgatgaggaaggacgctataacggcgaaatctcgcaggattacattgccgattatctcagttcaggccgcacccgtcgggcgctgaatattcacgaaagtagctaa

SEQ ID NO: 73097 - DNA, 1254 bp, Citrobacter koseri
atgtttcgccgcctgttaatcgcgacaataattggcatccttgccgcactggcggtagccgggtttcgtcacgccatgctggtgctggaatggctttttttacgtaacgatacgggaagcctggtgaatgccgcgacaaacctttctccctggcgacgactgatcacccccgccgtgggcggcctcgcggcaggtgcgctgctctggggctggcagaaaatgaatcaacaacgcccccatgcccccaccgactacatggaagccctgcaaacagatgggcaattcgattacggggcaagtctggtgaagtcccttgcttcgctgctggtcgtcgccagcggtagcgccatcgggcgcgaaggggccatgatcttactggcagcgctggcggcatcctgttttgctcagcgttgcaccccgcgtgaagagtggaaattgtggatcgcctgcggcgctgcggcagggatggccagcgcgtatcacgccccgctggcgggcagcctctttatcgcggaaatcctgtttggcacgctgatgctggcgtcgctgggccccgttgtgatttccgccgtcgtggcattactgaccacccatttgctcagcggcggtaatgccctgctctatacggttcacctgtcgctggatttacatgtgcgggaatatgcgatgattatcagcaccgggctggtggctggcgtctgcgggccgctgtttatgtggttaatgaccaccactcataacggttttattcggctgaaattatcgcctccgtggcaactggcgctgggcggattcatcgttggcttactatccctgctgacgccggccgtctggggaaatggctacagcgtcgtgcagtcatttttgctctccccgccgctgctctccgtgatcgccgggatcttcatctgcaaattactcgccgtactcgccagcagcggttccggtgcgcccggcggcgtctttacccccacgctgttcatcggcttgtcgattggtatgttatacggtcggatgtggggattctggcttccgggagcggatgagatggcaatattgctgggattaacaggaatggcgacgctgctggcggcaacaacacacgcgccgatgatgtcgacgctgatgatctgtgaaatgaccggggagtatcgactactccccggattactgattgcctgcgtagtggcgtcggtcttatcgcgaacgttacgcgaggactcggtctaccgacagcacactgccgagcattga

SEQ ID NO: 73098 - DNA, 696 bp, Citrobacter koseri
atgctgaagcgtttctttattacaggtacagacacttctgttgggaagacagtggtttcccgcgcattactacaagcgttagcgtcagggaacaaaagcgtcgcaggttataaacccgttgcgaaaggcagcaaagagacgccggaaggcatgcgcaataaagatgcgctggtgttgcagagcgtctcttctattgagctgccttatgaggcgatcaatccgattgcgctgagcgaagacgaaagcagcgtggcgcatagctgtccgatcaattacaccctgttatctaacgggcttgccagcctgagcgaaaaggttgaccacgtcgtggtggaaggcaccggcggctggcgcagcctgatgaacgacctgcgtccgttatctgaatgggtcgtgcaggagcagttaccggtgttgatggtggtggggattcaggaaggctgcattaaccatgcgctgctgaccgcacaggctatcgccaatgacggattaccgctgatcggctgggtggcgaaccgcatcaatcccggactggcgcattatgccgaaatcattgatgtgttaagcaaaaaactgcctgcgccgctgattggcgaactgccttatttgccgcgtgccgaacaacgcgagctggggcaatatatccgtctgtcaatgctcggcagtgtgctgtcggtagaccgagtcctcgcgtaa

SEQ ID NO: 73099 - DNA, 1221 bp, Citrobacter koseri
gtggttgctgatagtcagccagggcatatcgatcaaatcaagcagaccaatgctggcgcggtatatcgcctgattgatcagctgggccccgtgtcgcgaattgatctttctcgtctggcgcaactggcgcctgccagtatcactaaaattgttcgcgaaatgctcgaagcgcatttagttcaggagctggagatcaaagaggcgggaagccgtggtcgcccggcggtcgggctggtggtggaaaccgaggcctggcactatttgtctattcgtatcagccgtggcgagatttttctcgccctgcgcgacctgagcagcaaactggtggtggaggagtgccttgagctaccgctggtttctgagactccgctgcttgaacgtattatttttatggtcgatcagttctttatccgtcaccagcaaaaactcgaacgcctgacctctatcgccatcaccttacccggtattattgatactgagaatggcattgtgcaccgcatgccgttttacgacgatgtcaaagagatgccgctgggggaaaccctcgaacaccacaccggtgtaccggtctatattcagcatgatatcagcgcctggacgatggccgaggcgctttttggcgcatcgcgcggcgcgcgtgatgttattcaggtggtgattgatcacaacgttggggctggcgtgattaccgacggccacttactgcatgcgggcagcagcagcctggtggagatcggccatacgcaggtcgacccctacggtaaacgttgttactgcgggaaccacggctgtctggaaacgatcgccagcgtggacagcgtgcttgaactggcgcaactgcgactcaatcagtcaatgagttcttcgttgcacgggcagccgctgacggtggattcgctgtgccaggcggcggtgcagggggatttgctggcgaaagatatcattagcggcgtcgggatgcatgttggccgcattctggcaatcatggtgaatttatttaatccgcaaaaaattctgatcggttcgccgctgagcaaagcggcggaaatcctttttcctgcgattgcggacagcatccgtcaacaggcgctgccggcgtatagcaagcatatcgccgttgaaagcacgcagttttccaatcaagggacaatggcgggtgccgcactggtaaaagacgcgatgtataacggttctttgttgattcgtctattacagggttaa

SEQ ID NO: 73100 - DNA, 900 bp, Citrobacter koseri
atgaatattgaacttcgtcatctacgttactttgtggcggttgcggaagagttgcattttggccgggcggctgcgcggctgaacatctctcaacctccgctaagccagcagatccagacccttgaacagcagattggcgcgcggctgctggcgcgaaccaaccggagcgttgcgctgacggcggcgggtaagcagtttctggcagacagtcggcagatccttgggctggtgaatgaggccgccgcccgcgcggaacgcttgcatcagggggagaccggcgagctgcgcattggcttcacctcatccgcgccgtttatcaaagccgtctcggatacgctgtctctgtttcgccaggactacccggatgtgcatatgcagacccgtgaaatgaacacccgcgagcagattgtgccgcttaatgaaggcgcgctggatatggggttactgcgcaatacctcattgccggatacgctggactgggaagtgattctgcatgaaccgttgctggcgatgatcccccgtgaacatccgctggcgcaaaagccggtcgtgacgctggcggagctggcgaaagaaccgtttgtcttttttgatccgcatgtcggaacggggttgtatgacgatattctcggcctgatgcgccgttaccatctcactccggcgatcactcaggaggttggagaggcgatgacgattatcgggctggtagccgcaggactgggggtgtcgattctgcccgcctcgtttaaacgggtacagcttgatgaaatgcgttgggtgcccattgccgaagcggacgccgtgtcggaaatgtggctggtatggccgaaacatcatgaacaaagtcacgctgcgcaacgatttcgccatcaacttttaacggccgcaaagcgcgcttaa

SEQ ID NO: 73101 - DNA, 1254 bp, Citrobacter koseri
gtgagtcgtattactgctgtcgacaccgcaacggcgagcgatgttgatgaacacattatttcccagccggttcaatatataaaacgtggtacatcccagtttatgcgcgttacgctggcgctattctccgccgggctggcgacgttcgcccttctttattgcgtacaaccgatactgcctgtgttgtcccatgaatttggcgtctctcccgccagcagcagtatctcgctttccatctccaccggcatgttagccatcgggctgctgtttaccggcccgttgtccgacgcgatcggccgcaaacctgtaatggtgacagcgctgctgctggcctcctgctgtacgctgctttccaccatgatgaccagctggcatggcattttaatcatgcgcgcgctgattggcctgtcgttgagcggcgtcgccgcggtaggcatgacctatttaagtgaagagatccatcctagtttcgtcgccttctcaatggggttgtacattagcggcaactcgattggcggcatgagcgggcgtctgatcagcggcgtatttaccgacttttttaactggcgcatcgcactggcggcgatcggctgtttcgcgctggcgtccgcattgatgttctggaaaatcttgccggaatcccgccatttccgaccgacctcattacgccccaaaacgctgttcatcaacttccgccttcactggcgcgacaggggcctgccgctattattcgcagaaggctttttgttaatggggtcgtttgtcacgctatttaactatattggctatcgattgatgctttcgccctgggaactcagccaggccatcgtggggcttttatcggtggcttatctgacgggcacctggagttcgcctaaagcaggcgccatgacgacgcgttatggtcgcgggccggtgatgttattctcaaccggcgtgatgttgttcgggctgttaatgacgctgttcacgtcgctatggctgattttcgccggaatgctgctcttctccgccggattctttgccgcgcattcggtggcaagcagctggattggcccacgcgcgaaacgcgcaaaaggccaggcatcttccctgtatctcttcagctattacctgggttccagcattgccgggacgttaggcggggtattctggcacagctatggctggaacggtgtgggcgggtttatcgcgctgatgttgcttctggcgctgctggttggctcccgcctgcatcatcgtctgcacgtttga

SEQ ID NO: 73102 - DNA, 690 bp, Citrobacter koseri
atgcaacaggaaatcaataacgcctatattgtcaggacaaaagcagtgtcaggctgtttttctatgtttatgctgatgtttggtattacatttacgccactgttttttacccgcagtgcgcaattaatggaaagtgggttacttttaccgctgatgtttgtgctggagtttcttattctggtcccgctgtattatctcttttttagaaaaagagacggtctgggaaaaggcacattgagcgcaaagtggtttgttattttgtttggcgccattctgatcatccagtttcttttacctgctatgttggggatgagaaaaacagaagcgtgggtcatgacgcaggtttcattgcataactacgctttctggctgaccaacctgtcactgattttcctcgtcccggtctacgaggaaatcgtcttcagagggtgtctgttcaacgcctttcagtactggttcaatgataaggtgtgggcgacgtcgcttgtcgtttcaacgctgtttgcgctgatgcatacgcagtacgccgatatcagaacattattgatgttatttttaatatcgcaggtgcttattgtcgccagagtcaaatctaaagggttattaatgcctgttaccctgcatatattaatgaatgcgacggtgatcgggatacaatatggcgttcaggtcttattatcctccgggtga

SEQ ID NO: 73103 - DNA, 1491 bp, Citrobacter koseri
atgtccaacaagagccactaccaacaactcacccgcactttccagcgtctctcccgcttttcgcatctctccgctatcgccagttgggatatgttcaccatgatgcctcccggtggaagcaccgcgcgaggcgaagcgctggccgagctgaacgtgctggaacatcagttactgactgacccgaaggttgcgcagtggatagccgccgccgggcaggaagatttgaacgatgttgagcaggcgaacctgcgtgaaatggcgaggcggcaccatcaggcggccctgctgcctgagtcactggtggaggcgaaatcgctggcggggagccggtgtgaacacgcatggcggagtcagcgtccggcgaatgactggcaaggatttgcgcagaatctgaaagaggttgtgaaatacagccgtgaagaggcaaaacttcgcgccgaagctaaaggatgttcgccctacgatgccctgctggatatttttgagcccgatatgaccagcgcccaactggatgttctgtttgcggatgtcaaaacctggcttcccgatctgttaaaccgcgcggtgtcaaaacagtcgcatcagccgctgattgcgccggtcggcccgttcccgacggcgctacagcgtgaactgggactggaaaccatgtcgcagttagggtttgattttaacgccggtcggctggacatcagcgcccacccgttctgcggcggtgtgccggaagatgtgcgcatcaccacgcgctatgatgaaaatgaattactcagcgcgctctttggcgtgatccacgaaacggggcacgcccgctatgaacagaatctgccccacgcctggcagggtcagccgatcgcgtttgcccgctccacggccatccatgaatcccagagtctgtttttcgagatgcaactgggtcgcagcacggcgttcctcaaacgactcattcccgccgttaaacgtcactttggcgatcagcccgcttttgaagaagcgaatttcattgcctggaatcagcgggtgaaaccgggccttatccgcgtggatgccgacgaagtgagttatcctgcccatgttatcttacgctatgacattgaacaggcgctgattaacggcgacatcgaagtggatgatattcccgcgctgtggaatgaaaaaatgcaggcctggctggggctgtcaaccgcgggagattaccgtaacggctgtatgcaggacatccactggaccgacggcggctttggctacttcccgtcttatacgctgggcgccatgtatgccgcacagctgtttagcgccgcccatagcgcattgccggatctgcataatcagattgcgcaaggcgatctcagcgccttgtttgactggctgcgacaaaatatctggcagcacggcagtcgctttactaccgcgcagctgatcgctcaggccaccggagaaccgttgagcagccgttacttccgggcgcatctggaatcacgctatttgtcatga

SEQ ID NO: 73104 - DNA, 264 bp, Citrobacter koseri
atgaaaaaagtattagctctggttgttgccgctgctatgggtctgtcttctgctgcatttgctgctgaaacggcaacgtccacgacggctccggctgcggcacccgctaaaaccgcaccggcaaaaaccacgcatcacaaaaaacaccacaaagcagcagcgactcagaaagcgcctgaacaaaaagcgcaggcagcgaaaaaacacaccaaaaaagcggtaaaacatactgcggctaaaccggcagctaaaccggcggcataa

SEQ ID NO: 73105 - DNA, 819 bp, Citrobacter koseri
atgcataaaaccattgcggtattactgggcgtaatttgtctttcccctgttgttgctcatgcggatgaggcagataccaccacggatacccgtgaaaccaaaacgttattttttgaccatgacgatcgggtcaaggttgaagatccgacgcagtcgccgtgggacgctattggtcaactggaaaccgccagcggcaacctgtgtaccgccacgctcatttcatctcatctggcgctcaccgccggacactgcttgttaacgccgccgaagggaaagccagataaagccgtggctttgcgtttcgtatcgcgaaaaggtctctggcgttatgaaattcacggtattgaaggtcgggtcgatccgtcgctgggaaagcgcttaaagcctgatggcgatggctggattgtccctccggccgccgcgccgtgggattttggtttgattgtgctgcgttatccgccgtccggcattaccccactgcccttatttgaaggcgataaagccgcgctaaccgccgccctgaaaaccgctgaccgcaaagtgacgcagtcaggttacccggaagatcatcttgatacgctttactcacatcaggattgcctgattactggctgggcgcaaaacgcggtgctctctcaccagtgcgacacgctgcccggcgacagcggttctccgttaatgctgcataccgacgctggctggcagttgattggcgtacaaagttccgctccggcggcaaaagatcgctggcgggctgacaaccgcgcgatttccgtcaccggctttcgcgacaagctggaagcgctggctcaggaatag

SEQ ID NO: 73106 - DNA, 330 bp, Citrobacter koseri
atgccgcagtttgagtgggttcatgccgcgtggctggcgatggcgatcgttctggaaatcgtcgctaacgtgttcctgaaattttctgacggctttcgtcgcaagttctatggcattctgtcgctggccgcggtgctggcggccttcagcgcgctctctcaggcggtgaaaggcattgatctttcggtggcatatgcgttgtggggcggatttggtatcgccgccacgctggcagccgggtgggtgctttttggacagcgtctgaacaacaaaggctgggtaggcgtggtattgctgcttatcggcatgatcatgataaaactggcctga

SEQ ID NO: 73107 - DNA, 363 bp, Citrobacter koseri
atgttttactggattttattagcccttgccattgcggctgaaattaccggaacgctgtcgatgaaatgggcaagcgtaagcaatggcaacacgggttttattttaatgctggtcatgattacgctgtcgtatatttttctctcttttgccgtaaaaaaaattgcgcttggcgtggcgtatgccttgtgggaaggcatcggtattttatttattacgctgtttagcgtgctgttatttgacgaagccttatcggccatgaaaattgcgggtctggttacgctggtattcgggatcgcgctgattaaatcgggtacgcgcaagccagtaaatgccgcgaaggaggcgacgcatgccgcagtttga

SEQ ID NO: 73108 - DNA, 1035 bp, Citrobacter koseri
atggcaaaaccgatcatcacgcttaacggcctgaaactcgtaatcatgctgggaatgctggtcatcattctcaccggtattcgcttcgctgccgatattattgtgccgtttattctggcgttatttattgcggtggtactgagcccgctggtgcagcgcatggtcaggcttcgcatcccgcgcgttttggccgtatcgatactgatcgggattatcgtgatgggcatggtgttgctgctggcctatctcggcacatcgctaaatgagttagcccgcacgctgccgcaataccgctcatcattggttgtgccgctgaaaaacattgaaccgtggctacagcgcctgggcatcggcgtctcggtggatgaactggtgaaatatatcgaccctaacgccgccatgacgctggtgacgaatttgctggcgcagctgtctaacgccatgtcatccattttcctgctcttgttaaccgtggtctttatgctgctggaagttccgcaattgcccggtaaactccagcagatgatggccaggccggttgaaggtatggccgcgattcagcgcgcaatcgacagcgtgtcgcattatctggtgctgaaaacggcgatcagcattatcacgggcgttgtggtctggggaatgctggcgctgctggaagttcgtttcgcattcgtttggggactgttggctttcgcgcttaactacatccccaatattggctcggttctggccgcgatcccgcctattgcgcaggttctggtgttcagcggcctttatgacgcgctggtggtgctgacggggtatctgattatcaatctggtgttcgggaatatccttgagccccgcatcatggggcgtggattgggcctttccacgctggtggtttttctctccctgatcttctgggggtggttattaggccctgtcggcatgctgctttccgtgccgttgacgatcatcgttaaaatcgcgctggagcaaacctccggcgggcaaagcattgccgtcctgctcagtgatttgaataaaacctga

SEQ ID NO: 73109 - DNA, 1389 bp, Citrobacter koseri
atgtctggaggattagttacagctgcatacattgttgccgcgatcctgtttatcttcagtctggccgggctctctaagcatgagacgtcccgacagggtaacaattttggtatcgccgggatggcgattgcgctggtggcgacgatcttcggcccggataccggcaacgttgcctggattctggtggcgatgattattggtggggcgatcggtatccgtctggcgaaacgcgttgaaatgaccgaaatgccggagctggtggcgattctgcacagcttcgtcggcctggcggcggtactggtgggctttaacagctacctgtaccacgaggcgggtctggaaccgattctggtgaatattcacctgacggaagtgttcctcggcatcttcattggcgcggttaccttcaccggttccgtggtggcgtttggcaagctgtgcggtaagatttcgtccaaaccgctgatgctgccgaatcgtcacaaaatgaacctggcggcgctggtggtttccttcctgctgctggtggtgtttgtacgtaccgaaagcgttggcttgcaggttctggcgctgctggtgatgaccattattgcgctggctttcggctggcacctggtggcgtccattggcggggcggatatgccggttgtggtgtccatgctgaactcctattccggttgggcagcggcggcggcaggctttatgctgggtaacgacctgctgatcgtcaccggcgcgctggttggttcttcgggtgcgattctgtcttacatcatgtgtaaggcgatgaaccgctctttcatcagcgttatcgcgggtggtttcggcagcgatggatcttctactggcgacgatcaggtcgcgggcgagcaccgtgagatcacggcggaagacacggctgacatgctgaaaaattcgcactcggtcatcattacccctggctatggcatggcggttgcgcaggcgcagtacccggtggcggaaatcaccgagaaactgcgcgcgcgcggtatcaaggtacgttttggcatccacccggttgcggggcgcttgcctggtcacatgaacgtactgctggcggaagcgaaagtgccgtatgacatcgtgctggaaatggacgaaatcaacgacgacttcgctgacaccgatacggtgctggttatcggcgcgaacgacacggtgaacccggcggcgcaggacgatccgcgtagcccgattgccggtatgccggttctggaagtctggaaagcgcaaaacgttatcgtgtttaaacgctcgatgaataccggctatgccggggtgcagaacccgctgttctttaaagacaacacgcatatgctgtttggcgatgcgaaagccagcgtggatgcgattttgaaagcgctttaa

SEQ ID NO: 73110 - DNA, 1587 bp, Citrobacter koseri
atgcatcctgcgatcactgacaaaccatcatcaaaaaaaccgatggaagggaacattatgcgaattggcataccaaaagagcggttaaccaatgaaacccgagtcgcagcaacgccaaaaacggttgagcaactgctgaaactgggttttaccgtcgcggttgaaagcggcgcgggtcaactggcaagttttgacgataaggcatttacagaagcgggcgcagaaattgtagagggaaatgcggtctggcagtcagagatcatcctgaaggtcaatgcgccggaagacgatgaaattcctttactgaatgcgggtacgacgctggtgagtttcctctggccggcgcagaatcctgagctattgcaaaaactcgcggaacgcaatgtaaccgtgatggcgatggactccgtgccgcgtatttcgcgcgcgcagtcgctggatgccctgagctcaatggccaacatcgccggttatcgcgcgattgtggaagccgcacatgaatttggtcgtttctttaccgggcaaattaccgctgcgggcaaagtgccgccagcgaaagtgatggtgattggcgcgggcgtcgcaggtctggcggctattggcgcggcaaacagccttggcgccattgtacgtgcgtttgatacccgtccagaggtgaaagaacaggttcagagtatgggcgctgaattcctcgaactggattttaaagaggaagcgggcagcggcgacggctatgccaaagtgatgtccgaggcgtttattaaagcggaaatggaactctttgccgcgcaggcgaaagaggtcgatattatcgtcacgaccgcgctaatcccgggtaaacctgcgccgacgctgatcacgcgcgagatggttgattccatgaagtccggcagcgtgattgtcgatctggccgcgcaaaacggcggtaactgtgaatacaccgtcgccggtcaggtgactacgaccgacaatggcgtgaaggttatcggttacaccgatctgccgggtcgtctgccgacgcaatcctcccagctttacggcaccaacctggtcaacttgctcaaactgctgtgcaaagagaaagacggcaatatcgacgtcgactttgacgacgtggttgtgcgcggcgtaacggtcgtgcgtgacggtgaaattacctggcccgcgccgccgattcaggtgtctgctcagccgcaggctgcgccgcaagcggcccctgcgccgaaagaagcggaaaaaccggcttcaccgtggcgtaaatatgcgctgatggcgctggcgatcattctgtttggctggctggctgacgtggcgccgaaagagttcctcggccacttcaccgttttcgcacttgcttgcgtggtgggttactacgtggtgtggaacgtttcgcacgcgctgcatacgccgttgatgtctgtgactaacgccatctcagggattatcgttgtcggggcattgttacagattggccagggaggctgggtgagtttcctgagctttatcgcggtgcttatcgccagcattaatattttcggtggcttcaccgtgactcagcgtatgctgaaaatgttcaggaaaaactaa

SEQ ID NO: 73111 - DNA, 945 bp, Citrobacter koseri
atgaagcttaagaacactctcctggcgtccgcactgctttctgcgactgctttttccgtaaatgcagcgacagaactgacgccggagcaagcggcagcactaaaaccttatgaccgcattgtggtcaccgggcgttttaatgccattggcgatgcggtaaatgccgtatcccgccgcgcagataaagaaggtgcagcctctttttatgttgttgatacgtccgattttggcaacagcggtaactggcgtgtcgtggctgacgtttataaatcagacgcgccaaaatccgacgcgcctcaaaaccgtgtaattaacggtatcgtcgaattaccgaaagatcaggccgtgctgctggaaccttacgacaccgtaacggtgcagggtttctaccgtagccagccggaagtgaatgacgccatcaccaaagcagcaaaagcgaaaggcgcctactcgttctacattgtgcgtcaggtcgatgccaaccagggcggcaaccagcgtattaccgcgtttatctataaagaagatgcgaagaaacgcgttgtccagagcccggacgttattcctgctgattccgatgcgggtcgcgcagcgctggccgccggcggtgaagcagcgaagaaagtggagattccgggcgtcgcgacgaccgcttctccaagcgctgaagtcggacgcttcttcgaaacgcaatcctcaaaaggtggacgttacactgtcactctgcctgacggaacgaaagtcgaagagctgaacaaagcgaccgctgcgatgatggtgccgtttgacagcatcaaattcaccggcaactacggcaacatgacggaagtctcctaccaggttgccaagcgtgcggcgaagaaaggcgcgaaatattatcacatcacccgccagtggcaggaacgtggtaacaacatgacgatcagcgccgacctgtataagtaa

SEQ ID NO: 73112 - DNA, 1383 bp, Citrobacter koseri
atggaaaagaaactgggactgagcgcgctgaccgcgctggttttaagctcaatgcttggcgcaggtgtgtttagtctgccacagaacatggcggcggtggccagcccggcagcgctactgattggctgggcgattacgggcgtcgggatactgctgctggctttcgctatgctgatcctgacgcgcgttcgcccggaactggatggcgggattttcacctacgcgcgcgaaggtttcggcgaactgatcggtttctgctccgcctggggatactggctctgtgccgttatcgccaacgtctcttatctggttatcgttttttctgccctgagcttctttaccgatacgccggaactccgcctgtttggcgacggcaatacctggcagtccatcatcggcgcgtcagtgctgctttgggtggtgcattttctggtgctgcgcggtgtgcaaaccgccgccagcatcaacctggtcgcgacgctggcgaagctgttgccgctggggttattcatcgtcctggctatcatcatgtttaagctcgatacgttcagcctggatttcaccggtctggcgttgggcgttcccgtctgggagcaggttaaaaacacgatgctcatcacgctgtgggtgtttatcggcgtggaaggcgcggttgtcgtctccgcccgggcgagaaataagcgtgatgtcggacgtgcgacgctgctggcggttctcgccgcattgggcgtctacctgctggtgacgctgctctctttaggcgtcgtcgcccgcccggaactggcggagattcgcaatccgtcaatggcgggtttgatggtgaaaatgatggggccgtggggcgaaatcattatcgcggcgggtcttatcgtttcagtctgcggcgcttatctgagctggaccattatggcggcagaagtgccgtttctggcctcaacgcataaagccttcccgcgcattttcgctcgccagaatgcgcaaggcgcgccatcggcttcactgtggctcaccaacgcgtgcgttcagatctgcctggtgctgatctggctcacaggttcggactacaacacgctgttgacgattgcttcagagatgattctggtaccctatttcctggtcggcgcgttcctgctgaaaatcgccacgcgcccccttcatcaggcggtaggtgtcggggcctgcatttatggcttatggttattgtatgcgtccggcccgatgcacctgttgctgtcggtggtactgtatgcgccgggattgttagttttcctctacgcacgcaagacgcatacgcacgataatgtcctgaatcgtcaggaagtgatgttgatcggtctgctactcatcgccgctgttccggctacgtggatgttggtggggtaa

SEQ ID NO: 73113 - DNA, 723 bp, Citrobacter koseri
atgggtaaaaaccagcccttgcccatccttatcacgggaggaggccgccgcatcggtctcgcgctcgcgtggcactttctcaatcaaaaacagccggtgattgtcagctaccggacgcactatccggccatcgacggcctgacgcaagcgggcgcgctgtgcattcaggccgatttttccaccgatgacggcgtcctggcatttgctgagaagataaaaacccatacgccaggcctgcgggctattttgcataacgccagtgcctggatggccgaggcgcctggcaccccgctctctgacgtgctggcatgcatgatgcagattcacgtcaatacgccctatctgttaaaccatgcgctggaaagactgttgcgcggccacggacatgcggccaccgatatcatccattttacggactatgttgtggaacgcggcagcgacaaacacatcgcctacgccgccagtaaagcggcgctggataatatgacccgctcttttgcccgcaaactggccccggaagtgaaagtcaacgccatcgccccgtcgctgatcctgtttaacgaaaacgacgatgccgagtaccgccagcaggcgctcaataaatccctgatgaagacagcgcccggcgagaaagaggtaatcgacctggtggattaccttctcaccagctgcttcgttaccggccgcagtttcgccgtggatggcggccggcacctgcgttaa

SEQ ID NO: 73114 - DNA, 336 bp, Citrobacter koseri
atgggactcgtgataaaagccgcgctgggtgcgctggtggtggtattgattggtttgctggcaaaaacaaaaaattactatatcgccggattaattccgctttttccgacatttgcactgattgctcactatattgtcgccagcgagcgcggaattgacgcgttacgcacgaccattgtattcagtatgtggtcgatcatcccttattttgtctacctcgccacgctttggtatttcaccggttttctgcgtttgcccgttgcgctcggcggggcggtggtgtgctggggcctgagcgcatggctgctgatattttgctggatcaaactgcattaa

SEQ ID NO: 73115 - DNA, 744 bp, Citrobacter koseri
atgaacgttatgaacaccatcgtatttgttgaggatgaccctgaagttggctcgctgattgccgcttatctggcgaaacacgatattgaggtgctgattgaacctcgcggcgatctggctgaagagacgatccttcgcacacaacccgagctggtgttactggatatcatgctgccgggcaaagatggtatgaccatttgccgcgatttgcgaggccgctggcaagggccgattgtcctgttgacctcgctggacagcgacatgaaccacatcctggcgctggaaatgggcgcctgtgactacatcctgaaaaccacgccccctgccgtgctcctcgcccgtctgcgcctgcatttacggcagaatgaactcaccgcgcaggcaaaaggcattcaggatacggcaatgaccccgcataaaacgctgcgttttggcgcgttgattattgacccggtcaatcgttcagtcgcactctccggcgaaccggtttcgctttccaccgccgatttcgaattactctgggaactggcaacccatgccgggcagattatggatcgcgacgcgctgctaaaaaacttgcgcggcgtcagctacgacggcatggaccgcagcgtggatgtcgctatctcaaggctgcgtaagaaattgcaggataacgccaccgagccctatcgaatcaaaacggttcgcaacaaagggtatctgtttgccccccatgcgtgggaagagagtcagcgtgattag

SEQ ID NO: 73116 - DNA, 1302 bp, Citrobacter koseri
atgaaaaaactgttcgttcagttttatctgctgctgtttgtctgctttctggtcatgaccctgttggtcgggctggtgtataagttcaccgcagaacgcgcaggcagacagtcgctggatgatttgatgaaaagctcgctgtatttaatgcgcagcgaattgcgggagatccctccgcgcgactgggggaaaaccctcaaagagatggatcttaatctctctttcgatttgcgcgtagagccgctcaataaatacaaactcgacgcgcttaccacacagcggctgcgcgaaggcgacatcgtcgcgctggacgatcagtatacgtttatccagcgcatcccccgcagccattacgtgctggccgtcgggccggttccttatctctattttcttcaccagatgcggctactggatatcgcgctgatggcctttatcgccatctccctcgcctttccggtgtttatctggatgcgcccgcactggcaggagatgctgcgcctggaggccgccgctcagcgttttggcgaagggcacctcgcagagcgccttcactttgacaacggttccagttttgaacgtctcggcatcgcctttaaccagatggcggataacatcaacgcgctgatcgccagtaaaaaacagcttattgacggcattgcccacgaactgcgtacgccgctggtgcgtctgcgttaccggctggagatgagtgaaaatctcagcgcacaggagtcgcaggcgctgaatcgcgatatcggccaactggaagcgttaatcgaagagttactgacctatgcgcggctggacaggccgcagactgcgttaacgctcaccgttcccgacctccccgtgtggctggcgagccacctggaagacgtacagagcgtcaaccccgggcgcacggtgcggctcagccagcttacgcctggcgattacggcgcgctggatatgcggctaatggagcgtgtgctggataatctgctcaataacgcgctgcgttattcccattccaccgttcaggccagcctgttgttaagcggcaatcaggcgaccctgattgttgaagacgacggccccggcatcgcgccagacgcgcgcgaacatgtgttcgaaccctttgtgcgcctcgatcccagccgcgaccgcgctaccggaggctgcgggctgggattagccatcgtgcgctccatcgccctggcgatgggtggaacggtaaactgtcgcgaaagtgaactgggcggcgccagattcaccttcaactggcccgtctggcacaacatccccgaatttccccctacctga

SEQ ID NO: 73117 - DNA, 930 bp, Citrobacter koseri
atggcccgttacgatcttgtcgaacgtctgaatggtacttttcgccagacagaacacgcgctggcaaccctgacagaaaatctcgaacagcaaccgctgctgattgcccgcgtcttctccctccccgaagtgaccaaagaggcggagcacaaccctctggcgaccattgcggtggagcagcatctgggaaaagaggccgaatcgctggcgctgcgccactatcgccacctgtttattcagcaacagtctgaaaatcgcagcagcaaagcggcggttcgcctgcccggcgtattgtgctatcaggttgatgatgccacgcaggccgcgctggaaaaccagatccagcacatcaatcagttaaaaacgacatttgagcgtattgtgacggtggaatcaggattgccgtcagcggcgcgttttgagtgggtgcatcgccatctgcccggtcttatcacattgaatgcctaccgcgcgttaacggtgatcaagaatcccgccaccctccgttttggctgggccaacaagcacattattaagaatctgcgccgggatgaggtgctggcgcaactggagaaaagcctgaacacgccgcgcagcgtgcatccctggacgcgcgaagagtggcaggccaggctggagcgcgaatatcaggatatcgccgccctgccgcaacaggcgcggctgaagattaaaagaccggtgaaggtacagccgattgcccgcgtctggtacaaagggcagcagaaacaggttcagcacgcctgcccgacgccgcttatcgcgctgatcaataccgataaaggcatgaccgtgccggatatcggcgaactactgaattacgatgcggacaatgttcagcaccgctttaagcctcaggcgcaaccgttgcgacttatcatcccccggttgcacctgtatgtggcggattaa

SEQ ID NO: 73118 - DNA, 1404 bp, Citrobacter koseri
atgacgacggtacgctgcgagaaagattcgatgggcgggattgatgttccggcagacaaactttggggagcgcaaacccaacgatcgctggagcattttcgtatctccacggagaaaatgcccgtctcgctgatccatgcgctggcgctgaccaagcgtgcggcagccaaagttaacgaggacttagggctgctgtcggcggaaaaagcctccgccattatgcaggcggctgatgaagtgctggccgataaacatcccgacgaatttccgctggcgatctggcaaaccgggtcgggcacgcaaagcaacatgaacatgaacgaagtgctggcgaaccgcgcgagcgaactgctgggcggcgttcgcggcatggagcgcaaagttcacccgaacgatgacgttaataaaagccaaagttcgaacgacgtcttcccaaccgcgatgcacgttgcggcgctgctggcgctacgcaagcatctcatcccgcagcttaatgtcctgaccgatacgctgcgcaaaaagtcccatgcgtttgccgacattgtgaaaattggccgcacgcacttgcaggatgcgacgccgctgacgctcggtcaggaaatttccggctgggtggcgatgctggagcacaatctcaaacatattgaaaatagcctgccgcatgtggcggagctggcgttgggcggcacggcggtgggcacagggttgaacacccatcctgaatatgcccgccgcgtggcggatgagctggcggtgatcacctgcgcgccatttgtgacggcgccgaacaagtttgaagcgctggcgacctgtgatgctctggttcatgcgcacggcgcgctaaaagggctggcggcgtcgctgatgaaaatcgccaatgacgttcgctggctggcctctggccctcgatgcggcattggtgaaattgccattcctgagaacgagccgggcagttcgattatgccaggcaaagtgaacccgacccagtgcgaggcgctgaccatgctctgctgtcaggtgatgggcaacgatgtggctatcaatatgggcggggcgtcgggaaatttcgagcttaacgtctatcgcccgatggttatccataatttcctgcaatcggtacgcctgctggcggatgggatggaaagctttaatgcgcactgtgcggtcggtattgagccaaaccgtgagcgtattaaccaactgctcaatgaatcgctgatgctggtcaccgcgctcaacacgcacatcggctatgacaaagcggcggagatcgccaaaaaagcgcacaaggaagggctgaccttaaaagcctccgccctggcgctggggtatctcactgaagccgagtttgatagctgggtgcgcccggaactgatggtgggcagcatgaagccaggccgttaa

SEQ ID NO: 73119 - DNA, 1647 bp, Citrobacter koseri
atgtcgaacaaacccttccattatcaggctccttttcccctcaaaaaggacgataccgaatattacctgctgaccagtgaacacgtttccgttgccgaatttgaagggcaggaagtgcttaaggtcgctcctgaagcgctgacgctgatggcgcgtcaggcattccacgatgcttcgtttatgctgcgccctgcgcatcaacagcaggtcgctgatatcctgcgcgacccggacgccagcgaaaacgataaatatgtcgcgctgcaattcctgcgcaactcggacattgccgcaaaagggattttaccaacctgccaggacaccggtacggccattatcgttggcaaaaaaggccagcgcgtctggactggcggcggtgatgaggctgcgctggcgcgcggcgtttataacacttacatcgaagataacctgcgctattcgcaaaatgccccgctggatatgtataaagaggtcaataccggcaccaacctgcccgcgcagattgatctctacagcgttgatggcgatgaatacaaattcctgtgtatcgccaaaggcggcggttccgccaacaaaacctatctgtatcaggaaaccaaagcgctgctgacgccgggcaaactgaaaaattacctggtcgataaaatgcgcactctggggacggcggcctgtcctccgtatcacatcgccttcgtgatcggcgggacgtcggcggaagcaacgctgaaaacggttaagctggcctccgcaaaatactatgacgaactgccgacggaagggaacgaacacggtcaggcattccgcgacgtggaactggaaaaagagttgctgacggaagcgcagaatctcgggttaggcgcccagttcggcggtaaatattttgcccatgatatccgcgtcattcgtttaccgcgtcacggcgcgtcctgtccggtcgggatgggcgtctcctgctctgcggatcgcaacattaaagcgaagatcaaccgcaaaggtatctggatcgagaaactggaacataatccgggtaaatatattcctgaagaattgcgccaggcaggcgaaggcgaggcggttcgcgttgacctcaaccagccaatgaaagcgatcctgcaacagttgtcgcagtatccggtttcgactcgtctgtcgctgaacgggacgattattgtggggcgtgatatcgcgcacgccaaactgaaagaacggatggaccgtggcgaagggttgccgcagtatgttaaagatcatccgatctactacgcggggccggcaaaaacgcctgaaggatacgcgtccggttcgctggggccaacgaccgcaggacgtatggactcttacgtcgatcagcttcagtcgcagggcggcagtatgattatgctggccaaaggcaaccgtagccaacaggtgaccgatgcctgccataaacacggcggtttctatctgggcagcattggcgggcctgccgccgtgctggcgcagggcagcatcaggagtctggaatgcgtggaataccctgaactggggatggaagcgatctggaaaattgaagtggaagattttccggcctttatcctggtggatgacaaaggcaatgatttcttccagcaaattcagacttcgcagtgcacgcgctgcgtaaagtaa

SEQ ID NO: 73120 - DNA, 1176 bp, Citrobacter koseri
atgcaaaaactcatcaactcagtgcaaaactatgcatggggtagtaaaactgcgttaacggaactctacggcattgcgaatccgtctcagcagccaatggcagagctctggatgggcgcccatcccaagagcagctcccgaattgaaggcgctgacgggaaagccgtctcgttacgcgacgtgattgagcacgataaagccacactgctgggcgaatctgtcgcaaaacgttttggcgagctgcccttcctgtttaaagtgctgtgtgccgcgcagccgctttccatccaggttcatccgaataaacacaactcagaaattggtttcgcgaaagagaatgcggccggtattccgatggatgccgccgagcgtaactataaagatccgaaccacaagcctgaactggtctttgccctgacgccgttcctggcgatgaacgcattccgcgagttctctgagattgtctccctgctgcaacctgtttccggcgcgcataccgccattgcccacttcctgcaagagccgaatgccgaacgcctgagccaactgttcgccagcctgctcaatatgcagggcgatgaaaaatcccgcgcgctggcggtgctgaaagcggcgctgaacaaccaacagggtgaaccgtggcagacgatccgcgtcatatccgaattttacccggatgacagcggcctcttctctccactgctgctgaacgtggtcaagctgaaccctggcgaagccatgttcctgtttgccgaaacgcctcatgcctatttgcagggtgtggcgctggaggtgatggcgaactccgataacgtcctgcgcgccgggctgacgccgaaatatatcgacattcctgagctggtcgcgaacgtcaaattcgttgccaaacctgccgatcagctgctgacaacgccggtaaaacacggtgcggaactggacttcccgattccggtggaagatttcgcgttttcgctgcatgacctctccgctcaggcaacggccatcagccagcagagcgccgccattctgttctgcgtggaaggcgaagcggtgctgagcaagggcgagcagcgtctggtgctgaaacccggtgaatccgcgtttatcggcgctgatgagtctccggtcaacgccagcggcgtgggccgtttagccagggtttacaacaagctgtag

SEQ ID NO: 73121 - DNA, 1509 bp, Citrobacter koseri
atgaaaaaatcgctggtagctacaggtgtgatcgtcgccctgggcgtggtctggacaggcggggcctggtacaccgggaaaaaactggaaacgcatctcgcacagatggtgaatcaggcaaatgagcagcttaaacgcacggcgcctgaagccgccattgagctgagctatcaaaactaccagcgcggcattttcagcagccagttacagctggtggcgaagcctgtcgaaggcaaggaaaacccctggctgaaaccaggacaaagcgtcgtactgaacgaagcggtggatcatggccctttcccgttcgcacagttgaaatcgtttaaccttatccctgcgatggcctcggtgaagacgaccctggtcaacaacgacgtcaccagaccgttgtttgatatcgcaaagggcgagacgccggtcgagattaattcccggattggttatggcggcgatacccgctcagatatctccctcaagccgttgaattatgaaaataacggtgaaaaagtcgcctttagcggcggggaatttcagctgaatgccgataaagacggcaatgttgtttcactgtcaggcgaagcgcaaagcggcctggtggatgccgtcaacgaatataaccagaaagtccagattacttttaataacctgaaaaccgacggttccagcaccctggccagcttcggcgagcgtattggcaaccagacgctgtcgctggaaaaaatgacggtatcggtagaaggtaaagagatggccgtgctggaaggcatggtgatcgacggtaagtccgatctcgtcaacgacggcaaaactatcaatagccagctggattactcgctgaacagccttaaagtgcagaatcaggatctgggtagcggcaagctgacgctgaaagtgggacagatcgatggcgaagcctggcaccagtttagccgccagtataacgctcagactcaggcgctgatgacgcaacccgaggtggtgcaaaatcctgagctttatcaggagaaagtgaccgaagcgttctttggcgccctgccgctgctgatgaagggcgaaccggtgattaccgtcgcgccgttaagctggaaaaacgctaaaggcgagaccgcgctgaacctctccttgttcctgaaagatccggccgcgaccactgaagaaccgcaaacgctgactcaggaagtggatcgttccgttaaatctctcgatgcgaagctgacgatcccgatggatatggccgttgagtttatgacccaggtcgccagactggaaggttatcagcaggaagatgccgataagctggcgaatcaacaagtcaaagggttagccgcgatggggcaaatgttccgcatcaccacgttgcaggataataccattgccaccaacctacagtatgccaatggtcaggtaacgctcaacgggcaaaaaatgacgctggaagagtttgtcggcatgtttggtatgcctgcgctctccgtgccggacgctccggcgattcctcagcagtaa

SEQ ID NO: 73122 - DNA, 1029 bp, Citrobacter koseri
atggctatagccaaaaaaaccaccatccatgatgtcgcgttggcggctggcgtctccgtcagtaccgtctcattagtgctcagtggcaaagggcggatttcgtcagccaccggcgagcgggttaacgcggcgattgaacagctgggctttgtgcgtaaccgccaggcatcggcgcttcgcggtgggcagagcggcgtcattgggctgattgtgcgcgatctgtctgcgcctttttatgcggaactcacggccgggttgacagaggcgctggaagcgcaggggcgcatggtctttttgttgcacggcggtcaggatggcgaacaactgagtcagcgcttcgctatgctccttaatcagggggtggatggcgtggtgatcgccggagcggcgggtaacagcgatgcgctccgggaacgggcagaagaaaaagggattccggtggtgtttgcctcgcgcgccagttatctggaagaggtggatactgtccggccggataacatgcaggcggcgcagctactgacggaacatctgattcgccttgggcatcagcggatcgcgtggctgggagggcaaagctcctcattaacgcgcgcggagcgcgtcggcggctattgcgcgacgctgctgaagtttgggttgccttttcacagcgactgggtgctggagtgcgcatccagccagaagcaggccgccgaagccattaccgcattactgcggcataacccgaccatcagcgcagtggtgtgctacaacgaaaccattgcgatgggagcatggtttggcctgatgaaagcggggcgtcagagtggtgaaattggcgttgatcgctattttgaacaacagatctcgctggcggcgtttgctgatgtggcggaaaacgcgctggacgatctgccgatcatctgggccagcacgccagcccgcgaaattggctatacccttgcggagcgcatcctgcaacggattggtcatgaagagagccattcgcgcagccagaccatttccgctcgtctggtgacgcaaaaatag

SEQ ID NO: 73123 - DNA, 1593 bp, Citrobacter koseri
atgacgacgaagacaacaccaaaaataacattatgggaatttttccagcagttgggtaaaacgtttatgctgcccgtggcgctgctctctttctgcgggatcatgctggggatcggcagctcgttaagcagccacgatgtcgtcaccctgctcccggcgctgggcaacccggtgctacaggccatctttacctggatgagtaaagtcggctcgttcgcttttagcttcctcccggtgatgttttgtatcgcgattccgctcggtctggcgcgtgaaaacaaaggtgtcgccgcgtttgccggtttcgtcggttatgccgtaatgaaccttgccgtgaacttctggttaacggcgaaaggcattctgccgacgactgacgccgccattctgaaagccaataacgtacagaatatcctcgggattcagtctatcgacacggggattctgggggcggtgatcgccggtatcgttgtctggatgctgcatgagcgtttccacaatattcgtctgcccgatgcgctggctttctttggcggtacgcgtttcgtgccgattgtctcttccgtggtgatgggactggtcgggctggtcattccgctggtatggcctgtttttgcaatgggcatcagcggtctgggccacattatcaatagcgcgggtgatttcggtccgatgatctttggtacgggtgagcgcctgctgctgccgttcggcctgcaccacattctggtcgcgttgattcgctttaccgaagcgggcggtacgcaggaagtctgcggccatagcgtgagcggcgcgttgaccattttccaggcgcagctgagctgcccgacaacgcacggcttctctgaaagtgcgacccgcttcctgtctcaggggaaaatgcctgccttcctcggcggcttgccgggcgccgcgttggcgatgtaccactgtgcgcgtcctgaaaaccgtcacaaaattaaggggctgctgatttctggccttatcgcctgtgtcgttggcggtaccacagagccgctggaattcctgttcctgttcgtcgcgcctgtgctgtatgtgattcacgccctgctgacaggtctgggattcaccatcatggcgatcctcggcgtcaccatcggcaacaccgacggcaacatcatcgactttgtggtattcgggatcctgcacggtctgtcgaccaagtggtatctggttccggtggtcgccgccgtctggttcgcggtgtactacatcatcttccgtttcgccattacgcgctttaatctgaaaacgccgggccgcgataccgaaatcgccagcaatattgaaaaagtcatggcgggcacgccagggaaatcaggctataacgtcccggcgattctggccgcgcttggcggcagtgaaaatatcgtcagcctggataactgcattacccgtctgcgcctgtcggtgaaggatatgtcgcttgtgaatgtacaggcgctgaaggacaatcgcgctatcggcgtagtacagctgaatcaacataacttacaggtggttattggccctcaggtacagtccgttaaggatgaaatggcaggtctgatgaacacggttgaggcataa

SEQ ID NO: 73124 - DNA, 1173 bp, Citrobacter koseri
atgttcgatttttcaaaggtggtggatcgtcacggtacgtggtgtacgcagtgggattatgtcgccgatcgctttggcgcccctgacctgctcccgtttacgatctcggatatggatttcgctaccgcgccgtgcatcctggaggccatcaaccaacgtctggcgcacggcgtgctgggttacagccgctggaaaaacgatgagtttttaggggcgatcgctcactggttcgcaacccgtcaccactccacggtcgacccacagtcgatcgtgtacggcccctccgtgatctacatggtgtcggagctgatccgccagtggtcatccgtcggtgaaggggtggtgattcacacccccgcttacgatgcgttctataacgccatcgaaggcaaccagcgcaccgttatgccggttacgctacagaaaaacgcggacggctggcactgcgatatggccgcgctggaagcggtgctcgcccggccagagagtaaaattctcctgctgtgcagcccgcagaaccctaccggaaaggtatggacgcgcgatgaactggagacgatggctgagctatgccatcgtcacggcgtgcgggtcatctccgatgaaatccacatggatatggtatggggcgcgcagccgcatatcccctggagcaatgtggcgcgtggtcgttgggcgctgctgacctccgggtcaaaaagcttcaacattccggcgctgaccggcgcctacgggctcatcggcgatgaggaaagccgcaatcgttacctcagcgtattgaaggggcgtgacgggctgtcgtcacccgccgttctggcgcttagcgcgcacattgccgcttatcaacagggcgcgccgtggctggatgccctgcgcgagtatcttgctgataacctgaattatatcgcgcatgcgttaaacaccgcgttcccgacgctaaactggcaggttccgcaatcgacctatctggcctggattgatctgcgcgcactgaatattgacgaccacgccttacaggatgcgctgattcatcagcagaaagtggccatcatgcctgggtatacttatggcgaagaaggtcgcgggtttgttcgtcttaatgccggttgtccacgttcgaagctcgaaaaaggcgttaacgggctgatcaacgcgatccacgctatacgctga

SEQ ID NO: 73125 - DNA, 1002 bp, Citrobacter koseri
atgattgatacttcccttccgttaactgacgttcatcgccaccttgatggcaacattcgtgcccaaactattcttgatcttggccgccagttcaatttagcccttccggcacaaacgcttgacgcgctcattccgcatgtgcagatcacctcaacggagcctgacctggtcagttttctggcaaagctcgactggggcgttaaagttctggcgtcgctggatgcctgtcgtcgcgtggcctttgaaaatattgaagatgccgcccgcaacggcctgcattatgtcgaactgcgtttttctccgggttatatggcgatgacgcaccagttgcctgtggctggcgtggtcgaagcggtcatcgctggcgtacgtgaagggtgccagacttttggcgttgaagctcgtctgatcggcatcatgagccgtactttcggcgaggctgcctgtcagcaggaactggaagcgctgctggcgcaccgcgatcacattaccgcgcttgacttagcgggcgatgaacttggcttcccgggcagtctgttcctctctcactttaaccgcgcgcgtgatgcgggctggcatattaccgtacatgctggcgaagcggcgggcccggagagcatctggcaggccattcgcgaactgggcgccgaacgtatcggtcatggcgtgaaggccgtggaagatcgcgcgctgatggattttctggtcgaacagcgaatcggtatcgaatcctgtctgacgtctaatatccagaccagcaccgttgcctcgctggctgcgcatccgctgaaaacgttccttgagcatggcgtgctggcaagtttgaatacggatgatcccgcggtacagggtgtggatattattcacgaatacacggtagcggcgccggcggcaggattaacccgcgagcagattcgtcaggcgcagatcaatggcctggaaatggcgtttttaagcgaagcggaaaaacgcgcattgcgtgagaaagtcgcagcggtttaa

SEQ ID NO: 73126 - DNA, 1041 bp, Citrobacter koseri
atgagtgacaacatccgggtagggctaattggttatggttatgccagcaagactttccatgcgcccttaatcgtggggacgccgggtctggaactggcggcggtttccagtagtgatgaaacaaaagtgaaggcggactggccttctgtggcggttgtctcagagcctaagcatctttttaacgatccgaatatcgaccttatcgtcattcctacgcccaacgacacccattttccgctggcgaaagccgcgcttgaagcgggaaaacatgtggttgtggataaaccctttaccgtgacactgtcacaagcccgtgagctcgacgccctggcgcgcagcctgggacgcgtgctttctgtgttccataaccgccgttgggacagtgatttcctgacgctgaaaggattgctggccgatggcgttctgggggaagtggcttactttgaatcccatttcgaccgtttccgcccgcaggtacgcgatcgctggcgcgaacagggcggccctggcagcggtatctggtacgatctggcgccgcatctgctggatcaggcgatcaatctgttcggtttgccggtcagcatgacggtggatctggcgcagcttcgccctggcgcgcagtcgacggattatttccacgcgatattatcctacccgcagcgtcgggtgattctgcacggtacgatgctggcggcggcagaatcagcacgttatatcgtgcatggctcgcgcggcagttacgtgaaatatggcctcgatccacaagaggagcggctgaaaaacggtgagcgactgccgcaggaagactggggttacgacatgcgtgacggcgtgttgacgcgcgtggaaggcgaagaccgtgtggaagagacctggctgacggtgccgggtaattatccggcttattatgcgggcatccgtgacgcgttgaatggcaacggtgaaaacccggttccggcgagccaggcgatccagattatggagttgattgagctggggattgaatcagcgaagcatcgctctacgctgtgcctcgcgtga

SEQ ID NO: 73127 - DNA, 216 bp, Citrobacter koseri
atgacagttcaggattatttattaaaattccgcaaaatcagttcgcttgagagcctggaaaaactgtttgatcaccttaactacaccctctctgacgatcgggagatcatcaatatgtatcgcgccgcagatcatcgtcgcgcggaactggtctcgggcggtcgtctgtatgatgtcggtcaggtgccaaaatcagtctggcattacgtacaataa

SEQ ID NO: 73128 - DNA, 441 bp, Citrobacter koseri
atgaccacaacaccggcacaacgcatcgggggctggttgcttggcccactggcctggctgttagtcgcgttactgagcgcctcgctcgcgttattgctctatgctactgcgctggctacgccgcagacattccatatgctcagtgagcaaagtaccggcaacttgttgttgtggggcgtttcgtttattaccgccatcgcaatgtggtattacaccctatggttgaccatcgccttcttcaagcgccgccactgcgtgcctaaacattatattatctggctgctggtgtcggtcttgctggcaattaaagccttcgccttttcgccagtctcagacgcgtttgcggttcgccagctgttgttcccgttactggcggccgcgctgatcgtaccctatttcaaacgctcggcgcgtgttaaagcaacgtttgtgaacccgtaa

SEQ ID NO: 73129 - DNA, 582 bp, Citrobacter koseri
atgactgattacctgctgctctttgtcggaactgtactggtcaataactttgtactggtcaagtttctgggtctctgcccgtttatgggggtttccaaaaagctggaaaccgcaatgggtatggggctcgccaccacgtttgtgatgacgctggcgtctatctgcgcctggctgattgacacctggattttgattccgctcgatctcatctacctgcggacgctggcgtttattctggtcatcgcggtagtagtgcaatttactgagatggtggtgcgtaaaaccagtccggcattgtaccgtctgctggggatcttcctgccgctcatcaccaccaactgcgcggtgctcggcgtggcgctgttgaacattaacctcggtcataattttttgcagtcggcgttgtacggtttctccgccgccgtcggcttctctctggtgatggtgctgttcgcggcgattcgcgagcgcctcgccgtggcagacgtccctgccccttttcgcggtaacgcgattgcgctgattaccgcaggtttaatgtctctggcctttatgggctttagtggtttggtgaagttgtaa

SEQ ID NO: 73130 - DNA, 579 bp, Citrobacter koseri
atgaatgctatctggattgccgtagtcgctgtgagcctgctgggcctggcattcggcgccatcctggggtacgcctcccgccggtttgccgtggaagacgatcccgtagtcgaaaaaatcgacgaaattttaccgcagagccagtgtgggcagtgcggctatcctggctgccgcccttatgctgaagccatcggtagtcagggtgaaaaaattaaccgctgtgcgccaggcggcgaagcggtgatgttgaaaattgcaacgttactgaacgtcgatccgcaacctatcgacggtgatgaacaagaagttgcgccagtgcgtatgctggcggtcatcgatgaaaacaattgcatcggctgcactaaatgtattcaggcatgcccggtggatgccattgtgggcgccacgcgcgcgatgcatacggtcatgagcgatctctgcactggctgtaatctgtgcgttgacccgtgcccgacgcaatgcattgaattacgcccggtcgcggaaacacctgacagttggaagtgggatttgaacaccatccccgttcgtatcattcccgtggaacaacatgcttaa

SEQ ID NO: 73131 - DNA, 2019 bp, Citrobacter koseri
atgcttaagttattctctgcattcagaaaagataaaatctgggatttcgatggcggcattcatccgccggaaatgaaaacccagtcaaacggtacgcctctgcgacaggttccactggcgccgcgctttatcattcctcttaagcagcatattggcgctgagggcgagctgtgcgttaacgtgggcgatcgcgtcctgcgaggccagccgctgacccgtggtcgcggccgcatgctgcccgtccatgcgccgacgtccgggaaagttatcgcgattgcgccccactctaccgcgcacccgtcggccctggctgagcttagcgtgatgattgatgccgatggcgaagatcgctggatcgaacgcgacggctgggcggattatcagcgccgcagccgcgaagagctaattacccggattcaccagttcggcgttgccgggctcggcggcgcggggttcccgaccggcgtcaaattacagggcggcggcgataagattgaaacgctgatcatcaacgcggcggagtgtgaaccctatatcaccgctgatgaccgcttaatgcaggattgcgccgcgcaggtggtggaaggcatccgtatccttgcccatattctgcaaccgcgtgagatcctgataggtatcgaagataacaagccgcaggccatttcaatgctgcgtgccgttctggccgatgcgcatgatatcgcgttacgcgttatcccaacgaaatacccttccggcggcgcaaaacaacttacccagatcctgaccgggaaacaggttccgcacggcggccgctcttctgatatcggcgtgctgatgcaaaacgttggtacggcttatgccgtcaaacgcgcagtgattgacggggaaccgatcaccgagcgcgttgtgaccttgaccggagagtccgtcagccgtcccggtaacgtctgggccaggctggggacgcctgtcagccacctgcttaatgatgcgggcttctgttcttcagccgatcaaatggtgattatgggcggcccactgatgggctttaccctgccctggcttgatgttcccgtcgtgaagatcactaactgccttctcgcgccttccgctacggaaatgggcgaaacgccggaagagcaaggttgtatccgctgtagcgcctgtgccgatgcctgtcccgccgatttgttgccccagcagttgtactggttcagcaaaggccaacagcacgataaagccaccgcgcataacattgccgactgcattgagtgcggcgcttgcgcctgggtatgccccagcagtattccgcttgtgcagtatttccgtcaggaaaaagcggagatttacgcgatcgcgcaagaagaaaaacgcgcggctgaagcgaaagcgcgttttgaggccagacaggcgcgactggagcgtgagaaagccgcacgccttgagcgccataaaaatgcggctgcacaacctgcggcaaaagatcaggatgccatcgccgcagcgctggcgcgcgtaaaagagaaacaggcacaggcgactcagcctgttgtcattaacgcgggagagaagccggataacagcgcggttattgctgcccgtgaagcgcgtaaagcgcaggcgcgcgccaggcagacggagaacgccgctgcggaacccgccgaaccagtcgacccgcgtaaagctgccgtcgaagcagcaatcgcccgcgccaaagcgcgcaagcaggaacagcagaccgctgcggaacctaccgaaccggtcgacccgcgtaaagccgccgtcgaagcggcaatcgcccgcgccaaagcgcgtaagcaggaacagcagaccgcagcggaacccgccgaaccggtcgacccgcgcaaagccgctgtcgaagcggcaattgcccgcgccaaagcgcgtaagcaggaacagcaggccgctgcggaacccgccgaaccggtcgacccgcgtaaagccgccgtcgcagcggcgattgcccgcgttcaggcaaaaaaagcagcacagcagcaggttgttaacgaggaataa

SEQ ID NO: 73132 - DNA, 1053 bp, Citrobacter koseri
atggtattcagaatcgcaagctcgccttatacccataaccagcgccagacatcgcgtatcatgatgctggtgttaatcgccgcgctgccggggattgccactcagctatggtttttcggttggggcacattgttccagattatactggccgcagtcagcgcgctggccgcagaagccgccgtgcttcaactgcgtaaacagccgatcgccgctatcttaaaagacaattcagcattgctgaccggtttgctgctcgctgtgagcataccgcctctcgccccgtggtggatggtggtattgggcaccgtatttgccgtcattatcgccaagcagctttacggcggtctggggcaaaacccattcaacccagcgatgattggttatgtcgttctgttgatttcattcccggtacagatgacaagctggctcccgccgcatgacatcgccgcaacggcgccaggccttctggatgcgttgcaggtcatcttcaccggacacaccgccagcggcggcgacatgaatacgttacgcatgggcattgacggcatcagccaggctacgccgctcgatacgttcaaaacctcgttacatgccgggcacgccgttgaacagattatgcagtaccccatctacagcggcatgctggccggtgcgggctggcagtgggtaaacatcgcctggcttattggtggcgtgtggctgctctggcaaaaagcgatccgctggcacattccggtcagctttttagtgacgctggctgtctgctccactctgggatgggcattcgccggggattcactggcgtctccgcagttgcatctgctttctggcgcgacaatgctgggcgcgttctttattctgaccgatcccgtcaccgcctcgacaaccaatcgtggtcgtctgatttttggcgcgctggcggggttgttagtgtggttgattcgcagcttcgggggatacccggacggtgtggcgttcgccgtactgttggcgaatatcacggtgcctttgattgattactacacccgacctcgcgtctacgggcatcgctaa

SEQ ID NO: 73133 - DNA, 621 bp, Citrobacter koseri
atgctaaaaacgattcgtaaacacggtatcacgctggcgctgtttgccgcaggctcgacggggctgacggcggctattaacctggtcactaaatcgacgattgccgagcaggcggttctccagcaaaaagcgttatttgatcaggttctgcctgccgatcgctacaataataccttgcaggacagctgctttctggtgaatgctccggcgctgggcaaaggtacgcaccgcatctatatcgcccgtcaggacgataagcccgtcgccgccattcttgaagccacggcgccggacggctattctggcgccatacagctcctggttggcgctgatttcagcggcacagtgctgggtacacgcgtgacagaacatcatgagacgcctggcctgggcgataaaattgagctgcgcttatccgactggatcacccacttcagcgggaagacgatcggcgctgagaacgatgctcactgggccgtgaaaaaagacggcggtgattttgaccagtttaccggcgcaaccattacccctcgggcagtggtcaacgcggtgaaacgtgcgggcctgtacgcgcagaccttaccggcgcaacttcctcaacttaccgcctgtggagaataa

SEQ ID NO: 73134 - DNA, 693 bp, Citrobacter koseri
atgagcgaaattaaagacgttatcgttcagggcttgtggaaaaacaactcagcgcttgtacagctgcttggtatgtgcccgctactggcagtgacctccaccgccacgaacgcattaggcctcggcctcgccaccacgctggtgttgacgctgaccaacctgacaatttccgccctgcgccgctggacgccagcggaaatccgcatcccaatctacgtaatgatcatcgcgtccgtggtcagtgcagtacagatgctgatcaacgcttatgccttcggtttgtatcagtcgctggggatcttcattccgctgattgtgaccaactgcatcgttgtggggcgcgcagaggcttttgccgcgaaaaaaggcccggcgctgtccgcgctggacggtttttccattggcatgggggcgaccggcgccatgtttgtcctcggctccatgcgtgaaatcatcggcaatggcacgttgtttgatggcgctgacggtctgctgggcgactgggcgaaagtgctgcgcgtggagatttttcataccgactcgcctttcctgctggcgatgctgccgcccggcgcttttattggcctggggctgatgctggccgtgaagtaccttattgacgagaaaatgaaaaaacgccgcgccgaagccgttgccgctgagcttccgtcaggtgaaacagggaatgtgtaa

SEQ ID NO: 73135 - DNA, 636 bp, Citrobacter koseri
atgaacaaaacaaaacgactggaaatattaacgcgcctgcgtgacaacaatccgcaccccacaacggagttaaatttcacctcgccgtttgagctactcatcgccgtattgctgtcagcacaggccacggacgtcagcgtgaataaagcaaccgcaaagctttatcccatcgccaataccccggcggccatgctggagcttggcgtcgagggcgtaaagtcgtatatcaagactatcggtctgttcaacagcaaagcggagaatgtgattaagacctgccggatgttgcttgaactgcacaatggcgaggttccagaggatcgggcggctctggaagcgctgcccggcgtcgggcgtaaaacagccaacgtggtgctcaataccgcatttggctggccaactatcgctgtcgatacgcatattttccgcgtctgtaaccggacacagttcgcccccggtaaaaacgtcgagcaggtggaagaaaaactgctcaaggtcgttccagcggaatttaaagtcgattgccaccactggttaattctgcatggccgctacacctgcattgcccgtaaaccacgctgcggctcctgcattattgaagatctttgcgaatacaaagagaaagtcgatatctga

SEQ ID NO: 73136 - DNA, 1506 bp, Citrobacter koseri
gtgtctactgcaaacaataaaccaactgaaagcgtcagtttgaacgctttcaaacaaccgaaatcgttctatctcattttctctattgagttatgggagcgttttggttattacggcctgcaaggaattatggccgtctacctggttaaacaactgggtatgtcagaagcggattccatcacccttttctcttcctttagcgccctggtgtatggtctggtcgccattggcggctggttaggggataaagttctgggcaccaaacgcgtcattctgctgggtgctatcgtactggcgattggttatggcctggtcgcctggtccggtcatgacgttgcgatcgtctatatggggatggcgaccatcgccgtaggtaacggtctgttcaaagcgaacccgtcttctctgctgtcgacctgctatgccaaagatgacccgcgtctggacggtgcattcaccatgtactacatgtccatcaacatcggttccttcttctctatgctggcgacgccgtggcttgccgcaaaattcggctggagcgtggcgtttgccctgagcttcgtcggtatgctcatcacggtggttaacttcctgttctgccgcagttgggttaaagattacggctcaaaaccagacttcgaagcggtacatttcggtaaattgctggcgactatcgcaggcgttatcgtgctgatcgctatcgcgacctggctgctgcacaaccagggcattgcacgtatggttctgggcgtgatcgctctgggtatcgtgattatctttggtaaagaagcgttcgcgatgcagggcgcggcacgtcgtaaaatgatcgtcgcattcatcctgatgctggaagcgattatcttctttgtgctgtacagccagatgccgacgtcactgaacttcttcgcaatccgtaacgttgaacacactatcctcggtatcgcggttgaaccggagcagtatcaggcgctgaacccgttctggatcatcattggcagcccgattctggcggccatctataacaagatgggtgatacgctgccgatgccgaccaaattcgctatcggtatggttctgtgctctggcgcgttcctcgttctgccgctgggcgcgaaattcgctacagatgcaggcattgtgtctgttaactggctcatcctcagctacggtctgcaaagtatcggagaactgatgatctccggcctgggtctggcaatggttgcccaactggttccacagcgtctgatgggcttcatcatgggtagctggttcctgactacggcgggcgccaacctgattggtggctacgtggctggcatgatggcggtgccggaaaacgttactgacccgctgatgtctctggaagtttacggtcgcgtattcctgcaaatcggtgtcgccactgcggttatcgccgcgctgatgcttatcaccgcgccgaaactgaatcgtatgactcaggatgatgaagaaaacgcgaaggccgccaaaaccgctaccgcgtaa

SEQ ID NO: 73137 - DNA, 606 bp, Citrobacter koseri
atgaaactgttctacaaaccgggcgcctgttctcttgcttctcacatcaccctgcgggaaagcggtattgatttcacgctggatggcgttgatctggcgaaaaagcgtctggaaaacggcgatgattatttcgcggtaaacccaaaaggacaggttccggctctgctgctggacgatggcaccttactgaccgaaggcgttgcgattatgcaatatctggcagatagcgtgcccgatcgtcagctgttggcaccgacaggcaccatctcccgctacaaaacgctggaatggctcaactatattgccacggagttgcacaaaggttttacgccactcttccgcccggatacgccagaggaatataaaccgattgtccgtgcgcagctggagaaaaaattgcactacgtgaatgacgcgctccaggaaggcctgtgtctttgcggccagcgtttcacgatcgcagatgcctacctttttaccgtgttgcgttgggcgaaagcggtgaagctgaatatggaaggattaagccatatcgacgtttatatggcgcgggtcgctgaacgcccctgcgtagcggcagcgctgaaggcggaaggtttgaattaa

SEQ ID NO: 73138 - DNA, 861 bp, Citrobacter koseri
atgaagaatatcctcgccatccagtcgcatgttgtgttcggccatgcgggcaacagtgctgctgaatttccgatgcgccgtcttggcgcgaatgtctggccgctgaataccgttcagttttctaaccacacgcagtatggcaaatggaccggttgcgttatgccgcccgaacatttgactgaaattgttcagggtattgcggatattgataaacttcagacgtgcgatgcggttcttagcggctatctgggttccgcagagcagggtgagcatattctggggattgttcgtaaagtaaaagcggcgaatccacaggcgaaatatttctgcgatccggtcatggggcatcctgaaaaagggtgcatcgtggcgcctggcgtcgctgagttccacgttcgccatgcgctcccggccagcgacattatcgcgcccaatctggtggagctggaaattctctgtgaacatgcggtcaataatgttaatgaagccgtactggctgccagggaactgattgcggaagggccgcaagttgtgctggttaaacatctcgcccgggcgggatacagccccgaccgctttgagatgttgctggtgacggcggatgaagcctggcatattagccgtccgcttgttgatttcgggatgcgtcagccagtgggtgtcggggatgtgaccagcggtttgttgctggtaaaactgttgcagggcgcaacgttgcagcaagcgcttgaacacgttactgcggcggtatatgaaattatgatcgccacgaaaaatatgcaggaatacgagttgcaggtggtggccgcgcaggatcgcattgctaaacctgaacactatttcagcgcgacgcagctgtga

SEQ ID NO: 73139 - DNA, 1275 bp, Citrobacter koseri
atggcaagcagtaacttgattaaacaattgcaagagcgggggctggtggcccaggtaacggacgaggaagcgttagcagagcgactggcgcaaggcccgatcgcgctctattgcggcttcgaccctaccgctgacagcttgcatttggggcatcttgttccattgttatgcctgaaacgcttccagcaggcaggtcacaagcctgttgcgctggtaggcggcgcgactggtctgattggcgacccgagctttaaagccgctgagcgtaaactgaacaccgaagatactgtgcaggagtgggtggataaaatccgcaagcaggttgcaccgttcctcgattttgactgtggtgacaattccgccattgccgcgaataactacgactggtttggcggcatgaatgtgctgaccttcctgcgcgacatcggcaagcacttctccgtcaatcagatgatcaacaaagaagcggtgaagcaacgtctgaaccgtgacgatcagggcatctcctttaccgagttctcctataacctgttgcagggttatgactttgcctgcctgaataaattgcacggcgttacgctgcaaatcggcggctctgaccagtggggcaacatcacctccggtatcgatctgacccgtcgtctgcatcagaaccaggtgttcggcctgaccgtaccgctgatcaccaaagcagatggcaccaagtttggtaaaaccgaaggcggcgcggtatggctggacccgaaaaagaccagtccgtacaagttctaccagttctggatcaacaccgcagatgctgacgtgtaccgcttcctgaaattcttcaccttcatggacattgccgagatcaatgcgctggaagaagaagataagaacagcggtaaagcgccgcgtgcccagtatgtgctggcagagcaggtcacgcgcctggtgcatggcgaagaaggtctggttgcggcgaaacgtatcactgaaagcctgttcaacggtaatctgagcgatctcagcgaggccgatttcgaacaactggctcaggatggcgtgccgatgatcgagatggaaaaaggtgccgatctgatgcaggcgctggtggattccgaactgcaaccgtctcgtggtcaggcgcgtaaaaccatcgcctctaatgcggtgaccatcaacggtgaaaaacagtcagacccggaatatttcttccaggacagcgacattttattcgggcgctacacgctgttgcgccgcggtaaaaagaattactgtctgatttgctggaaataa

SEQ ID NO: 73140 - DNA, 657 bp, Citrobacter koseri
atgtctgataacgacgaattgcagcaaatcgcgcatctgcgccgtgaatacaccagaggcggcctgcgtcgcaacgatcttcccgctgaaccgttaacccttttcgaacgctggctgggtcaggcatgtgatgccagactggcggacccgaccgcgatggtggtcgccaccgtcgatgaaaacggccagccttatcaacgcattgtgctgcttaaacattacgatgaaaaagggatggtgttttacaccaacctgggcagccgtaaggcgcatcacctcgaaaataatccgcgtatcagtctgttgttcccgtggcatatgctggaacggcaggtgatggtgactggcaaagcggaacgcctttccacgcttgaagtggtgaaatacttccacagccgcccgcgcgacagccagattggcgcctgggtgtctaaacaatccagccgaatctctgcgcgcggcattctggaaagcaagttccttgagctgaagcagaagttccagcaaggggaagtcccgttgcccagcttctggggcggattccgcgtcaatattgaacagatggagttctggcagggcggcgaacaccgtttacacgaccgctttttataccagcgcgaaaacaacgcgtggaaaattgaccggcttgctccttaa

SEQ ID NO: 73141 - DNA, 324 bp, Citrobacter koseri
atgaaaaaactgctcattgtatgtctgcctgtgctcctgagcggttgtagcgtctacaaccaattgcttgagcgtatgcaaacggacacgctggaatatcagtgtgatgaaaaaccgcttaccgtaaaaatgaacaatacccggcaagaggtgaattttgtttacgacaataaactgctgaacctcaaacagggcatgtctgcgtcgggagcacgttacacggacggcatctacgtcttttggtcaaaaggcgatggcgcaacggtctataaacgcgacagaattgtgctgaataactgccagttacaaaacccgaagcgttga

SEQ ID NO: 73142 - DNA, 1122 bp, Citrobacter koseri
atgaaatcgggccgttttatcggcgttatgtctggaaccagccttgatggcgtcgatgttgtgctggcggcaattgatgaaacgatggtcgcacagcaggcgagcctgacctggcccatccccgttcatcttaaacaagccattctggatatttgccaggggcaacaactcacgctttcccagtttggccagttggatacgcagctcgggcagctttttgccgacgcggtgaacgcgctgctggcgcaggaaaaactgcggccgagggatattgtcgccatcggctgtcatggtcagacggtctggcatgaacctaccggcgctgcgccgcataccttacaaatcggtgataacaaccaaattgtcgcgcgaaccgggataacggttgtcggtgattttcgtcgtcgcgatattgcgctgggcgggcaaggcgcgccgctggttcccgcgtttcaccaggcgttgctggcgcacccgacagagcgtcggatggtgctgaacattggcggtatcgccaacctgtctttgctcataccgggtcaaccggtaagagggtacgataccgggccaggcaatatgctcatggatgcctggatctggcggcagtgcgctaagccttatgataaagacgcgcaatgggccagcgaagggaaagtgataattccgctgctgcaaaatatgttgagcgatccctatttttcagcgcccgcgccgaaaagcaccgggcgtgagtatttcaactatggctggatagaacgccacctttcggcctttcctggcctcgctccccgcgatattcaggcaacgctggctgagctgaccgcggtgacaatttctgaacaggttctgttaagcggcggctgcgagcggctgatggtgtgcggcggcgggagtcgtaaccctttgctgatggcgcgtctggccgggttgctgccgggtacggaagttaccagcacggatgaagccgggatcagtggcgatgatatggaagcgctggcgtttgcctggctggcgtggcgcacgctcgccgggttgccggggaacctcccttcggtgacgggggccacagaatccagcattctgggggccattttcccggcgaacccacgaactcagagttaa

SEQ ID NO: 73143 - DNA, 468 bp, Citrobacter koseri
atgattaaacgtgtgctgatcgtttcactgatgggcttatctttagcgggttgtgtgaataacgatagcctgtccggtgatgtctataccgcgtccgaggcgaaacaagtgcagaatgtcacatacggcactgtcgttaacgtccgtccggtgcaaatccagggcggtgatgactccaacgtgatcggcgctatcggtggtgcagtgctcggtggtttcctcggtaataccatcggtggcgggacgggtcgttcactggcgacggccgctggcgcagtcgctggcggcgtagcgggacaaggcgtccagggcgcgatgaacaaaactcagggtgtggaactggaaatccgtaaggatgacggcaacaccattatggtggtacagaaacagggcgatacccgtttctccgcaggtcagcgtgttgttctggccagcaacggcagccaggttactgtttctccgcgctaa

SEQ ID NO: 73144 - DNA, 435 bp, Citrobacter koseri
ttggaatcgccactaggttctgatctggcacggttggtgcgcatttggcgtgctctgattgaccatcgcctgaaacctctggagttgacgcagacacactgggtaacgctgcataatattcaccaacttccgccggatcagtcgcaaatacagttagccaaagcgattggcattgaacaaccgtctctggtgcgtacgttggatcagcttgaagacaaagggcttatctcacgacaaacctgcgccagcgatcgtcgcgccaagcgaattaagctgacggagaaggcggaaccgctcatcacagagatggaagccgtgatcaataaaacgcgtggagagattctggaagggatttcgccgcaggaacttgagctgttaattaagctgattgcgaaacttgagcacaatattattgagttgcagtctcagaactaa

SEQ ID NO: 73145 - DNA, 237 bp, Citrobacter koseri
gtgacgtttatacccactgcaacaggattgcccctacaagatctggtgatcggcgcatctgtctatttccctccgcttttcaaagcattcgcgcttggatttgttatctggctgctggcgcatcgcctgctacgcgactggatttactcgggtgaaatctggcatcccctgctgatggatctgtcgatatttgcactttgcgtgtgcctgagccttattttgctgattgcgtggtga

SEQ ID NO: 73146 - DNA, 861 bp, Citrobacter koseri
atgtcgcttaaaacaatgaaatacttttcaacgattgtggttgcggccatcgcggttctggccggttggtggctatggaattactacatgcagtctccgtggacgcgcgacggtaaagtacgggcggaacaggtgagcattacgcctcaggtctccggcagcatcaccaagctcaatataaaagataaccagttcgtgaatgcaggcgatctgctcttttctatcgataagaccccttttcacatcgccgagcttaatgcgcaggcagaactggctaaagcccgctccgatttagcgaaagccaataatgaagccaaccggcgtcgccatttatcacaaaattacatctctgccgaagatatggacaccgcaaacctgaacgttaaagcgatgcaggccagcgtcgaagcggcggaagcgtcattaaaacaggcgcaatggcaattagcccagaccgacgttcgcgcgccggtcgcgggctgggtgacaaacctctcaacgcgcacgggggattacgcctctaccggccaaccgctgtttgcgctggtcgacagccactcgttctacgtcatgggatatttcgaagagacgaaactgcgccatattcgcgaaggcgctccggcgcagatcaccctctacagcggcaacgtaaagttacagggtcacgtatccagtattggccgggcgatttatgatcaaagcgtggagagcgattccggcctggtccctgacattaaacctaacgttccctgggttcgtctggcgcagcgcgtaccggtgcgtatcgaatttgatgcgttaccccatgatgtcacgctggtttcgggcacaacatgcagcgtggctatcggtcagcgctaa

SEQ ID NO: 73147 - DNA, 2016 bp, Citrobacter koseri
atgaagctccctcacctgacctggcgcgatacgccctggttcaaagcaaactctgggcaatggcgctatgcattgcgcaataccctcgccatgtgcctggcgctgacgttcgcctactacatcaacctggatgagccatactgggcgatgacctctgccgccgtggtaagttttccgacggtaggcggcgtgatcagtaaaagtctggggcgtattgccgggagtttacttggcgccaccgccgcgctcatcatcgcaggtcacacgctaaacgaaccctggctctttttattaagcatggcggcctggattggcttttgcacctgggcctgcgcccatttcaccaataacgtcgcctacgccttccagctggcgggttacacggccgccatcattgcctttcccatggtcaacatcatcgaggtcactcagttgtgggatatcgcccaggccagggtctgcgaggtgatcgtcggtattctttgcggcggcatgatgatgatgatcctccccagcacctctgacggcacggcgctgttgaccgcactgaaaaatatgcacgcacggctgctggagcacgccagcctgctctggcagccggaaaccaccgatgcgatacgttctgcccatgaaggggttatcggccaaattctgacgatgaacctgctgcgcattcaggcattctggagtcactaccgttttcgtcgccagaacgcgctgcttaacgctctgctgcatcagcagcttcgcctgaccagcgtcatttccagcctccgcaggatgttgctgaactggcccaacccgccggagcagacccgcgatgtgattgaacaactgttggccgcgctggctaatccgcgtaccgacagttataccgtcgcgcgcattattgccccgctacatccgaaaaaccgacaggattaccgccacgtcgccttctggcagcgattgcgctatttctgccaactctacttacacaacagccatcagctacggttgctggaaaacggcgccgcagtcgatgagatcaaagtaacgcacagccccggtctggcccgccatacggacaacgccgaagcgatatggagcggattgcgcacatttaccaccctcatggtgattggcgcgtggagtatcggttcacaatgggaatccggttcaggggcattaacgctggcggccatcagttgcgtgctctattccgccgtcgccacgccgtttaaatcactctctttattgatgcgcacgctgattctgctctcgttattcagcttcgtcgtcaaattcggtttgatggtgcagataaccgatctctggcagtttttgctgtttctgtttcctttgctggccacgatgcaactgctgaagctgcaaatgccgaaactcgccgggctttgggggcagttgatcgtttttatgggatcgtttatcgccgtcaccaatccccccgtgtatgactttgctgattttcttaatgacaatacggctaaaattgccggggtcgcgctgtcgtggctggcgtttgcgatcctgcgtccgggttcggatgcccgcaaaagccgtcgccatatccgcgcattgcgcagagattttgtcgatcagctcagtcgtcatccatcacacagcgagaatgagtttgaatcgctgacctatcatcacgtcagtcaactcagcaatagccaggatgcgctggcgcgacgctggctgttacgctggggagtggtactgctgaattgttcacatgtggtgtggcaactgcgtgcctgggaaacccgctccgacccgctttcgcgcgtccgggatatctgtattgccttgttgcgcgacgtgatgagcgagcgcggcgtacagcaacgaccgctggcggccacgctccaggagctacagcgtatttgcaacacgctgtcgcatcatcatcaacctgcggctcaggaactggcggcgctcatctggcgattacactgctcgctgtcgcagcttgagcaagcgcccccgcagggttcactgacatcctga

SEQ ID NO: 73148 - DNA, 522 bp, Citrobacter koseri
atgaagcgtttgagtctggcaatgttaaccctgctggcctgtgcgggcgcacaggccgccagtgaagaagtgacgatgaatctggtgacttcgcaaggcgtcgggcagtcgattggcagcgtaactattgccgaaacggataaagggctggagtttactcccgatctgaaagcgctgccgccgggtgaacatggttttcatatccatgctaacggcagttgccagcctgcgattaaagagggtaaagcctcggcggcagaagcggcgggcgggcatttcgacccgcacaataccgggaagcacgaggggccggaaggcgccgggcatatgggcgatcttcccgtgctggtggtcaataatgacgggatagccaccacgcctgttactgcgccgcgcctgaaatctcttgatgaaatcaaagataaagcgctgatgatccatgtcggcggcgataacatgtccgatcagccgaaaccgcttggcggtggtggcgagcgttacgcctgcggcgtcatcaaatag

SEQ ID NO: 73149 - DNA, 897 bp, Citrobacter koseri
atggttcagcgtatcactattgccccgcaaggcccggaattttcgcgcttcgtgatgggttactggcgtctgatggactggaatatgtctgcgcgtcagctggtcagctttattgaagagcatcttgatctgggcgtcacgaccgttgaccatgcggatatctacggcggttatcaatgtgaggccgcgtttggcgaagcgttgaaactggcgccgcacctgcgtgagcggatgcagatcgtaacgaagtgtggtatcgccacgaccgcccgggctgaaaatgtactcggccattacatcactgaccgcgaccacattgttgccagcgctgaacagtccctgaaaaatctggcgaccgaccgtcttgatctgctgctcatccatcgtcccgacccgttaatggatgcggacgacgtagcggaagcattccagcatctccaccagagcggaaaagtgcgccactttggcgtctctaactttaccccggcccagtttacgctgctgcaatcgcgtctgccgtttacccttgccacgaaccaggttgagatttcaccggttcatcagccgctgctactggacggcacgctggatcagctacagcaactgcgtattcgaccgatggcgtggtcctgtcttggcggcggtcgtctgttcaatgatgatgaatttgcgccgctgcgcaacgaacttgccgcgatcgcggaagagctgaacgcgaccacgattgagcaggtggtatatgcgtggattttacgcctgccgtctcagccgttgccgattatcggctccggtaaaattgagcgcgtacgcgcagcgattgaggcggagtctctgacgatgtcgcgtcagcaatggttccgtatccgcaaagcggcgttaggttacgacgtgccgtaa

SEQ ID NO: 73150 - DNA, 240 bp, Citrobacter koseri
gtggccgagcagttagagttttttcccgttccaagcccgtgccgggggatctgtcagtcggatgagcgcggattttgtcgcggctgtctgcgcagtcgggatgagcgtttcaactggcaaaaaatgagcgacgccgagaagcaggacgtgttgcggctttgtcgtcagcgtcttatgcgcaaattacgcgcaaacaaaccgaacccgcaggaagaacctcaacaaccctcactcttttga

SEQ ID NO: 73151 - DNA, 600 bp, Citrobacter koseri
atgaacaaacagactgaacatgacacccgcgaacatcttctggctaccggcgagcagctttgtatgcagcgtggcttcaccggaatgggattgagcgagctgctcaaaaccgccgaagtgccgaaggggtcgttttatcactattttcgttccaaagaagcgtttggcgtcgccatgctggaacggcattacgccggatatcatcagcggctggcaacgcattttgacgccggagcgggcaactaccgtgaccgcattctggcttactatcaggaaaccctgaatcagttttgccagcaaggcactatcagcggctgtttgaccgtaaagctgtccgccgaagtgtgcgatctctcagaagatatgcgcactgcgatggacaaaggcgcgcggcatattattacgctgttagcgcaagcgctggaaaaaggacgcgaagcccgctgtctctcttttgctggcgagccgctgcaacaggcgcagaccctgtatgcgctgtggttaggcgcgaatctgcacgccaaaatttctcgcagtgccgccccgcttgaaagcgcgctggcacatgtaaaaacgattatcgcaacgcctgcggcttaa

SEQ ID NO: 73152 - DNA, 1098 bp, Citrobacter koseri
atgtcatctgagaaactgtttaccccgctgaaagtgggcgcaattacggcagcaaaccgtgtgttcatggcccctctgacgcgtttgcgcagcattgaaccgggcgacattcccaccccgttaatggccgagtattatcgtcaacgcgccagcgccgggctaatcatcagcgaagcgacgcagatctccgcacaggcgaaaggctatgcgggcgcgccgggtctgcacagcgcggagcagatcgaggcatggaaaaaaattaccgctggcgttcatgccgaacaggggcacattgctgttcaactctggcataccggtcgaatctctcattccagcctgcaacccggcggccagccccctgtctccgcgtctgcgatcggcgctggcacccgtacctcgctgcgcgatgaaaacggtcaggccattcgtgtcgacacctcaatgccgcgcgcgctggaaaccgacgagatccctggcatcgtcaacgatttccgtcaggctatcgccaatgcgcgtgaagccggtttcgacctggtagaactgcattccgcccacggctatctgctgcaccagttcctttccccgacgtcaaaccatcgtactgaccagtacggcggtagcgttgagaaccgcgcgcgtctggtgctggaagtcgtcgatgccggtattcaggaatggggggcagatcgaattggtattcgtgtttcccctatcggcacattccagaatgtcgacaatggcccgaatgaagaagccgatgcgctctatctgattgaggaactgggtaaacgcggcattgcctatctgcacatgtccgaacctgactgggctggcggcgaaccgtatactgacgccttccgtgagaaagttcgcgcccgcttccacggcccgatcattggcgcgggcgcctatacgccggaaaaagcggaagacctgctcaataagtgcctgatcgacgccgtcgcgtttggccgggcgtatatcgctaacccggacctggtggctcgtctgcaacgcaaagcagaactgaatccacaacgcgcagaaagcttctacggcggcggcgctgaaggttacacggactatcctaccctgtaa

SEQ ID NO: 73153 - DNA, 408 bp, Citrobacter koseri
atgcgtttacttcataccatgctgcgtgttggcgacttgcagcgttccatcgaattctacaccaacgtactgggcatgaagctgctgcgcaccagcgaaaacccggaatacaaatactctctggcattcgtgggttacggcccggaaagcgaagaagcggtgatcgagttaacttacaactggggcgttgataagtacgagctgggcacggcctatggccatatcgccctgagcgtcgacaatgctgccgaagcctgcgagcgcattcgccagaacggcggtaacgtcacgcgtgaagcgggtccggtaaaaggcggctccaccgtcatcgcgtttgttgaagatcctgatggctacaaaattgagctgattgaagccaaagacgccggtcgcggtctgggcaactaa

SEQ ID NO: 73154 - DNA, 648 bp, Citrobacter koseri
atgtccgataacgctcaactttccggtctgtgcgaccgttttcgtggtttttatcctgtcgtcattgatgtcgaaacggcgggattcaatgccaaaaccgatgcgctgcttgaggttgccgccatcacgctgaaaatggatgaacaaggctggctgatgccggacacgacgctgcatttccatgttgagccgttcgaaggcgcaaacttacagcccgaagcgcttgcctttaacggaatcgatccttctaacccgctgcgcggcgcggtcagcgagtacgatgcgctgcatgctattttcaaaatggtgcgcaagggaattaaagacagcggttgcaatcgtgcgatcatggtggcccataacgccacgttcgatcacagttttatgatggccgccgctgagcgcgcttcgctgaaacgtaaccccttccaccccttcgtgacctttgacactgcggccctgagcggcctggcgctgggacagaccgtgctgtcaaaagcgtgtctggcggcgggaatggagtttgatggaacgcaggcgcactctgccttatacgacaccgaacgaacggccgttctgttttgcgaaatcgttaaccgctggaagcgtcttggcggctggccgttgccagtaccagaagaagcataa

SEQ ID NO: 73155 - DNA, 348 bp, Citrobacter koseri
atgagcaccactatcgaaaaaatccagcgccagatcgctgaaaacccgattctcctgtacatgaaaggctctccaaaactgccaagctgcggtttttccgcgcaggctgttcaggcgctttctgcctgtggtgaacgttttgcctatgtcgatattctgcaaaacccggacattcgcgccgagctgccgaaatatgcaaactggccgaccttcccgcaactgtgggtggacggtgagctggttggcggctgcgatatcttaattgaaatgtaccagcgcggtgaattgcagcagttgatcaaagagactgcggcaaaatacaaaaccgaagagcctgacgctgagtaa

SEQ ID NO: 73156 - DNA, 822 bp, Citrobacter koseri
gtggcgcggataaaccggatctcgatcacgctctgtgctttgctttttaccacgctcccttttacgtcaatggcgcatgcttcccggcaagccagggcgacgcctgccgcgcatgtcacgaaaacggcagataagcagaagaacaccgcgaccagcaagaaaaaaacgaagactgcaaaaaaagccgtgagtaaaacccaaagtaaaacggcctccacatcgaaaaaacgtattgcctcccctgcgaaaaccaccaaaaccagcaaaaccgcaagccgtcgtagcaaacccgccactacacaaaccgcagccgtaacctggacggaaaaatgtacgccgcgcaagggtcataagccgcattgtgtcaaagtaaaaggcgccccgcttgccattgccgatgcgcgtaaagcgaaaatgcagaaagccaccaacacggcgatgaataaattaatgaatcagattggcaaaccgtatcgttggggcggaacgtctccacgaaccggttttgattgcagcggtctggtttattacgcgtataaggatctggtgaaattccgcatcccgcgtactgcaaatgaaatgtatcatttgcgcgatgccgcgccgattgaacgtggcgaactgaaaaatggcgatctcgtgttcttccgtactcagggtcgcggtactgccgatcacgttggcgtttacgttggcaacggcaaatttattcagtctccgcgcagcggtcaggaaatacagattacctctcttagcgaagattactggcagcgccattacgtgggcgcacgccgggtcatgacgccgaaaaccattcgataa

SEQ ID NO: 73157 - DNA, 582 bp, Citrobacter koseri
atgtcgtttgaattacctgcattaccgtatgccaaagatgctcttgcaccacacatttctgctgagacgctggaatatcattacggcaaacatcatcagacctatgtgaccaaccttaacaacctgatcaaaggcacgccatttgaggggaaatcactggaagagatcgttcgcagcgctgaaggcggtgtcttcaataacgcggcccaggtctggaaccacaccttctactggaactgcctggcgccagatgctggcggcgaaccaacgggtaaactggctgacgccattgtcgcgtccttcggcagctttgccgatttcaaagcgcagttcaccgacgccgcaattaagaacttcggttccggctggacctggctggtgaaagggacggatgggaaactggctatcgtctctacgtcgaatgccggtacgccgctgaccaccgacgccacgccgttgatgaccgtggatgtgtgggaacatgcctactatatcgactaccgcaatgcccgtcctggctacctggagcacttctgggcgctggtaaactgggagtttgtggcgaaaaacttcgcggcataa

SEQ ID NO: 73158 - DNA, 1167 bp, Citrobacter koseri
atgaaaataaattatcccttactggcgctggcaattggcgcatttggtattggaaccaccgagttctctcctatgggcttgttgcctgttatcgctcgcggcgtggatgtctcgattcctgcggccggaatgctaatcagcgcgtatgccgttggtgtgatggtcggcgcgccgttgatgacgctgctgctttcccatcgcgcacgtcgtaatgcgcttatttttttgatggcgatttttaccctcggaaatgtgctgtcggccatctcgccggattacactacgttgatgctgtcgcggattctgaccagcctgaatcacggcgctttcttcggtctggggtcggtggtggcggccagcgtcgtacccaaacataaacaggccagcgcggtcgccaccatgtttatggggctgacgatcgccaatattggtggtgttcctgcggcgacctggctgggggaaaccattggctggcgtatgtccttcatggcgacggcggggctgggcgtaatttcaatgattagtctctttttctcgttgccgaaaggcggggcgggagagcgccctgaggtgcgcaaagagctggtggtgctgttgcgaccacaggtgttatcggcattactgaccaccgttctgggcgcaggcgcgatgtttacgctctatacctatatcgccccggtgctgcacagtattacgcatgcaacgcctgctttcgttaccggtatgctggtactgattggcgttggcttttctatcggcaactacctggggggaaaactggcggatcgttcggttaacggcaccctgaaaggatttttgctgctgctgatggtgattatgctggcgatcccgttcctggcgcgcaatgaagtgggcgccgctatcagcatggtggtatggggggcggcgacattcgcggtggttccgcctttacaaatgcgcgtcatgcgggttgccagcgaagcgccaggcctctcttcatcggtcaatatcggtgcctttaatctcggtaatgcgcttggcgcagcggcggggggcgcagtgatttccggtggtttgggctacagcttcgtaccggtgatgggggcgattgtggcagggcttgcgctgttgctggtctttgtctctgcgcgcaggcagcctgaagacgtttgcgtggcgaactaa

SEQ ID NO: 73159 - DNA, 1026 bp, Citrobacter koseri
atggcaacaattaaagatgtggcgaagcgagcaaacgtttccactacaaccgtatcacacgtaattaacaaaacgcgcttcgttgcggaagagacgcgcaacgcggtatgggcagccattaaagaactgcactactcacccagcgcggttgcccgcagcctgaaggttaaccacaccaaatcgattggtttgctggcgaccagcagcgaagccgcctattttgctgaaattatcgaagccgttgaaaagaactgcttccagaaaggatatacgctgattctgggcaacgcctggaacaacctggaaaagcagcgcgcgtacctctccatgatggcgcaaaaacgcgtggatggcctgctggtcatgtgttccgaataccctgaatccctgctctctatgcttgaagagtatcgccatatcccgatggtggtgatggactggggcgaagccaaagcggactttaccgatacggtcattgataacgcctttgcaggcggctatatggccggccgttatctggttgaacgcggccaccgtgaaattggcgtgatccccggcccgatggaacgcaacactggcgcaggtcgtctggctggctttatgaaagcgatggaagaagcgctgataaacgtgccggaaaactggatcgttcagggtgatttcgagccggaatcaggctaccgcgcgatgcagcaaatgatctcccagtctcaccgcccgacggccgtattctgcggtggcgacattatggcgatgggcgcgttgtgcgccgctgacgagatggggctgcgcgtaccgcaggatatctcggtcatcggctacgacaacgtgcgcaacgcgcgttactttacgcctgcgctgacgacgattcaccagccgaaagattctctgggtgaaacggccttcaatatgctgcttgaccgtatcgtcaataaacgcgaagagtcgcagtccattgaggtgcatccgcgtctgattgagcgtcgctctgtcgccgatggcccgttccgcgactatcgccgttaa

SEQ ID NO: 73160 - DNA, 933 bp, Citrobacter koseri
atgtggtcagaatattcactcgaagtggttgatgccgttgcccgtaatggcagctttagttctgcggcgcaggagttgcaccgcgtgccttctgcggtgagctacaccgtccgtcaactggaagagtggctggcggtgccgcttttcgaacgacgccatcgggacgttgaactgacccccgccggggcatggtttttaaaggaagggcgctctgttatcaaaaaaatgcagatcacccggcagcagtgccagcagatcgccaacggttggcgggggcaactggcgattgcggtcgacaatattgttaagccggagcgcacccggcagatgattgttgatttttatcgccattttgatgatgtggaattgctggtctttcaggaggtatttaacggcgtctgggatgcgctgtcggacgggcgcgtggagctggctatcggcgcgacgcaggccattccggttgggggacgctacacctttcgcgatatggggatgctgagctggagctgcgtggtcgcccgccatcatccgctggcgtcaatggctggcccgctcagtgacgacacgttgcgcaactggccgtcgctggtccgggaggatacctcgcgtacgcttccgaagcgcatcacctggctgctggataatcaaaaacgcgtggtggtgccggactgggaatcttcagcgacctgcctttccgcgggactgtgtgtgggaatggtgccgacccactttgctaagccgtggatcgacagcgggaaatgggtggcgctacagcttgagaatccgtttcctgatgcggcgtgctgtctgacgtggcagcagaacgacacgtcgcccgcgctggcctggctactggactatctgggcgacagcgaaacgctgaataaagagtggttacgggagccggaagaggctcccgcagaaggggattaa

SEQ ID NO: 73161 - DNA, 1206 bp, Citrobacter koseri
atgcaacccggaaaaggttttttagtctggctggcgggtctcagcgtgctgggctttctggcaacagatatgtatctgcctgcgttcgcggcaattcaggccgacctgcaaacaccagcggcggctgtcagcgccagcctcagtctgttcctggccggtttcgccgtcgcgcaactgctgtgggggccgctgtcagaccgttacgggcgtaaacccattttgctgctgggtctctccatctttgcgctgggcagtctggggatgatgtgggtcgaaagcgctaccgggctgctggtactgcgttttattcaggcggtgggggtttgtgccgctacggtgatctggcaggcactggtgacggattattatccaacgcaaaaaattaatcgcatcttcgccaccattatgccgctggtcggtttatcgcccgcccttgcgcctttactcggcagttggatcctgacgcatttttcctggcaggccatttttgccacgctgttcatcattacgctgatattgatgctgcccgccttacgcttaaagccaacaaaaaaagcacatgaccacagccaggaaaaactgaccttcgccagcctgctgcgttcacaaacttatcgcggcaacgtcctgatttacgccgcctgctccgccagtttttttgcctggctgacgggttccccgtttatcctcagcgaaatgggctatagcccggcggtgattggcctgagctatgtaccgcagaccatcgcgttcctggtgggcggttacggttgccgcgcggcgctgcaaaaatggcagggtcagcagctgttgccctggttactggttctctatgcgctgagcgtggtcgccacctggggcgccagcttcatcagccatgtttcgctgacggagatcctgattccattctgtgtgatggctatcgcgaacggcgcgatctaccctatcgtggtcgcccaggcgctgcgccccttcccgcaagcgactggacgcgcagcagccttacagaacacgctgcaactgggtctgtgtttcctggcaagcctggtcgtttcgtggctgatcagcacgccgctgcttaccaccaccagcgtaatgctgtcgacggtggctctggcggcactgggatactggctgcaacttcaggcgcaggaaccggccgcgcgcgcagcaaacaccgaagttgcgcacagcgaatctcactaa

SEQ ID NO: 73162 - DNA, 1149 bp, Citrobacter koseri
atgagttcatcgtgtatagaagaagtcagcgtaccagatgatgactggtatcgtatcaccaacgaattgctgggccgtgcgggtatcgccatcaatggcactgccccggcagatattcgtgttaaaaaccccgattttttcaaacgtgtattacaggaaggatcgctggggttaggtgaaagttatatggatggctggtgggaatgcgaccgactggacatgttttttagtaaagtcttacgagccgggctcgaaaaccaactcccccaccatttcaaagatacgctgcgtatcgcgggcgcgcgcctgttcaacttacaaagtaaaaaacgcgcctggatagtcgggaaagaacattacgatctcggcaacgatcttttctcccgcatgctcgacccgtatatgcaatattcctgcgcttactggaaagatgccgacacactggaatccgcccagcaagcgaagctgaagctcatttgtgaaaaactacagttgcagccgggtatgcgcgtgctggatatcggatgcggctggggcggcttgtcccagtttatggcgtccaattatgacgtcagcgtcgttggcgtcacgatttccgccgagcagcaaaagatggcccaggaacgttgcgcaggtctggacgtttctattcggctacaggattaccgcgaccttaacgatcagtttgatcgcattgtgtccgttggtatgtttgaacacgtcgggccgaagaactataaaacctattttgaagtggtcgaccgtaatttgaaaccggacggtattttcctgctccatactatcggttccaaaaagacggataataatgtcgacccgtggatcaataagtatattttcccgaacgggtgcctgccgtctgttcgccagattgcgaatgccagcgaatcgcatttcgtgatggaagactggcacaactttggcgcagattacgacaccaccctgatggcctggtattctcgctttatcaacggctggccggaaattgcagataattacaccgaacggtttaaacgcatgttcagttattatctgaatgcatgcgccggggcgtttcgcgcccgtgatatacagctatggcaggtggttttttctcgcggcgtcgaacacggcctgcgtattccccgctaa

SEQ ID NO: 73163 - DNA, 642 bp, Citrobacter koseri
atgtttacaggtattgtgcagggcaccgcgaaactggtgtcgattgatgaaaaaccgaatttccgcacgcatgtcgtggaattacctgaacacatgctggacgcgctggagactggcgcatcggtggcgcacaacggctgttgcctgaccgtcactgaaataaacggtaatcagatcagctttgacctgatgaaagagacgttacgcattaccaatcttggcgatctgagcgtcggcgatctcgttaacgtggagcgtgcggcgaaattcagcgatgagattggcgggcatttaatgtcgggtcacattatgaccacggctgaaatttcgaaaattctgacctctgagaataatcgtcaggtctggtttaaagttcaggacccgcaactgatgaaatatatcctgtataagggattcatcggcatcgatggcatcagtctgacggtaggggaagtgacgccaacgcgcttttgcgttcatctgatcccggagacgctggaacgcaccacgctgggtaagaaaaaactgggcgctcgcgtcaatatcgaaattgatccgcagacccaggcggttgttgacaccgtcgagcgcgtgctggcggcacgggaaagcgcgacgaatctgcatgcaggcgatgcgtaa

SEQ ID NO: 73164 - DNA, 1374 bp, Citrobacter koseri
gtgcagaagtatatcagtgaagcgcgtcagttattagctctggcaataccggtgattcttgcgcaaatcgcccaaaccgcgatgggattcgtcgataccgtgatggctggcgggtacagcgccacggatatggctgccgtcgctatcggcacatccatctggctgcccgccattctgtttggtcatgggctgttactggctctgaccccggttatcgcgcagctcaacggatctggccgccgcgaacgcatcgctcaccaggtgcgacaaggcttctggctggcgggctgtgtgtccgttctcattatgtttgtgctatggaatgccggatacattatccgttctatgcataacattgatcctgcgctggcggataaagccgtgggctatcttcgcgcgctcctgtggggcgcgccgggatacctgttctttcaggttgcgcgtaaccagtgcgaaggtctggcaaaaaccaaacccggcatggtcatgggcttccttggcctgctggtcaacattccggtgaactatatattcatctacggtcacttcggtatgccggaactcggcggcgtgggctgcggcgttgccacggcggcggtctattgggtgatgtttatcgcgatggcctcgtatgtgaaacgtgcgcgttcaatgcgcgatatccgcaacgagcgcggattcagcaagccggatacggcggtcatgaaacgtctggtacagctaggtttgccgatcgccctggcgctgttttttgaagtcaccctgtttgccgtggtggcgctgttggtttcaccgctgggtattgtggatgtcgcaggtcaccagattgccctgaacttcagttcgctgatgttcgtattgccgatgtcgctggcggctgcggttaccatccgcgtgggctatcgacttggccagggctcaacgctggatgcccagacagccgccagaacagggctgggcgtcggggtttgcatggccgtgatcaccgcaatttttaccgtgacgctgcgtgagcctatcgccctgctctataacgacaatcctgaagtggtcacgctcgccgcgcaactgatgctgctggcggcggtgtatcaaatttccgattcgatccaggttatcggcagcggtattttgcgtggttataaagatacgcggtcgattttctttattacctttacagcttactgggtgctgggattaccgagcggttatatcctcgcgctgaccgatctggtggtggatcgcatgggaccggccgggttctggatgggctttattatcggcctgacgtctgcggccatcatgatgatgctgcgtatgcgatacctgcaacgccagtcatcagcgattattttgcagcgcgctgcgcgataa

SEQ ID NO: 73165 - DNA, 2301 bp, Citrobacter koseri
atgataaaaaaggcatataaattatcgcttttgagttcgcttattgcagggagtctggcaattcctgcggtacaggctgacgacatcaaaacagcggcaaaccagaaagcagaacaaacaaacgccagtaacccacctgagaaacaggctgcccgcgacaaagaaataaacagcggcgaaaccatggtcgtgacggccaaagaacagacgctccaggcccccggcgtctctatcattgacagcgaggccattaaaaaacggccaatacagcgcgacgtcgctgagatcattcgcaccatgccgggcgtcaatctcaccgggaactctaacagcggacaacgcgggaataaccgccagattgatatccgcggcatggggccggagaacactctgattctgattgacggtatgcctgtctccagccgcaactcggtgcgctatggctggagcgatgagcgcgatacccgtggcgacaccaactgggtgccgccagaaatgatcgagcgcattgaggtcatccgtggcccggccgccgcgatgtacggcagtggcgcaatgggcggggtcgtcaatatcatcaccaaaccggcgacggacgaatggcacggcagtttaaatacctattacaactttccacagcacaaatccgaaggcagcaccaaacgctataacggcagtttaagcggcgcgctggcggataatctgaccctgcgagtctacggtaactggaataaaacgcaggctgatgccctggatatcaacgaaaaccacacgaccccgcgtatcggttcttatgccggtagctaccccgctggccgcgaaggttttatcaataaagacatcaattcagctctgcgctgggaatttatgccgatgcaggcgctggaactgggggccggctacagtcgccacggcaacctgtatgccggtgatacgcaaaacaccaacagcaacgcgctggtaaaaaaatattatggcaaagaaacaaacgttctctaccgccagacgctcagcctgaaatataccggcgcctgggacagcggcgtcaccaccaataactatgtgcagtttgaaaaaacgcgtaatacccgcctcaatgaaggcctctctggcggcatctcggggattttcagcccgtcaaatgaagggttttcgaccatttcgttgtatgacaccaacctgcactcggaagtgaatatcccgcttgacctgtgggttagccagacgctgacctttggcgcagaatttaaccaccaggcgatgaaagatccgtcgtcgaataccgaatccaccaccggcgggggctcggttccgggcattgccaataccggacgcagcaaatacagctcagcggatatttacggcatctttgcggaagataaccttgaactgacggacagcacccgtctgacccctgccattcgcttcaaccaccagagtattagtggcagtaactggagtccgtcactgaacctctcccagaaactgggcggcgacttcacgttaaaactgggtattgcccgcgcatggaaagcaccaaacctgtatcagaccaaccccaattacctgttgttcagtaaaggccagggatgctacggcggcggcgcctgctatctgcaaggcaaccgcgacctgaaagcagaaaccagcgtcaataaagaggtagggattgaatataatcatgatgaagtgcaggccgggctgacctggtatcgcaacgactaccatgacaagattgcagccggtgactcggttgcgggcaaagccacctccgcaaatatttatcaatgggaaaacgtgccaaaagccgtcgttcaggggctggaagggacgttcaatttcccgctcgccgatacgctgaagatgaaaaataacttcacctatatcatcgagaacaagaataagaagagcggagattacctgtcggttattcccaaatacaccatcaactcaacgctggagtggcaggccgctaacgatctgtcggtgcagggtacgctgacgtggtatggccgccagaaaccgaaaaaatacacttatcaagggaaccccacttcgggcagcgaaacccgacaggtatcgccttatgcgctggtgggcatgagtgcgacttacgcggtgacgaaatatgtggatgtaaccgcagggatcgataacctgttcgacaagcgccacttccgtgaaggaaatgcccagactaccggtaacgccaccacgggcgcgtatctgtggggagccggtgcgaacacctataacgaacctggccgcacctactacatgcaggtggggctgcacttctga

SEQ ID NO: 73166 - DNA, 939 bp, Citrobacter koseri
atgtatggccgtgagtatcgaaacgggcgtcgtcgcatggcgccgtttttagcgatctcttgtattactttgctgtatggcgcgaaagggtatgccaggccggatatggagccgctggggccgaatatcgccgatcggggttccgcgttttaccatttcagggttgaaaatttcgactccgccgacggaaaaaggcattacaaggtctggaccggcattcctgataaaacgccgccagcgtcgggttatccggttctgtatatgctggatggcaacgcggtgatggaccgcctgacggaggacttgctgaaacaactggcggaaaaaacgccccccgttattgtcgccatcggctaccagacccacttaccctttgatctgaacggcagagcctatgattatacgcccgcgctggaagtgaaaagcggggcggagggacgctaccgtcgaccgggtggcggcagtggggacttccgtcgactgctggagacgcgtatcgcgccgcaaacggaacaaggactcaacatcgatcctgaacgacgcggcgtatggggacactcctacggcggcttattcgtccttgattcgtggctgtcgtcgtcattttttcggttttactacagcgccagcccatcgctgggaagagacaattcctcgttgttaacccggttaaccacaatggatgccgcgaaaaattgccataagcgtttatttttcatggaaggttccgcttcaccggggaaaaacgcgcagactccggtttccgatatcctgaataaaacccgcgacgccgtttccgccctgcaaaaagacgggcttgcggttgcctggtggaattaccctgggttgacgcacgggccgatgttcaccgcctcttttcagagtgcattactgaatatgagcgcggaggagactcccggggcagcgcgctgcgattaa

SEQ ID NO: 73167 - DNA, 903 bp, Citrobacter koseri
atgaaaaacatctttacactgacattcctcgcgctaagctgcctttccacgcacgctatagccagtgaaaaacttgccggtaatgaaattctcgccgttcagaaaggcggtgtcccggataagatttatgaaaacaacaagcctcatttaagaattgcgacctataacatcggcaaaaatgaagcgtccgaaaatgtagctgatttcacgtcgcttaacgccgctatcaaaaaaattgcagccgatatcattgcggttccagaggttgataataaaaccgcaagaagccaaaagattgatcaattgaaaacgatcgctgatgcaaataactaccactatgcctttggtaaggcgctggattttgacggtggtgaatacgggctcggcattttatcgaaatacaaaattcagcatactcaggttatcaatttaccctcaggcgatgcagaacaacgggtagcattactggcgcaaattgaggttccaggtttcgatacgccggtactggtcatggttacccaccttgactggcaaaaagatcctaccatgcgaattgagcaagtccgccatctgctggatgtcagtattggcgatgcgtcatccgattttaaagatatcgcctcttcaataaaaattctggctggcgatttcaactctacccgtgacgaacagccgttaaaagaaattagctatttctttaatccggttgagaaacaggggacggattatcgtacatggcctgcggttaacccggcgattgatattgaccacatcttcactttcaaggggcaaaaatgggatgtgaagaagatagaaattccgcataactcccctgctttcacctggtcgtcggcaagcgatcatctcccctttatcgcggatatggaactcaccgagcagtaa

SEQ ID NO: 73168 - DNA, 141 bp, Citrobacter koseri
atggatattgatctcgacaatctggtctttgacgggctggaggaagcgcaagagcgtaacgctgaacgtgtggaagacgcagataaaaaagcccaggcggttattgcggatgatgactgcggcgatgcctgcaaaatataa

SEQ ID NO: 73169 - DNA, 180 bp, Citrobacter koseri
atgaatgggtttaaacgtctttggcatactgtggtgaaggcacgtccacagacccgacagtacgatgcggagcctcatcttcagcgtattgttgagtctgttcttcctgtcgccagcctgtatggcgtggatatcgccaacattgatccggagtggttccgtgataaaacagaacgctga

SEQ ID NO: 73170 - DNA, 834 bp, Citrobacter koseri
atgatggcaacgacaattcacagcactaaaaaaacattactggcattaagtgcgctattcgcatccggtattgccgcgttacccgcccaggccgatcaactggcggatattaaagccgccggcgtagtgaaagtggccacgttcgatgcgaacccgccgtttggctccgtcgatccgcaaacgcataaaatcgttggttacgacgttgattttgccgaagcgctggccaaatcgttgggagtcaaactggaactggtcgccaccaacccagccaaccgtatcccgttactgcaatcgggtaaggccgatctgatcgtcgcagatattactatcaccccagagcgcgcccaggttatcgacttttccgttccctattttgtcaccgggcaacaattcctggttccggcgacctcccccgacaagctggatgagtacagccgcgcgcgaattggcgcggtgaaaggaacaacgggggaacaggcgctgcaccagcgtttcccgcaatcccgcgtgctggcctatgatgatatcccgctggcgctgaccgcgctgcgtaatggcaacgttcaggcgatcacccaggacagcaccattctggcgggcctgttaagcggggcgccagacaaagccaactttaaaatcctacccgacctgctgagcaaagaggaaatcggcgtcggggtgaaaaaaggcgaacccgcgctgttaaaggcggtgaacgatgaactgctgaagctcgagtccaccggacaggcggctaaaatctatgacgtctggttcggccccgaaaccaaaaatccacagccgcgcgcctttaaaatagaagcgaagtaa

SEQ ID NO: 73171 - DNA, 819 bp, Citrobacter koseri
atgctctcaggtttgtttacccgctccgcagcttcggctgcggattttacgcatttgcgtcaggcgcgcgttgaactgcgcgatgtgatcaaacagtacgacgggcaccgggtattaaacggtgtcaatctgacggtggaacccggagaagtcgttaccatccttgggccatccggttcgggaaaatccacgcttattcgactcatcaaccagcttgagtcattaagcggcggcgatatttttatcgacgataagcccattggtcagctcaagggcgcagcgctgcgccagttacgcagccgcattggattcgtattccagcaattcaacctttacgcccatctgacggcgcagcagaacattacgctggcgctggagtatgtgcatggctggaataaagaggccgcccggcagcgagcccgcgagttgctggaccaggtgggtctggctgaaaaagccgacgcatttgccgcccagctctctggtggacagcagcagcgcgtcgccattgcccgcgcgctggcctcctccccgcaaattatcctttttgatgaaccaacatccgcgctggacccggaaatgatcggcgaagtcttacaggtcatgaaaaatcttgcccacagcgggatcaccatgatcgtcgttacgcacgagatgcacttcgcgcgcgaaattgccgaccgtgtcgtgtttatcgacggcggcgatattctggaagtcgcctcgcctgaagcattttttacccgtccgcagcaccccagaacccagcgcttcctgaagaaagtgctcgatccgttacaccaggagtcatcgttataa

SEQ ID NO: 73172 - DNA, 780 bp, Citrobacter koseri
atgcttactctggactggcagggggtgctgagcgggcaacctctgcaatgggtcatctcgggttttttgaccacgctctgggtcacgctggcaggcgttttgctgtcgacactgctggcgattatcctgctcgcgctacgtctctccggcaacgcattcggtcgccgtctggtcgccgcctgggtctcgctgtttcgcaatactcctctgcttgtgcagttgatgttctggtacttcgcagcgtggaattttctgccccgtggcgtgattgatttcgttaataccgatcatttttggtcgatcctgcctggcgatgtctggtggctgacgccagaatttctctgctccgcatgggggctgggggtattcacatcggcctttctggttgaggagatcgcctcggggttgcaggcggtatccgccgggcagcgagaggccgcggtatcgcaaggtttttccgcgtggacgaccctccgccatattctgctcccccaggggctggcaaacgcctggcaacccatcgtggggcaataccttaatctgatgaaactctcatcgcttgccagcggtatcggctttgccgaactgacctatcaggtacgacaaattgaaagctataacgcccatgctctggaagcttttgccgtcggcaccgcgctctatttgctgactggcattgtattgggtctgctactggcgcggctaaaccccgccccggccaaaagagtgaaacccaaaacgcgtattttcagcctcaggagtccacaccatgatcgctaa

SEQ ID NO: 73173 - DNA, 678 bp, Citrobacter koseri
atgatcgctaatatttcggtcattaccgacaatctggattacctgctgtggggacgcgctgctgatggtcaacccggcggcgtgctcctcacattgttgatggcgttgggtgctggcgtgctggcgcttcccggcggggtggttctcgcctgtcttgcctggcgatttccgggagttatccgtaatgggctgtttctctgggcggaatttattcgcggcattccgctgatcttcgtgatcttctggatgtggtatttgctgccaatgcttaccggaagcgatcttcccggcgccgttaccgtcacgctggcgctggcctggtttactgcggcatcggtgatgcactccgtttatgccggcataaacgcgcttcctgccgggcagtacgacgcctcggtagtgcagggatttcgcccgtttcaggcattatggctcattctgcttccccaggtgctacgcaatgtaatgccgtcattgaccggcatttttatcggcctgctgaaagacacgtcgctggcgtttatcgttaatgttcctgaactgactaccgtcgccggtcaggtgaataaccgggtacagatttacccggcggccatttttatctttaccggactggtctattacctgctctgttttggcctggagagattcacccgtcgacgattcgccatccgataa

SEQ ID NO: 73174 - DNA, 813 bp, Citrobacter koseri
atgatcattacgcgagaggatttacgtacctggcgagtcgggcccgtcatctatcgttggtttgtccgtcgctttccgaatggcggcagctacgccgacgtgcatcgggcgctgagcagtgaaggctatctcgactgggcaaatagcctggtggaatatgcctggtcgcgctggctggatgaggagagctttgcgcgtcaggatatcagcgcgatggacagcctggtgagtgcgcaatcgcaccacggtaatagcgaacacattgcctgcgcggacgataacgttcatctgggatgtgcgggcgataacgtcaaaattgccagcgtggggtacgcttcgcagattgccagcgcggggtactgcgcgcgcattggcagcgcaggctacaacacgcatataggttgttccggcgatcgcgcgcgggtggcggtggcagggaactcaacccgcgtaagctgcgccggtgacgggagtcgtattgccagcgcgggaatgcgggtgcgcatcagcacgctgggtgacaggagcaatattgccagcaatggcgatctggcgcaggttgtcagctttggcgccaatgccagaattgccaacagcggagagaatgtccatctcgttaccagcggtgacaatgcggtcatcgccagcaccgggcacgttgactctctgatactggggcccggcggctgtgctgcgctggcgtatcacgatggtgaacgtacccgtttcgccgtcgccattgaaggcgagaacaacatacgcgccggggtaaaatatcgcctcaacgaacaacatcagtttgttgagtgttga

SEQ ID NO: 73175 - DNA, 786 bp, Citrobacter koseri
atgaacgcgtcgcagaatgctgaacagttccatgcccaactggcgaactatgtccccgtgttttctcccgaatactggcctgtctggttagtcatcgccggactgatgctggcagcgatgtggctggtgttggggctgcatgccatgctacggtttcgcgccgccaacaaagccgcggccggtcacggtgaaaaggtttacctgtactcaaaagcggtgagattgtggcactggtcgaatgcgctactgtttgtgctcctgcttggcagcgggctgatcaatcatttcttgctggttggcgcgtcggtgatgaagagtctgctgacggtgcatgagatctgcggttttctgctgctggcgtgttggctgggttttgttttgatcaacatgctgggcggcaacggacaccattatattattcgccgcgagggctggattgaccgggcgatgaagcagacccgcttctatctgttcggcattatgcagggtgaggaacatccgtttcccgccaccacacagtctaaattcaacccgttacagcaggccgcttatctcggggtgatgtacggcctggtgccgctgttgctgataaccggactactgtcgctttatccgcaggcggcgggcgatctgttccccggcgtgcgttactggctgttgcaggcgcatttcgcgctggcgatcgttagtctcttttttatcttcggtcatctttacctttgcacgacaggtcgtacgcccggtgagaccttccgctgcatggttgatggctatcatcggcactaa

SEQ ID NO: 73176 - DNA, 669 bp, Citrobacter koseri
atgtccttcactcgacgaaaatttgtgcttggtatggggacggtgatttttttcagcgggcctggccaaaatttgttagcaaacacgaagaatagcaaagcggtgcgttatgccatgattcatgacgaatcccggtgtaacggctgcaatctctgtgcccgggcgtgtcgcaagaccaaccatgttccggctcagggcagtcgtttatccatcgcgcacattcctgtttcggataatgaaaacgaaaccgtttatcactatttccgccagtcctgccagcactgtgacgatgcgccctgtattgatgtttgcccgaccggcgcctcctggcgtgatgagcgcggtattgtgcgggtagacgaatcgcgctgtatcggctgtagctactgtataggcgcttgtccgtatcaggtgcgttatctcaatccacaaaccaaagtggcggataaatgcgacttttgcgccgaatctcgcctggcaaaggggttcccgccgatttgcgtgaatgcctgcccggagcacgcattgatttttggtcgtgaagacagcccggaaattcagacctggctgaaggagaacaaattctatcaacaccaactcgcaggcgccggaaaaccgcatctgtatcgccggttcggtcaacatttgattaaaaaggaaaatgtatga

SEQ ID NO: 73177 - DNA, 645 bp, Citrobacter koseri
atgagtcattcagagggcgaacactccacgcctgaggtggatattgaaaagcggcagtggctgcaaggcttacatcagcatgaaaggcgagtggatgaaccggcgcctcccgcgagtccggcagagatcatggcggagttcatccgccagcattctgcttcaggccaactggtggctcgcgcgcttttcctgcaaccgccgtattcagtggaggaagaggcgttaacgccgctgctggagacgctgcttcagagcgagacaggggcggatatcgcctgcgtacagggtgctcaggatgattattactactcgacgcaaaccatgaccgctaactatgccgacatgtgtgcgcaggtggtggagaacgatatttgccgggctatcgcacaggcggtgcgttttgattgccagacctatccgcgaccctacaaggtcgccatgctggaacaaccgccataccgctttgcgccgcagcaaatagagacagctcttgccgcgatcgacacgcacccggattacgcggatattcgccgtgtggcgtcgtccaacgacgtaccgtatctgtttagcgaacgttttatgagctacggcaaggcatatggcttatgcgaatggcttgaggttgagcagtttcagaatccctga

SEQ ID NO: 73178 - DNA, 2103 bp, Citrobacter koseri
atggctaacggttggacaggtaatatattacgggtcaatcttacaacaggcgatattaccctcgaagattccagtaaatataaaaaatttgtcggtggaatggggttcggctacaaaattatgtatgacgaagtcccgccaggcacgaaacctttcgatgaaggaaataaactggtatttgccaccggcccgctgaccggatctggcgcgccctgtagttcccgcgtcaatatcacttcgctctctacgtttactaaaggtaatttggttgtcgacgcgcatatgggcggcttctttgcggcacaaatgaaatttgccgggtacgacgcgattattattgagggtaaatccgcttcgcctgtgtggatcaatattaaagatgacaaggtcagcctcgaaaaagcagattttctgtggggcaaagggacgcgcgccacgaccgaagagatctgccgtatgaccagtccggagacctgcgtggcggccattggtcaggcgggtgaaaacctggtgccgctctcctgtatgctcaacagccgtaaccacagcggcggggcgggaaccggcgcggtgatggggtcgaaaaatctcaaggccattgccgttgaaggcaccaaaggggtcaatattgccgatcgcaaagagatgaagcggctgaatgactacatgatgacggagctgattggcgccaataataatcatgttgtgccgagcaccccgcaggcatgggcggaattttcctcaccggcctcgcgctggacggcgcgtaaaggcttgttctggggggccgcagagggcgggcctgttgaaaccggcgagatcccgccgggtaatcagaatacggtcggctttcgcacctataaatccgtgtttgacttaggtccggcggctgaaaaatacaccgtgaaaatgagcggttgccactcatgcccgatccgctgcatgtcgcagctcaatattccacgggtaaaggattttggcgtaccgagcaccggggggaatacctgcgtggcaaactttgtccataccacgatcttcccgcacggcccgaaagattttgacgacaaggacgatggccgcgttatcggcaatctgatcggtctgaacctgtttgacgactacggtatctggtgtaactacgggcagttgcaccgtgacttcacgtattgctacagcaaaggcgtgttcaagcgcgtgcttccggctgaggaatatgcggagatccgttgggatcaactggaagcgggcgatcccaactttatcaaggatttctactatcgcctggcgcatcgcaaaggagagttgagccatcttgcggatggttcatacgccattgccgagcgctggaatctgggtgaggaatactgggcgtacgataaaaacaaactgtggtcgccgtttggctatccggtacaccatgccaacgaagcgtcggcgcaggtgggggcaattaccaactgcatgtttaaccgtgactgcatgacccacacccacatcaactttattggttctggtttaccgctgaagctacagcgagaggtcgcggcggaactgtttggttctgaagacgcctacgacgagactaaaaattacacgccgatcaacgcggcgaaaatcaagtatgccaaatggacgctgctcaaagtttgcctgcataacgccgtgacgctgtgcaactgggtctggccgatgaccgtttcgccgttgaagagccgaaattatcgtggggatctggacctggaagcgaaatttttccaggcggtgaccggggatgaaaccacccaggcgagccttgatttagccgcagaacgtattttcacgctccatcgcgcctataccgtcaaactgatgcagaccaaagatatgcgcaatgaacacgatctcatctgttcgtgggtttttgacaaggaccccaacattccggtgttcactgaagggactgacaaaatggatcgcgacgatatgcgtgaatccctgacgctcttttataccgagatgggctgggaccctgaactgggatgcccgacgcgagaaacgttgcatcgcctcggtcttgaggatgtcgccgccgatctggccgcgcagaatctgctgccagcgtaa

SEQ ID NO: 73179 - DNA, 627 bp, Citrobacter koseri
atgaaccaggtcgaacgtccaatattagattttggcttaacgcggctcgaatttctgcgtatatcaggaaagggtctggcaggattaactatcgctcccgcgctgctgtcactttttggctgcaaacaggaagacgttgatagcggtacggtaggactgataaacacgcccaaaggggtattagtgacccaacgcgcccgctgcacaggctgccatcgctgcgaaatctcctgcaccaattacaacgatggcgccgtgggctcgtttttctcccgcattaagattcaccgtaattacttctttggcgacaacggcgtcggctccggcggcggcctgtatggcgatttaaactacaccgcagatacctgtcgccagtgtaaggacccgcagtgcatgaaggtctgcccaatcggcgcaattacctggaaacaggacgatggctgcatcgcggttgatcataagcggtgtattggctgtagcgcctgcaccactgcctgcccctggatgatggctaccgtaaacagcgaaacgaaaaaatcgtcaaaatgtgttttatgcggcgagtgcgccagcgcctgtccaacaggggcgctgaaagttatcgagtggaaagatattactgtttga

SEQ ID NO: 73180 - DNA, 210 bp, Citrobacter koseri
atgggaaacctgacaaaagacgacgaactgtaccgtgagatgtgcagagtggttggcaaagtggttctggagatgcgcgacctggggcaagagccgaagcatatcgtgattgcgggagtgttacgaaccgccatggcgaaccagcgactccagcgcagcgaacttgaaaaacaggcgatggaaacggttatcaaagccctggcaggataa

SEQ ID NO: 73181 - DNA, 813 bp, Citrobacter koseri
atgaaaaaatcactgacattactcgccgcagcaaccttaagcgccctgagctttgcctcctgggcggatacgctgaccgttggcgcctctaacgtaccgcatgcggaaatccttgagcaggcgaaaccgattctggcgaaacaggggatcgatctggagattaaacctttccaggattacattctgccgaataccgcgctggctggtcatgaaattgacgccaactacttccagcatatcccgtacctgaatagcgtgttgaaagatcatgcaggtgataaaacctatgatttcgtcagcgccggggcgattcatattgagccgatcggcatctactctaaaaaatacaaatcgctgaaagatctgccggaaggcggcaggatcattatgcgtgacgcggtatctgaagagggacgtattctgtcgatctttgaaaaagagggtgtgatcaaactgaagccggacgtggataaggtcagtgcgcgcatcagcgacatcgtggataacccgaaaaaactgaagttcctgccgaacgtggaagcggcgctgttaccacagatgtacaacaacgatgaaggcgatgcggtggtgattaacgccaactacgctatcgacgcaggtctggacccggttaacgatccgatcgccgttgagagcggtgaaaacaatccgtacgccaacatcattaccgtacaccgtggcgacgagaagaaaaaagacatcgtggcgctggttgacgttctgcactcaaaagagattcaggactggatccgcacgaagtacaaaggcgcggtgattccggtcaataactaa

SEQ ID NO: 73182 - DNA, 669 bp, Citrobacter koseri
atggttgagaatctgtttccccatctgaaatgggaacaactttttgcggcaacgcaggaaacgctctatatgacggcgctttccggtatcgcgacgtttgtgctggggattgtactggggctggcgctatttttgaccgcgcgcggcgggctgtttcagaaccgcacgctgtatagcgtcatttcgctggtggtgaatatttttcgctcgatcccgttcatcattttgatcgtcttgctgatcccgtttaccaaagcgctggtcggcaccattctcggcgcgaacgctgcgctgccggcgctgattgtcggggcggcgccgttttatgcgcgtctggttgaaatcgcactgcgcgaggttgacagaggcgtgattgaagccacgcgttcgatgggcgcacgtctcagcacacttatttttcgggttttactgcctgaatcatcacccgcactggtgtccgggatcaccgtgacgctgattgcgctggtcagttacagcgcgatggccggagtgattggggcaggcggtttagggaacctggcttatctggaaggattccagcgcaaccacaacgacgtcacgctggtggcgacggtgactatcctgatcatcgtcttcattatccagttctgcggcgatgtgatcacctctctgttagataaacgctaa

SEQ ID NO: 73183 - DNA, 1023 bp, Citrobacter koseri
atgatcgtcctgaaaaatatttcgaaagtttttacgcccggcaagctgtccattaccgcagtggataacgttaatctgacggttgaacagggacaaatttacgggattattggctacagcggcgccggaaagagtacgttgattcgtttgctgaacggtctggaaaaaccgaccgtgggcagcgtgaccatcaatggtcatgatatttcagcggcgacaggagagtccctgcgccaggcgaggctgaaaatcagcatggtgtttcagcactttaatttgctgtggtcgcgtaccgtcagcgaaaacatcgctttttctatgcaaatcgcgggcgcgccaaaagcaaaaatcaaggcgcgggtggcggagctgatcgacctggtggggttaaccgggcgtgagaatgcttacccatcccaactgagcggcgggcaaaagcaacgtgtggggattgcccgtgcgctggcaaataacccggatgtgctgctctgcgacgaggcgacttccgcgctggacccgcaaaccaccgatcagattctggatctgctgctcgatattaatcgccgcttccagctcacgattgtgcttattacccacgagatgcatgtggtgcgcaaaatctgcgatcgcgttgcggtgatggaaaacggcagagtggtggaggaaggcgatgtgctgaacgtctttactcatccgcaacagccgattacccggcagtttgtccgccaggtaagtcagtatgccgaagaggaggcgtttaacccgcagctggcgagcgagctgggcgggacggtgattaagctgaccttcaccgggcacagtacgcatcagccgatcgtaggggagcttaccctgcgttacggcctgcctttcaatatcttacacggcaagatgacgcaaaccgcgcatggcgtgtttggccaactgtggctgcacgtcgtggcgacggaagagcaactgaataatattctggcggatttgcggcagagcgatattgaaggtgaggtagtacaacatggttga

SEQ ID NO: 73184 - DNA, 1371 bp, Citrobacter koseri
atgacaacgtttcactccataacagaactgattggcaatacgccgctgcttcagttgcataagctgaatagcagcgtaagcgaactctttttgaaactggagaaccagaatccgggcggttcgattaaagatcgcgtcgcactttctatgatcaatgaagcggaaagacaggggctgctaacgcccggcggcacgattattgaagcgacggcgggcaacaccgggctgggtctggcgctgatcgccgcgcaaaaaggttatgccctgacgctggtcgtgccggacaaaatgagccgtgagaagatcttccatttacgcgcgcttggcgcacaggtggtattaacccgctcagacgtcaacaaaggtcatccggcctattatcaggattacgcacgccgtctggcgcaggagacgcccggcgccttctatattgatcagttcaacaacgccgcgaacccgctggcgcatgcttccaccaccgcccccgaattgtttgcccagatggatggccgcattgacgccatcgtagtcggcgtcggttccggcggcacgctgggcggtttacaggcatggtttcgcgaacactccccgcacacggagttcgtgctggccgaccccgccggttcaatccttgccgatcaggtcgagacaggcacattcggcaccgccggttcctggctggttgaagggattggcgaggactttattccgccgctcgcccacatcgaatccgtttcacaggcctttcgcatcagcgataaagacgccttcgccacggcgcgcgagttgctaagaaccgaaggcatccttgccggttcatcgaccggtacgctgctcgctgccgccctgcgctactgccaggcgcagacgcagccaaagcgcgtggcgaccttcgcctgcgatagcggcaataagtatctctcgaaaatgtttaacgatgactggatgcgccagcaagggctcatcacccggccacaggctggcgatctgagcgacttcatcgccttacgtcatgacgaaggggcaaccgtgaccgctgcgccggacgatacgctggcaaccgtgctggcgcgtatgcgcctgtacgatatttcgcagttgccggttcttcaggaggatcagcttatcggcattatcgacgaatgggatctgattacgcatattcagggcgataacccgcgtttttccctcccggtaaaagaagcgatgacgcgcgaggtagtccggcttgataaacgtgaaccggaaagcgcgctgaaacctatttttgatcgcggccaggtggctgtgattgtcgacaacgaccagttcctcggtctggtcacccgtagcgatgtgctcacccactggcgcaaccgcctggataaataa

SEQ ID NO: 73185 - DNA, 1146 bp, Citrobacter koseri
atgaaatcgtattccacacttagcgtccatagcggaaccttttctgacgcgcacggcgccgttatgccgccgatttatgcgacatcgacgtttgcgcaacccgcgccgggtcagcataccggatatgaatattcacgcagcggcaacccgacgcgccatgcgctggaaaccgccattgccgagctggaaggcggtacgcaaggttatgccttcgcgtccggtctggcgggcatcgctaccgtgcttgaacttctcgataaaaacagccatctggtggcgattgacgatgtctatggcggcacctatcgactgattgaaaatgtgcgccgtcgcagcgccggattacaggtaagctgggtgaaacctgacgatctggccggtattgaagccgcgattcgtcctgatacccgcatgatctgggtagaaacgccgacaaatccgttactaaaactggccgatctggcggccattgccgatatcgcgcgtcgccaccagcttatcagcgtggccgataacaccttcgcttcgccgttgatccatcgtcctcttgatctggggttcgatatcgtggtgcattccgcgactaaatacctgaacggccattcagacgtcgtcgccggactggcggtcgtcggggacaacccggcgctcgcacaacagctgggttatctgcaaaacgccgtcggcggcgtactggacccatttagcagttttctgacattacgcggtattcgcacgctggccttgcgaattgagcggcacagcggcaatgcgctgacgctggcgcaatggctggaaaaacatccggcggtagaacacgtctggtatccggggctggcgtcgcatcctcagcatgcccttgcgcgccagcaaatgtcacagttcggcgggatgatctccatcgtcataaaaggcgatgaccagcgcgccactgacgttatcacgcggctgaaattatttaccctggcggaaagcctgggcggtgttgaaagcctcgtcagccagccgtttaccatgactcacgcctctattccgcttgagcagcgtctggcgaatggcatcaccccgcaattgattcgcctgtcagtgggcattgaagatgttcaggatttgcaggacgatttagctcaggcgctcgccgggtag

SEQ ID NO: 73186 - DNA, 1413 bp, Citrobacter koseri
atgaaaaagacgaaaattgtttgcaccatcggtccgaaaaccgaatctgaagagatgttaaccaaaatgctggacgcaggcatgaacgttatgcgtctgaacttctctcacggtgactatgcagaacacggtcagcgcatcaagaatttgcgcaacgtaatgagcaaaaccggtaaaaaagccgcaatcctgctcgataccaaaggcccggaaatccgtaccattaagctggaaggtggtaatgacgtctccctgaaagcgggccagaccttcactttcacaacggacaaatccgttatcggcaacagcgaaatggttgccgtcacttacgaaggtttcacttctgacctgtccgtaggtaacaccgtactggttgacgatggtctgatcggtatggaagtcaccgcgatcgaaggtaacaaggttatctgtaaagtgctgaacaacggcgacctgggcgaaaacaaaggcgttaacctgccgggcgtttccatcgcgctgccagcactggctgaaaaagacaaacaggatctgatcttcggctgcgaacaaggcgttgactttgttgccgcgtcctttatccgtaagcgttctgacgttgttgaaatccgtgagcacctgaaagcgcacggcggcgagaacatccagatcatctccaagatcgaaaaccaggaaggcctgaacaacttcgatgagatcctcgaagcgtctgacggcatcatggttgctcgtggcgacatgggcgttgagatcccggttgaagaagttatcttcgcgcagaagatgatcatcgaaaaatgtatccgcgcgcgtaaagtcgttatcaccgcgacccagatgctggattccatgatcaagaacccgcgtccgacccgcgcagaagctggcgacgtggcgaacgccatcctcgacggcaccgacgcagtgatgctgtccggcgaatccgcaaaaggaaaatacccgctggaagccgtcaccatcatggcgaccatctgcgagcgtactgaccgcgtgatgaccagccgtctggacttcaacaacgacagccgtaaactgcgcatcaccgaagcggtgtgccgcggcgcggttgaaactgccgaaaaactggaagcgccggtcattgtcgttgcaactcagggcggtaaatctgctcgcgcagtgcgtaaatacttcccggacgccaccatcctggcgctgaccactaacgaagtgaccgcgcgtcagctggtgctgagcaaaggcattgtgccgcagctggtgaaagaaattaactctactgacgacttctaccgtctgggtaaagaagtcgctctacagagcggtctgggccagaaaggcgacgttgtggtcatggtttccggcgcgctggtaccgagcggcacgaccaacaccgcatctgttcacgtcctgtaa

SEQ ID NO: 73187 - DNA, 237 bp, Citrobacter koseri
atgaatcgtactaaactggtactgggcgcggtaatcctgggttctactctgctggctggttgctccagcaacgctaaaatcgatcagctgtcttctgacgttcagactctgaacgctaaagttgaccagctgagcaacgacgtgaacgcaatgcgttccgacgttcaggctgctaaagacgacgcagctcgcgctaaccagcgtctggacaaccaggctactaaataccgtaagtaa

SEQ ID NO: 73188 - DNA, 1005 bp, Citrobacter koseri
atgaaacgtgcgtctctcattgcagttacacttttcggcgcttacagcgcatttcaggcggcctgggcagtggattaccccttgccgccagcaaacagtcgccttgtcgggcagaatcaaacctataccgtgcaagcgggggataaaaacttacaggcgattgcccggcgttttgatactgccgcaatgctgatcctggaggcaaataataccatcgcgccggtccctaaaccggggacgccgattatcattccatctcaactgttattacccgatgcgccgcgtgaaggcattattgtgaacctggcggagttacgactctattatttcccgccgggtgaaaatagtgttcaggtttaccctatcggtattggtttagaggggctggaaacgccggtgatggcgacgcgcgtcgggcaaaaaatcccgaatccgacctggacgccgacggcaggtatccgcaaacgctcgcttgaacgcggcattacgctgccgccggtggtgcccgccgggccaaataatccgttaggacgcttcgccctgcgcctggcatacggcaacggtgagtatctcattcacggcaccaatgccccggacagcgtcgggttacgcgtcagttccggctgtattcggatgaacgcgccggacattaaggcgctatttgcacaggtcagaacgggaacgccggtacgggtgattaacgaaccggtgaaattcgccgtggaaccaaatggaatgcgctacgttgaagtacaccgcccgctgtcgcctgaagaggagcaaaacgtacagacgatgccgtatgtgttgccagcaggctttacgcagtttaaggcgactcaggaggtggatgaacgtctggtggaaaacgcgctgtatcgccgggcgggatatccggttgccgttacatcagggcaggcgccggtagcttctggtcgctcagtggtggagtccgcgcaaaacagccaacccgggagcggcgctgaaacccaggcaacgcagtag

SEQ ID NO: 73189 - DNA, 417 bp, Citrobacter koseri
atggctgcgctaccagataaagaaagattgctgcgtaattttcagcgttgcgccaattgggaagaaaagtatctgtacattattgaactggggcagcgtctggcggaattaaatgagcaggatcgtcgcccggaaaatagtattcagggatgtcagagtcaggtatggattgttatgcgtcagaacgctgacggcgttattgaattgcagggcgacagcgatgcagcaatagtaaaagggttaattgccatcgtcttcattttgtatcatcagatgacgccacaggatattgtgaattttgatgtgcggccgtggtttgaaaaaatggcgctgacgcaacatctcacgccctcccgttcacaagggctggaagcaatgattcgcgcgatccgcgccagagccgcaactcttagctaa

SEQ ID NO: 73190 - DNA, 1221 bp, Citrobacter koseri
atgacatttcccatcgaaaaagtgcgggctgattttcccgtcctgacgcgtgaagtcaacgggctgccgttggcgtatctggatagcgcggccagtgcgcaaaagcccaaccaggtgattgacgctgaggcggagttttaccgtcatggctatgcggcggtgcaccggggcatccatacgctgagcgcgcaggccaccgagaagatggaaaatgtgcgtaaacaggcatcgctgttcattaatgcccgctcagcggaagagctggtgttcgtgcgcgggacgacagagggaatcaaccttgttgccaacagctgggggccggagaatgttcgggctggtgataacattatcatcagcgagatggagcaccacgccaatatcgtcccctggcagatgctgtgcgcgcgtacaggggcggaactgcgcgtcattccgctcaatacggacggcacgttgcagctggatacgctcccgtcgctgtttgatgagcgtacccgactgctggctatcgcgcatgtgtcgaacgtgctgggaacggaaaacccgcttcctgaaatgatcgcgctggcgcatcagtatggcgcgaaagtgctggtcgatggcgcgcaggcggtaatgcaccatgcggtggatgttcaggcgctggattgtgatttttacgttttctccgggcataagctgtatggccccaccggtatcggcgtgctgtatgtccgggaggaactgcttcaggatatgccgccgtgggaaggcggcggttcgatgattgcgaccgttagtctgacggaagggacgacctggaccaaagcgccctggcgttttgaggcggggacgccgaacacgggcggaattattggccttggcgccgccattgaatacgtttgcgcgttagggctggcggaaatcagcgaatatgaacaaaacctgatgcactatgcgctggaacagctggcggacgtgccggagttgacgctatatggcccggctaaccggctgggggtcatcgcctttaatctgggcaaacaccacgcttatgacgtgggcagcttcctcgacaattacggtatcgccgtacgaaccggccatcactgcgcaatgccgctgatgacgtattacaacgttcccgccatgtgccgggcgtcgatagcaatgtataacacccatgaagaagtggatcgtctggcaaccgggctaaaacgtattcatcgcttactgggataa

SEQ ID NO: 73191 - DNA, 1272 bp, Citrobacter koseri
atggctggcttaccgaacagcagtaacgcgctgcaacaatggcaccatctgtttgaggcgcagggcgaatcccgctcggcgcacgcgcagcagcatttacaacagatgctgcgcctggggctgccgacgcgtaagcatgaaaactggaaatacacgccgctggaagggttggtcagtagccagtttgtcagccgttttgccgaggttactcaggaacagcgcgacgcactggcgctggatatcgacgctgtgcgtctggtgtttgttgacggcaagttcagcccgcagcttagcgacagcgctacagccagcggtttcgacattgcgatcaacgacgaacgtcaggcgctgggcgcaccggttcagccggaggttttcctgcatctgacggaaagcctggcgcagagcgtgacgcacattagcgttaagcgcaaccagcggccctctaagccgttgctgctgatgcacatcacgcaggggttggaaggcgatgaggtcaacactgcgcactaccgccaccacctggaactggcggaaggggcagaggcgacggtgatagaacactatgtcagccttaacgcggcacggcactttaccggggcgcgtctgaccatgaatgtggcggcgaatgcgcatctgcaccacatcaaactggcgtttgaaaacccggtgagccaccactttgcccataacgacattctgctggcggcggatgcaagcgcgcacagccacagtttcctgttgggcgatgccgtgctgcgacataacaccagcacccagttaaacggtgaaaacaccacgctgcggattaacagcctggcgatgccggtgaaaaacgaagtgtgtgatacccgtacgtggctggagcacaacaagggttactgcaacagccgtcagttgcataaaaccattgtcagcgataaaggtcgggcggtattcaatggcttgatcaacgtggcgcagcacgccattaaaaccgacggacaaatgaccaataacaatctgctgctcggtaaacttgccgaggtggacaccaaaccgcagctggagatttacgctgatgacgtgaaatgcagccacggggcgacggtaggacggattgatgacgagcagatgttctacctgcgttcacgcgggattggagagcaggatgccagacagatgattctctacgcgtttgccgctgagttgacggaagccctcggcgatgacgcgcttaaacaacaggtgctggcgcgaatagggcttcgcctgccgggaggcatagcatga

SEQ ID NO: 73192 - DNA, 747 bp, Citrobacter koseri
atgttaagcattaaagatttacaggtcagtgtggaagataaagcgattctgcgcggtctggacctcgacgtcagacccggagaagtgcatgccattatggggccgaacggttccgggaagagtacgctttccgcgacgctggcgggccgtgaagattatgaagtggttggcggctctgtcgaatttaaaggcaaagatttactggagctgtcgccagaggatcgggcgggcgaaggcatctttatggcgttccagtatccggtagaaattcctggcgtcagcaaccagtttttcctgcaaacagcgctgaatgccgtgcgcagctatcgtggtcaggagtcgctggatcgttttgattttcaggatctgatggaagagaaaatcgcgcttttgaagatgccggaagatttgctgacccgttcggtgaacgtgggcttctccggcggtgagaagaaacgtaacgatattctgcaaatggcggtgctggagccggaattgtgcatccttgatgagtctgactccgggctggatattgatgcgctgaaaattgtcgcggaaggcgtcaactcgctgcgtgacggtaaacgctcattcattatcgtgacgcactatcagcgtattctggactacatcaaacctgattacgtccacgtcctgtatcaggggcggattgtgaagtccggcgatttcactctggtcaaacaactggaggagcaaggatatggctggcttaccgaacagcagtaa

SEQ ID NO: 73193 - DNA, 1488 bp, Citrobacter koseri
atgtctcgtaatactgaagcaactgacgatgtcaaaacctggaccggtggtccactgaattataaagaaggcttcttcacccagttacagactgacgagctggcaaaaggcatcagcgaagaggtcgtgcgtgcgatttccaccaagagaaatgagccggagtggatgctggagtttcgccttaatgcgtacaaagcctggcttgagatggaagagccgcactggctgaaagcgcactacgataagctgaattatcaggattacagttattactctgcgccatcgtgcggtaactgtgatgagacgtgcgcgtcagaaccgggtgcagtacagcaaaccggtgcgaatgcgtttctcagcaaagaggtggaagacgccttcgaacagcttggcgtaccggtacgtgagggtaaagaggtggcggtggatgccattttcgactccgtttccgttgccactacctaccgggaaaagctggcggaacagggcatcatcttctgttcgtttggcgaggcgattcacgatcaccctgagctggtgaagaaatatctgggcaccgtggtgccgggtaatgacaacttttttgctgcgctgaacgctgcggtagcgtctgacggcaccttcatttatgtgccgaaaggcgttcgttgcccgatggagctgtcgacctatttccgaatcaacgcggaaaaaacagggcagttcgaacgcaccattctggtggcggatgagggcagctacgtcagctacatcgaagggtgttctgcgccagtgcgcgacagctaccagctgcacgcggcggtggtagaggtgatcatccacaaagatgccgaagtaaaatattccaccgtgcaaaactggttccccggcgataacaacaccggcgggatactgaacttcgtcaccaagcgcgcgctgtgcgaaggtgaaaacagcaagatgtcgtggacgcagtccgaaacgggatcggccatcacctggaaatacccgagctgcattctgcgcggcgataactccatcggtgagttttactctgtggcgctgaccagcggtcatcagcaggccgacaccggcaccaaaatgatccacatcggtaagaacaccaaatcgaccattatttcaaaagggatctccgccgggaatagccagaacagctatcgcgggctggtgaagatcatgccgacggcaaccaacgcccgtaactttacccagtgcgactcaatgctgattggcgcggactgcggtgcgcacaccttcccgtatgtcgagtgtcgtaataacagcgcccagcttgagcacgaggcgacgacgtcgcggatcggtgaagatcagctcttttactgcctgcaacgcggcatcagcgaagaggatgccatctcgatgattgttaatggcttctgtaaagacgtcttctctgaactgccgctggaatttgccgttgaagcgcaaaaattgctggcaatcagccttgaacacagcgtcggttaa

SEQ ID NO: 73194 - DNA, 369 bp, Citrobacter koseri
atggaattgcattcaggaacatttaatccagacgattttgcatggcgtggtctgacgctaacgcctgaggcggcggcgcatattcgtgacctggtcgcgaagcaacccggcatgcttggcgtgcgtttaggcgtgaagcagacggggtgcgcgggatttggttacgtgctggataccgtcagcgagccggaaaaggacgatctgttatttgaaacggagggcgcgaggttgtacgtgccgcttcaggccatgccgtttattgacgggacagaggtcgattatgtgcgcgaaggattaaaccagttatttaaatttcataacccgaaagcccagaacgaatgcggctgtggcgaaagcttcggggtatag

SEQ ID NO: 73195 - DNA, 894 bp, Citrobacter koseri
atggacagagtgatggcggcaacggtgtttaaccatatctgcgatttgggtagcctgagcgcggctgcgcgcgcattagggatctccaggccgatggtgagccgttatctggatgaaatggagaaatgggccggagccagacttattcatcgttcgtcgcgccgcctgacgatcacgcctgccggagaagacgcgttgatgaaaacgcgaacgctggcgcggctttccctggatattgcgggggcgaccgggcgagaggtgccgtccggcacgttgcgcgtcgcctgcgcccatttcaccgcgatgcatattcttgccccgatgctgcccacttttttagcgcgttatcctgaattgcgcattgaagtggagattaataatcagcctgtcagtttagtgggggagcgtattgatgtggcgatacgcattaccgataaccctgagccagggacaattgcgcgtcggcttggtgactgtgagtctgtgctctgcgcgtctcctgactatctgcatcgctatggcacgccgcagacgccggaggcgctggcgcaacacaattgcctctattacagcggatttgctggaaaatcctggcattttctggatgagcagggagaaccgatctctgttgcgatcaagggcaacctgagcgccggaatctcttcgcttttgtgtgaagcggcgctggcagggatggggattgcgctggtgccggaaaaagaggcgcgagaggggctggcgcaggagaaactggttcgtttgttgccccatctacaaccgcggcaattggccgtatacgggttatacctttcccgtgagcatcagcccgccgcgctacgcctgttccttgaggcggtgcagggcgcgatgcgcgacggtgaagcctgttcctga

SEQ ID NO: 73196 - DNA, 852 bp, Citrobacter koseri
atgaaaatcaaaacgctggcacttctgctgtcgctgactagcgcgccattgttcgccgccccgctgcaactcgacgtctataatccgcaggaaaacgcgattttcccggtctcttccacgctggtctctggccctaaagaagccattttattcgacgcgcagttcagtaccaaagacggggaaaagctggtcgaaatgattaaaaagagcggcaaatcgctgaaagccatcgtgattacctccggcgatccagatttctattttggtctggaaccgattgtaaaagccttcccgaacgtgaaagttctggcgacgccgcatgtggtggaacacattcgcgcaacgaaagacgccaaactgcaatactggggcccgcaaatgaaagatggcgcgccagcggcgctcaccatcccgcaggcaaccaccgagacacaatttacgattgatggggaaacgctggaactgcgccacccgaacgattacgccgcttacgtctgggtcccggctaaccgcgcaatacttggcggaacgggaatcgcatccggtatccatgtctggacggcggatacccagtctcctgagcagcgtgcggcctggcgtcatgtgttgacagagatgcacagtttgcagccgacccaggtgattccgggtcactatatcggtgaacgtccagcaggcgatgccgctatacgcttcacgcaggattatctgcaatcctttgagcaagcgcttgaggcgaaaaaagggtcagagtatgtcatcaaaacgatgaccgccgcctggcctggcctcgctgacgaaagttccctgacgctgagcgcgaaagtgaataccggtgaaatgaagtggtaa

SEQ ID NO: 73197 - DNA, 189 bp, Citrobacter koseri
atgtctaccgatttagacccaacccaactggcaattgaatttttacgccgtgataaaacagagctttctccagcccagtatttgaagcgcttaaaacaattagagctggaatttgccgatttactcacgctctcttcctctgagctaaaagaagagatttactttgcctggcgtctgggcgttcattga

SEQ ID NO: 73198 - DNA, 411 bp, Citrobacter koseri
atgatctggaaacgtaaagtcacgctcgaagcgctgaacgctctgggcgaagggaacatggtggggctactggatattcgctttgagcatattagcgacgatacgctggaagcaacaatgccggtggatagccgtacaaagcaaccttttggtctgctacacggcggcgcgtccgttgtgctggctgaaagtatcggctcggttgcgggctatctgtgcacgcagggcgaacagaaagtcgtggggctggaggtgaatgccaaccacgttcgctcagcgcgcgaagggcgcgtcagaggggtgtgcaaagcgctgcataccggctctcgtcatcaggtctggcagatcgatatttttgatgagcaggggcggctgtgctgttcttcacgtctgacaaccgccgttgtgtga

SEQ ID NO: 73199 - DNA, 3057 bp, Citrobacter koseri
atgattccacagatttctcaggcacctggcgtcgttcagctggtgctcaattttttgcaggcgctggagcagcaagggtttaccggcgatacggcaacgaattacgccgatcgtctgacaatgtcgacagataacagtatctatcagcttcttcctgatgctgtggttttcccgcgttcaacggcggatgtggcgcttatcgcccgtctggcggcagagtcgcgcttcgcctcattgatttttaccccgcgcggcggcggcaccggcaccaatggtcaggcgctgaaccagggcattatcgttgatatgtcccgctatatgagccgcattattgaaattaacccggaagagggctgggtacgggtcgaagccggggtgatcaaagatcaactcaatcagtatctgaagccgtatggctacttctttgccccggagctttcgaccagtaaccgcgcaaccctcggggggatgatcaataccgatgcgtccggtcaggggtcgttagtttacggtaagacatccgatcatgtgctgggcgttcgcgcggtattgctggggggcgatattctggatacccaggcaatgccggtcgaacttgcggaaacgctcggtaaaagcaacaccgcgatcggtcgcatctataacaccgtataccagcgttgtcgggaaaaccgacaactgattattgataagtttcccagactcaaccgcttcttaacgggctacgacttacgccatgtctttaacgatgagatgacggagtttgacttaacgcgcgtgctgaccggttctgaaggcacgctggcgtttatcacggaagcgcgtctggatattactccactgcctaaagttcgccgtctggtgaacgtcaaatatgactcttttgattccgcgttgcgtaacgcgccctttatggtcgaggcgcgggcgctctcggtggaaaccgtcgattctaaagtgcttaatctggcgcgggaggacatcgtctggcattccgtcagtgagctgattaccgatgtgcctgataaagagatgctgggcctgaacatcgtcgagttcgccggggatgacgaagcggctattgatgctcaggtgagcgcgttgtgccagcgtctggatgagctgattgctcgccaggaagccggggtgatcggctggcagctgtgcgcggagctggcgggcgtggagcgtatctatgccatgcggaaaaaagcggttggtctgttgggtaatgccaaaggcgcggccaaaccgattccgtttgcggaagatacctgcgtgccgccggagcatctggccgactatattgctgaattccgcgcgctgctcgacggtcatggcttaagttatggcatgttcgggcatgttgatgccggggtgctgcacgtcagacccgcgctggatatgtgcgatccgcaacaggaaattctgatgaagagtctttccgatgatgtggtggcgctcaccgcgaaatatggcggtctgctgtggggcgagcacggcaaaggttttcgcgctgaatatagcccggcgttttttggcgagcagctttatggcgaactacgcaaagtgaaggcggcgttcgacccgcaaaaccgcctgaaccccggaaaaatttgtccgccggaaggcattgatgcgccgatgatgaaggtcgatgcggtgaaacgcggtacttacgatcggcagattccactggcggtgcgtcaggtctggcgcggggcgatggagtgtaacggcaatggcctgtgcttcaactttgacgccaaaagcccgatgtgcccgtcaatgaaaatcagcctgaatcgcattcactctcccaaagggcgcgcgacgctggtgcgtgaatggttacgcctgctggccgaccgtggggttgatccgctacagctggaaaaagagctgccggaaaaacgcgccagtcttcggacgttaattgcccgtacccgcaacagctggcacgctcgtaaaggcgaatatgatttctcccatgaggtgaaggaggcgatgtcgggttgcctggcgtgcaaagcctgctcgacacaatgtccgattaaaatagacgtgccggagttccgctcacgcttcctggcgctttatcacacgcgctacctgcgtccgctgcgcgatcatatggtggcgacggtcgaaagctatgcgccattaatggcgcgggcgccgaaaacctttaacttctttctcaatcagccgttggtgcgaaacctcgcgaagaaacatatcggcatggtggatttgccgctactttcgacgccgtcgctgcaacagcaaatggtcgggcaccgttccgccaatatgacgctggaacagcttgaactcctgagccaggagcaaaaagagcgtacggtgctggtggtgcaggacccgtttaccagttactacgatgcgcaggtggtggcggattttatccggctggtggaaaagctcggcattcagcctgtattgctgccgttctcgccaaatggcaaggcccagcacatcaaagggttccttaaccgatttgcgaagacggcgaagaaaacggccgaatttctcaatcgggtggcgcagttgcgtatcccgatggtcggtgtcgacccggcgctggtgctttgctatcgtgatgaatacaaacaaaccctcggcgaacagcgtggtgatttccacgtacagctggtgaatgagtggctgccgacggtgctggcgtcccgacagcctcttgccgtgagcggtgagccctggtatttctttgggcattgtaccgaagtgacggcattgcctggcgcaccggcgcagtgggcggccatttttgcgcgcttaggggcgaagctggagagcgtcagcgtaggctgctgcggcatggcgggtacttacggccatgaagtgaaaaatcatgaaaattcgctggggatctatgcgctgtcgtggcaacaggcgatggcgcgactgccgcgcaatcgctgcctggcgaccggttactcttgccgcagccaggtaaaacgcgttgaaggcaccggggttcgccatccgttacaggcactactggagattattggatga

SEQ ID NO: 73200 - DNA, 1113 bp, Citrobacter koseri
atggtaaatcttcgtcagcccagggatatcgcgcaagtgctgctgtcggtgctgtttttagccatcatgatcgtggcctgcttgtggattgtgcgtccctttgtccttggttttgcatgggcgggaacgatcgttattgcgacctggcccgttttgttacgtttacagaaaatactctggggccgccgttctctggccgttctggttatgacgctattgttggttctgctgttcattattcccatcgccctgctggtcaacagcatcgtggacggtagcggcccgctcatccacgccgtcaccgccggcgacatgacgttgcccgacctggcctggttaaacagtattccgctgattggcgccaaattgtatgccgggtggcacaacctgctggatatgggcggcacggcgatcatggcgaaagtgcgtccttatattggcaccaccacgacctggtttgtgggtcaggccgcgcatatcggtcgctttatgatgcactgtggtctgatgctgctgttcagcgccctgctgtactggcgcggcgaacaggtggcattgggcatccgccacttcgccagtcgtctggccgcgaaacgcggcgatgccgccgtgctgctggcggcccaggccatccgcgccgttgcattgggtgtggttgtcaccgcgctggttcaggcaattctcggcgggattggcctcgccatttccggcgtgccttacgcaacgctgctgacggtcgtcatgatcctctcctgcctggtgcaactggggccgttaccggtgttaatcccggcaatcatttggctgtactggacaggcgatacgacctggggcacggtgctgctggtatggagctgcgtggtcggtacgctggataacgtgattcgcccggtattgattcgtatgggcgctgacctgccgctgatcctgattctctctggcgttatcggcgggctgattgcctttggaatgatcggtctgtttatcggtccggtattgctggcggtttcctggcgtctgttctccgcatgggtgcatgaagtgcccgcgccgggaaacgaccctgacgaactcctcgaagaactgggggagattgaggacagccataaataa

SEQ ID NO: 73201 - DNA, 2379 bp, Citrobacter koseri
atgtccaacaatggctcgtcaccgctggtgctttggtataaccaactcggcatgaatgatgtagacagagttgggggcaaaaatgcctccctgggtgaaatgattactaacctttccggtatgggtgtttccgtaccgaatggttttgcaacgaccgccgatgcgtttaaccagtttctggatcaaagcggcgtaaaccagcgtatttatgaactgctggatcaaacggatattgacgatgtcaccgcgctggcgaaggccggcgcgcagatccgccagtggattatcgacactcctttccagccagagctggaaaacgctattcgcgatgcttatgcacagctctctgcggatgatgcgcaggcgtctttcgccgtgcgctcgtccgcaacggctgaagatatgccggatgcctctttcgccggccagcaggaaaccttcctcaacgtgcagggtttcgatgcggtgctggtggcggtgaaacatgtttttgcctcgctgtttaatgaccgcgctatctcttatcgcgttcaccaggggtatgaccatcgcggcgtcgcgctctccgctggcgtacagcggatggtgcgctccgacctggcttcgtccggggttatgttctctattgataccgagtccggtttcgatcaggtggtgtttatcacttcagcctgggggctgggcgagatggtagtgcagggcgcagtcaacccggatgaattctacgtgcataaaccgacgctggcggcgaatcgcccggcgatcgttcgtcgcacgatggggtcgaaaaaaatccgaatggtttacgcgccaacccaggagcacggcaagcaggtcaaaattgaagatgtgccgcaggaacagcgcgatatcttctcgctgaccaacgaagaagtgcaggaactggcgaaacaggccgtacagattgagaaacactacggtcgcccgatggatatcgaatgggcgaaagacggccataccggcaaactgtttattgtacaggctcgcccggaaaccgtccgttctcgtggtcaggtaatggagcgctacacgctgcatgcgcaggggaaagtggtcgcggaaggccgcgccatcggacatcgcattggcgcgggggcggttaaagtcatccacgacattagcgaaatgaaccgtatccagcctggcgacgtgctggtgactgacatgaccgacccggactgggaaccgatcatgaagaaagcggcggccatcgtgaccaaccgtggcggtcgtacctgccacgcggccattattgcccgtgaactggggattccggcggttgtcggctgcggcgacgcgacggaacgcatgaaggatgatgaaaacgtcaccgtttcttgcgccgaaggcgataccggctatgtctatgcagacctgctcgacttcagcgtcaaaagttcaagcgtggacaccatgcccgatctgccgttgaaagtcatgatgaacgtcggtaacccggatcgcgcctttgacttcgcctgcctgccgaatgaaggcgttggcctggcgcgtctcgaatttattatcaaccgaatgattggcgtgcaccctcgcgcactgctggaatttgatgaccaggacgcgaaactgcaaaacgaaatccgcgagatgatgaaaggcttcgattcaccgcgtgagttctatgtcggtcgtctgacagagggcattgcgacgctgggcgcggcattttatccgaaacgcgttattgtgcgcctgtcggatttcaaatcgaacgaatacgccaacctggtgggcggcgagcgttacgaacccgatgaagagaacccgatgctgggcttccgtggcgccggtcgctatgtctccgacagtttccgcgattgcttcgcgctggaatgtgaagcggtgaaacgcgtgcgcaacgatatgggactgaccaacgtggagatcatgatcccgttcgtacgtaccgttgagcaggcgaaagcggtagttgacgagctggcgcgtcaggggctgaaacggggtgagaacgggctgaagatcatcatgatgtgtgagattccgtccaacgccctgttggctgaacaattcctggagcactttgacggcttctcgattggttctaacgacatgacgcagctggcgctgggtctggatcgcgactccggcgtggtttctgaactgttcgatgagcgcaatgaggcggtgaaagcgctgctgtcgatggcgatccgcgcggcgaagaaacaaggcaagtatgttggcatctgtggtcaggggccgtccgatcacgaggacttcgccgcctggctgatggaagagggaatcgacagcctgtcgctgaacccggacaccgtcgtacagacctggttgagtctggctgaactgaaaaaataa

SEQ ID NO: 73202 - DNA, 834 bp, Citrobacter koseri
atggataatgttgttgatcgccatgttttttatatttccgatggtacggccatcaccgccgaggttttgggtcatgcggtgatgtcgcaattccctgtgaccatcagcagcattacgctgccgttcgttgaaaacgagagtcgcgccagggccgtgaaagatcagatcgacgcgatttatcagcaaactggcgtgcgtccgctggtgttctattcgattgttctgccggaaattcgcgccatcatcttacaaagcgaagggttctgtcaggacatcgtgcaggcgctggtggcgccgctacagcaggaaatgaagctcgacccaacgccaatcgcgcatcgcacccacgggcttaaccccgggaacctcaacaagtatgacgcgcgtatcgcggcaatcgactatacccttgcgcacgacgatgggatctccttgcgcaatctggatcaggcgcaggtgatcctgctgggggtttcacgctgcggaaaaacgccgaccagcctctatctggcgatgcaatttggcatccgggcggcgaactacccctttattgctgacgatatggataacctggtgttgcccacgtcgcttaaaccgctacagcataagctttttggcctgaccattgacccggaacgtctggcggcaatccgcgaggaacgccgtgaaaacagccgctacgcatcgctacgccagtgccggatggaggttgcggaagttgaagcgctctatcgtaaaaatcagatcccttgcctgaacagtactaactattcggtagaagaaattgccaccaagattctcgacatcatggggctgaatcgtcgaatgtactaa

SEQ ID NO: 73203 - DNA, 1047 bp, Citrobacter koseri
atgaacagaaccgacgaactgcgtaccgcgcgtattgacagcctggtcacccctgctgagctagcgctacgtcatcctgtatcatcctccgtcgccagccacgttactgactcccgacgccggattgaaaaaatattaaatggtgaagatcgccgcctgctggtgataatcggcccctgctcgattcacgatctggacgctgcgatggaatacgcaacgcgcttgcaaacgttgcgcaacacgcatcaggcgcgtctggaaatcgttatgcgcacctattttgaaaaaccgcgcacggttgtgggctggaaaggcctcatctccgatcccgatttaaatggcagttaccgcgtaaatcatggcctcgaactggcgcgcaagctgctgttgcaggtcaatgagttgggtgtccccaccgccaccgaatttctcgacatggtcaccggccagtttattgccgatttgatcagttggggcgccattggcgcgcgcacgacggaaagccagattcaccgtgaaatggcttccgcgctctcctgcccggttgggtttaaaaacgggaccgatggcaacacgcgcatcgccgttgatgcgattcgcgcgtcgcgcgccagccatatgttcctctcgccggataaaactggccagatgacgatttatcagaccagcgggaacccgtacggccatatcatcatgcgcggcggtaaaaaaccgaattaccacgcggaagacatcgctgccgcctgcgatacgctgcatgagtttggtctgccggaacacctggtggtggacttcagccacggtaactgccagaagcagcatcgccgccagttagaagtttgtgatgatatctgccagcaaatccgtaacggttctaccgcaattgccgggatcatggccgaaagtttcctgcgtgaaggtacgcagaaaatcgtcagtggtcagccgctggtgtacggtcagtccattaccgacccttgcctgaactgggaagatactgaattactgttagaaaaacttgcctcagcggttgatagccgtttttga

SEQ ID NO: 73204 - DNA, 192 bp, Citrobacter koseri
atgccacttatggacgacattgagttacttcattttaaggaaagagacagcgtgcccccttcccctgctgccgagcggcgtatcagcagccagacattgttaggccctgaaggcaaagtcatcatcgatcatgacggccaggaatacctgctgcgcaagacgcaggcaggtaagttgctgttgaccaagtag

SEQ ID NO: 73205 - DNA, 1443 bp, Citrobacter koseri
atgaccctgtcttttacatcctgctggcgtgacgaactgccagccacatatacagcactttctcctactcctctgagtaatgcccgcctgatttggcataacgatgcgctggcgcagcagctggcgataccaccttcgttgtttgctatggaaaacggcgcaggcgtatggggcggcgagtcattactgcccggcatgtcgcctctggctcaggtttatagcggccatcagtttggcgtctgggccggccagctcggtgatggacgcggtattctgttaggcgaacaactgctggcggacggcagtacgcttgactggcacctgaaaggcgccggactaacgccatactcccgcatgggcgacgggcgagcagtgctgcgctcaacgatccgtgaaagtctggccagcgaggcgatgcactatcttggcatccccacaacgcgggcgctgtctatcgtcaccagtgacacgcctgtttacagggaaacggttgaatccggcgcgatgctcatgcgtctggcgcagagccatatgcgtttcggtcatttcgaacatttttactatcggcgtgagccggataaagtccgtcagctggccgattttgcgattcgccattactggccgcaatttcagacggaagaggacaagtatgcgctctggttccgggacgtagtggcgcgcacggcgaggttgattgctgactggcaaacggtaggttttgcgcatggcgtgatgaacaccgataacatgtctgtactggggctgacgatagattatggtcctttcggtttcctggatgattatcagccagggtttatctgtaaccactccgatcaccaggggcgctatagcttcgataatcaaccggctgtcggattgtggaatctgcaacgcctggcgcaaaccctgtcgccgtttatgccggtcgatacgctgaatgatgcgctggatggctatcagctggcgttgctcacgcactacgggcagcgcatgcggcaaaaactgggcttctttaccgaacaaaaagaggacaacgcgcttctcaacgagcttttcgccctgatggcacgcgaaggcagcgattatagccgaacgttccgtatgttgagtcagactgagcaacagagcgcggcatcgccgctgcgtgacgaatttatcgatcgcgcggcctttgacgggtggttcagccgttaccgggcgcgtttacagcaggagcaggtggatgatgcaacgcgtcaacagcacatgcagcgcgtgaatcctgcggtggtgctgcgcaactggctggcgcaacgcgcgatagccagcgctgagcagggggatatgggcgaattacatcaactgcatcaggttctgcgcgacccctttaccgacagagatgacgattatgtcaaccgtccgccggactggggtaaacggctggaagtcagttgctcaagctga

SEQ ID NO: 73206 - DNA, 714 bp, Citrobacter koseri
atgattgtttcactggacaacttttatcattctcacctttattttgttcctgcccgaaccgagaaagagaaactcgtcggtctggagattgttgcaaactttgtcactgaagacggtaatgtccgtatgccgacggagctggtcatgccgcgcctgtcagcagaagaacagcgttgtctgttcgaagaaaaactcgcattgctggaaacgtgccaacatttttttattcaacataaacttattgcctggattaatttaacgccagccgtcgtcgcatcattattatcagacggagagtttgtatcccatgtaaggcgctttccatttttggaactgatgattaatgagaattatcctgaattaagtcttgggaaagagaatcaaattctggctgagttagccggacgatttcccctcatccttgccaatttcggcgctggcgatacatcgataaaagcgatctttgatggtctcttcaaacgcgtcgcgctggataaaaactttgtccagcaaagatccgcaagtctttcttttgaaccctttatgcaggctattatttcgcagatatcaccgtgctgtgattcgataatgattgcgggtattgatactgaagagatgctggcgcggatatcatcaatgggatttagcgcgctgcaaggatgtttatggcctgccgtgccagcgagccaggttacgacgctggttcagggataa

SEQ ID NO: 73207 - DNA, 465 bp, Citrobacter koseri
atgcgcttttggcttcttcttatcgcagcactgtttttggcagggtgtagcagccatcgtgcgccagcacctaacgccaggctttcggattccattatggttatcgcgggcctgaacgatcagctacagtcctggagaggtacaccgtatcgctatggcggaatgagccgtagcggggtggactgctcgggatttgtgttgatgacgatgcgcgacaaatttgatttacaactgccgcgtgaaacgcgccaacagtcaaaaattggtacggaaatcgacaaagatgaactgctgcccggcgacctggtcttttttaaaaccggatcgggggaaagtggtttgcacgtcggcatttatgataccaacaatcaatttattcatgcgtctaccagccgtggcgtgatgcgctcatcgctcgacaatgtctactggcggaaaaatttctggcaggcgagacgtatttaa

SEQ ID NO: 73208 - DNA, 750 bp, Citrobacter koseri
atgatctcgttgatgcagttacaggatgttgccgaaacgacgcgtctggggccgctttccggcgacgttaagcctggcgagattcttcacctcgtggggccgaatggggcagggaaaagtacgctgctggcgcgtatggcgggcttaaccttcggggaaggcaccgtcatattcgacggcgcgtcgctggagacatggcctgcggcgaaactggctcaacatcgggcctatctcgcgcagcagcagaatcccccattttcaatgccggtctggcatttcctgacgctgcatcaacctgataaaacgcaaacggtcctgctgaatgacgttgcgcaggcgcttgggctgagcgacaagctggggcggagcgcgaatcaactctccggcggcgagtggcagcgtgtacgtctggcggcggtgatattgcaaattcaccctcacgctaacccgcacgggcagcttctgctactggatgaaccgatgaacagtctggacgttgcgcaacaaaacgcgctggataggctgctgagccagctatgcagccagggtatcgccatcgtgatgagcagccatgaccttaaccatactctgcgccacgcgcatcgcgcctggttgctgaaacaggggaaattgatcgccagcgggcggcgtgacgaggtgctgacgccgccaaatctggcccgggcatacggcatgaacttccgtcggctggacgttgaaggccacagaatgctcatatcaaccacttaa

SEQ ID NO: 73209 - DNA, 552 bp, Citrobacter koseri
atgcaagataccattctcaacactgaagtgacgacgatcgacggggatgtcaccacgcttgagaagtacgccggaaacgtactgctggtggttaatgtggcctcgaaatgtggcttaacgccacaatacgaacagctggagaatattcagaaagcctgggccgaccagggctttacggtgttaggttttccctgcaaccagtttcttggtcaggaacctggcactgaagaggagattaaaacctattgcagcaccacctggggcgtcacattcccgatgttcagcaaggttgacgtcaatggtgagaaccgccatccactgtatcagaagttgattgccgcagcgcctgccgccgttgcgccggaaggtagcggtttctatgagcgcatggcgagtaaaggccgcgcgccgctttaccaggacgatattttgtggaactttgagaagtttttaatcggcagggatggacaggtcgtacagcgtttctcaccggacatgacgcctgaagatccgggtatggtggaaagtatcaaaatcgcgttggcaaaataa

SEQ ID NO: 73210 - DNA, 879 bp, Citrobacter koseri
atgtggcaacggatgaaatggggtttgtgtgtgctggcggcactcagcggttctgcgatggccgcaccgctgacggcgcaatacgtgtcgactatcgcgacgcaggaagaacagcgtcttcatgcccggattggcattgcggtacttgatacggcgaccaacagtatcacccattatcggggagaagaacggttcccgttaaacagtacgcacaagccgctgttatgcgcagcgttattacgcgaagtcgacaggaaggcgctggcgctttctgcttcaacgcagtttgaatcctcgcagctggtggagtattcgccgattactgaaaaacatgtggcgccagacgccatgagctgggcgcaattgtgcagcgcggcggtaagctacagcgataacacggccgccaatctcatcgccaggaagctcaacgggccgcaggccgtcacgcagtttttgcgtgattcgggggatacaataacccgcctcgatcgctatgagcctgaactgaacagcgccattcccggcgatgaacgcgactccacgacgcctgtcgcgatagcgcagacgctcaatacgctactgctggggaacgtgttgcagctatcctcaagagagcagcttatgcaatggatgcgggacgacaaagtggctgacggtctgctgcgttcggtcttgccggacggctggaaaatcgcggataaaaccggggcgggcgacaatggctcgcgttctattgttagcgttgtctggccgacatcacaaaaacctctgctcgtggttatctatattacacaaactccggcgacaatggcgcagcgtgacgccgcgattgtccgcatcggggagtcgctgttttcaacactcgcagtctatgattaa

SEQ ID NO: 73211 - DNA, 981 bp, Citrobacter koseri
atgctgacttttgcctgccaacaacagcgccgcaatgtgcgctggttatccagtctgtcggtgcttatgctgctggcagtggtattaagcctgtgcgccggagatcagtggatagcccctggcgactggttcagcgcccgtggtgaactgtttgtctggcagatacgactccctcgcacgcttgctgttctgctggtaggcgccgcgctggcgctgtcaggcgcggtaatgcaggcgttatttgaaaacccgcttgccgagcccggattgcttggcgtctccaacggcgctggcgtgggccttattgccgcagtgctactggggcaaggtcagttacccggctgggcgctggggatttgcgctattgccggcgcgcttatcatcacacttattctcctgcgatttgcccgtcgacatttatcaaccagccgcctgctgctggcgggcgttgcgcttggcattatttgcagcgcgatgatgacgtgggccatctatttttcaacctccttcgacctgcgccagttgatgtactggatgatgggcggattcggcggggtggactggcagcaggcctggctgatgattgccctgatcccggtttcactctggatttgctgccagtcgcagccgatgaatattctggcgctgggcgaaacgtccgcgcgtcagctggggctgccgctgtggttctggcgcaatttgctggtggtcgccacgggctggatggtcggcgttagcgttgcgctcgcgggttcgattgggtttatcggcctggtgatcccacatatcttacggctttgcggtctgagcgatcatcgcgctttgctgccgggctgcgcgctggcgggggcgatagctctgctgctggcggatgtcatcgcccgtctggcgctggcgtcggcggaactgcctatcggcgtagtgacggcgacgatgggggcgccggtcttcatctggctattattaaaatccaggcgctag

SEQ ID NO: 73212 - DNA, 300 bp, Citrobacter koseri
atggcgcttacaaaagctgaaatgtcagaatatctgtttgataagcttgggcttagcaagcgggatgccaaagaactggtcgagctgtttttcgaggagattcgtcgtgctctggaaaacggtgagcaggtgaaactctctggttttggtaacttcgatctgcgtgataagaatcaacgtccgggacgtaacccgaaaacgggcgaagatattcccattacagcacggcgcgtggtgaccttcagacccggacagaagttgaaaagccgggttgaaaacgcttcgcccaaagaagagtaa

SEQ ID NO: 73213 - DNA, 2388 bp, Citrobacter koseri
atgaaattcagtgaactgtggttacgcgaatgggtgaacccggcaatcgacagcgatgcgctgtcggatcagattacgatggcgggcctggaagtggatggcgttgacgccgtcgccggtgagttcaacggcgtggttgtgggtgaagtggtggagtgcggccagcacccgaacgcagataaactgcgcgttacgaaagtgaacgtgggcggcgaacgcctgctggatatcgtctgtggcgcgcctaactgccgtcaggggctgaaagtagccgttgcaactatcggcgcggttctgccgggcgatttcaaaatcaaagccgctaaactgcgcggcgagccgtcggaagggatgctgtgctccttctccgaactggggatttccgacgaccatagcggcatcatcgaattgccggcggatgcgccgatcggaaccgatatccgcgaatacctgaagcttgacgataacaccattgaaatcagcgtgacgccgaaccgcaccgactgcttagggatcatcggtgtggcgcgtgatgtcgctgtcctgaacaaaatcgcgctggttgagccggagatcgcgcctgttgcagccaccatcaatgacacgctgccgatcgcggttgaagcaccggatgcctgcccgcgctacctgggtcgcgtggtgaaaggcattaatgttaaagcgcctacgccgctgtggatgaaagagaagctgcgtcgctgcggcattcgttccattgatgctgtcgttgacgtcaccaactatgtactgcttgaactgggtcagccgatgcatgcctttgacaaagaccgtattgaaggcggtattgtcgtgcgtatggccaaagagggcgaaaccctggtgctgctggacggcacagaagcgaagctgagcaccgatacgctggtgatcgcggatcaccacaaagcgctggcgatgggcggtatctttggcggcgagcattccggcgtgaatgaggaaacgcaaaacgtgctgctggaatgcgcgttctttagcccgctgtctattaccggtcgtgcgcgtcgccacggtctgcataccgatgcttcccaccgctatgagcgtggtgtggatccggcgttgcagtacaaagcaatggagcgcgccacccgcctgttgatcgacatttgcggcggcgaagccggcccggttatcgacgtcacgaatgacgccacgctgccgaaacgcgcgaccattacgcttcgtcgtagcaagctggatcgtctgatcgggcatcacattgccgatgaacaggtgagcgatattctgcgtcgtctgggctgcgaagtgactgaaggtcaggacgagtggaaagcggtcgcgccgagctggcgtttcgacatggagattgaagaagatctggtcgaagaagtggcccgcgtgtatggctacaacaacattcctgatgagccgattcaggcgggtttaatcatggggactcaccgtgaagccaacttgtcgctgaagcgtgtgaaaaccatgctcaatgacaaaggctaccaggaagtgatcacctatagctttgtcgatccgaaggttcagcaactgctgcatccgggcgaagaagcgctgttgctgccaagtccgatctccattgagatgtcggcgatgcgtctctcactgtggaccggcctgctgtcaacggtggtctataaccagaaccgtcagcagaaccgcgttcgtatcttcgaaaccggtctgcgtttcgtgccggatacccaggcaaatctgggcattcgtcaggatttgatgctggcaggggtgatttgcggcaaccgttatgacgagcactggaatctggcgaaagagaccgttgatttctatgatctgaaaggcgatctggaagcggtgctggatctcaccggcaaactggccgacattcagttcagggcggaagcgaatccggcgctgcatcctgggcagtccgcggcgatttatctgaaaggtgaacgcattggttttattggggttgttcatcctgagctggaacgtaaactggatctgaacggtcgcactctggtgtttgaactggagtggaataagctcgcagaccgcgtggtgcctcaggcgcgcgagatttcgcgcttcccggctaaccgtcgcgacatcgcggtggtggtcgcagaaaacgttcccgcagcggatattttatccgagtgtaagaaagttggcgtaaatcaggtagttggcgtaaacttatttgacgtgtaccgcggtaagggtgttgcggagggttataagagcctcgctatcagcctgatccttcaggataccagccgtacactcgaagaagaggagattgccgctaccgtcgccaaatgtgtagaggcattaaaagagcgattccaggcatcattgagggattga

SEQ ID NO: 73214 - DNA, 984 bp, Citrobacter koseri
atgtcacatctcgcagagctggttgccagtgcgaaggcagccattaaccaggcgtcagatgttgccgcgttagacaatgtacgcgtcgaatatttgggcaagaaagggcatttaacccttcagatgacgaccctgcgtgaattgccgccagaagagcgtccggcagccggcgcggttatcaatgaagcaaaagagcaggtacaacaagcgctgaacgcgcgcaaagcggatttagaaaacgcggcgctgaatgcacgtctggcggcggaaaccatcgacgtttctctgcctgggcgtcgtattgagaacggtggtctgcatccggtaacacgtaccattgatcgtattgaaagtttcttcggtgagcttggttttaccgtggcgactggcccggagatcgaagacgattaccataacttcgatgcgctgaacattccaggccatcacccggcccgcgctgaccacgacactttctggtttgatgccacccgcctgctgcgtacgcagacttccggcgtgcagattcgtaccatgaaagaacagcagccgccgatccgtattattgcgccgggccgggtgtaccgtaacgactacgatcaaacgcacaccccgatgttccatcagatggaagggctgattgttgacaccaacatcagcttcaccaacctgaaaggcacactgcacgacttcctgcgtaacttctttgaagaagacctgcaaatccgtttccgtccttcttacttcccgttcacggaaccgtccgcagaagtggatgtgatgggcaaaaacggcaaatggctggaagtgctgggttgcgggatggtgcatccgaacgttctgcgcaacgtgggcatcgacccggaaatctactctggcttcgcgtttggtatggggatggagcgtctgaccatgctgcgttatggcgtgaccgatctgcgctcattcttcgaaaacgatctgcgtttcctcaaacagtttaaataa

SEQ ID NO: 73215 - DNA, 357 bp, Citrobacter koseri
atggctcgcgtaaaacgtggtgtaattgcacgcgcacgtcacaagaaaattttgaaacaagccaaaggctactacggtgcgcgttctcgcgtataccgcgttgccttccaggcagttatcaaagctggtcagtatgcttaccgtgaccgtcgtcaacgtaagcgtcagttccgtcaactgtggattgcgcgtatcaacgcagcagcacgtcagaacggtatttcttacagcaaattcatcaacggcctgaaaaaagcctctgttgaaatcgaccgtaagatcctggctgacatcgcagtattcgacaaagtagcgttcaccgctctggttgaaaaagcgaaagcagctctggcataa

SEQ ID NO: 73216 - DNA, 198 bp, Citrobacter koseri
atgccaaaaattaagaccgtacgcggtgctgctaagcgcttcaaaaaaaccggtaaaggtggttttaagcacaagcacgctaacctgcgtcatattctgaccaaaaaagcgaccaagcgtaaacgtcacctgcgcccgaaagccatggtttccaaaggcgatctgggtctggtaatcgcgtgcctgccgtacgcataa

SEQ ID NO: 73217 - DNA, 435 bp, Citrobacter koseri
gtgagtctgagagaagctctggaaaaagctgaagaagctggagtagacttagtcgaaatcagccctaacgccgagccgccggtttgtcgtataatggattacggcaaattcctctatgaaaagagtaagtcttctaaggaacagaagaaaaagcaaaaagttatccaggttaaggaaattaaattccgtcctggtacagatgaaggcgactatcaggtaaaactccgcagcctgattcgctttctcgaagagggcgataaggccaagatcacgctgcgtttccgcggtcgtgagatggcccaccaacagatcggtatggaagtgcttaatcgcgtgaaagaagatctggctgaactggcagttgtcgaatccttccctacgaagatcgaaggccgtcagatgattatggtgctcgctcctaagaagaaacagtaa

SEQ ID NO: 73218 - DNA, 1929 bp, Citrobacter koseri
atgcctgttattactcttcctgatggcagccaacgccattacgaccacgctgtaagccccatggatgttgcgctggacattggtccaggactggcgaaagcctgtatcgcaggtcgcgttaatggcgaattggttgacgcgtccgatctcattgaaaacgacgctcaactggcaatcatcaccgcgaaagatgaagaaggtctggagatcattcgtcactcctgcgcgcacctgttagggcacgcgattaaacaactttggccgaacaccaaaatggctatcggtccggttgtcgataacggtttttactatgatattgatctcgaccgtacgttaacccaggaagatgtcgacgcgctcgaaaaacggatgcacgagcttgctgagaaaaactacgacgtcattaagaagaaagtgagctggcacgaagcgcgtgaaaccttcgtgaagcgtggcgaaacctataaggtttctattcttgatgagaatattgcgcatgatgacaagccgggcttgtatcatcatgaagaatatgtcgatatgtgccgtggcccgcacgtgccgaacatgcgtttctgccatcacttcaaactgatgaaaaccgcaggggcatactggcgtggcgacagcgacaacaagatgctgcaacgtatttatggtacggcgtgggcggataaaaaatccctgaacgcctatctgcaacgccttgaagaagccgccaagcgcgaccaccgtaaaatcggtaagcagcttgacctgtatcatatgcaggaagaagcgccgggtatggtgttctggcataacgacggctggactatcttccgtgaactggaagtctttgtgcgttctaagctcaaagaatatcagtatcaggaagttaaaggcccgttcatgatggaccgtgtgctgtgggaaaaaaccgggcactgggaaaactacaaagatgcgatgttcactacctcttcagagaaccgtgaatactgcatcaagccgatgaactgtccgggccacgtgcagatcttcaaccagggtctgaagtcctaccgcgatctgccgctgcgtatggcggaattcggtagctgccaccgtaacgaaccgtcaggcgccttgcatggcctgatgcgcgtacgtggcttcacccaggatgatgcgcatatcttctgtactgaagaacagattcgcgatgaagtgaacgcctgtattcgtatggtctacgatatgtacagcacctttggcttcgagaaaatcgtcgtcaaactttccactcgccccgaaaaacgtatcggtagcgatgaaatgtgggatcgtgctgaggcggatctggccgttgcgctggaagaaaacaacatcccgtttgagtatcaactgggtgagggcgcattctacggtccgaaaattgaatttaccctgtatgactgcctcgatcgtgcatggcagtgcggtacggtacagctggacttctctctgccgtctcgtctgaacgcctcttatgttggcgaaaacaacgagcgtcaggtgccggtgatgattcaccgcgcgattcttgggtcaatggaacgtttcatcggtatcctgactgaagagttcgcaggcttcttcccgacctggcttgcgccggttcaggtagtggtgatgaacattaccgatactcagtctgaatacgttaacgaattgacgcagaaactacaaaatgcgggcattcgtgtaaaagcagacttgagaaatgagaagataggctttaaaatccgcgagcacactttacgtcgtgtcccttacatgttggtctgtggcgacaaagaggtagaagcaggcaaagtagccgtgcgtacccgtcgtggcaaagacttgggcagcctggacgtaaatgaagttatcgagaagctgcaacaagagattcgcagccgcagtcttcaacaactggaggaataa

SEQ ID NO: 73219 - DNA, 759 bp, Citrobacter koseri
atgaagcttttgaagacagtacccgctgcattaatgttggcagggggcgtatttgcgtcaatgcatgccgctgctgatgattccgtttttactgtcatggatgatcccgccactgcgaagaaacccttcgaaggtaacctgaatgcgggctaccttgctcagtcaggcaacacgaaaagttcttctttaacggctgacaccacgatgacctggtacggtgcaaccaccgcctggtcgctgtgggggaatgccagcaatacatcctccaacgatgagcgctcttcggagaaatacgcggtaggcggccgtagccgtttcaatatgaccgactacgattacctgtttggccaggcaagctggctgacagaccgttacaacggttatcgtgagcgtgacacactgaccgccggttatggccgtcagttcctcaacgggccggtgcatagcttccgttttgaattcggtcctggcgtacgctatgacgaacataccgatggcaaaaccgagacccaaccgctgggctacgcttccggtagctacgcctggcagatgacggataacaccaaatttacgcagggcgtgtccgttttcggcgctgaagataccaccctcaactcagagacggcgttgaatgtcgcgatcaacgagcattttggtttaaaggtggcttataacctgacctggaactccgaaccgcccgcaacggcgccggaacataccgatcgccgcacgacggtatcgttagggtataagatgtaa

SEQ ID NO: 73220 - DNA, 930 bp, Citrobacter koseri
atggtacgtatctatacgttaacacttgcgccctctctcgatagcgcaacaatcaccccacaactctatcccgaagggaaacttcgctgttcatcacccgtttttgaacccggcggtggcggaatcaacgttgcccgcgcgattgcccatcttggcggaaccgcaaccgcgattttccccgcaggcggcgcgaccggcgaacatctggtcgcacttctggccgatgaaaacgtccccgtcgtcaccatcgacgccaaagactggacgcgacaaaacctgcatgttcatgtggagtccagcggggaacaatatcgctttgtcatgcccggcgccgcactcgacgatgacgaatttcgccagattgaagaacaggttctggagatcgaatccggcgccattttggttatcagcgggagtctgccgcccggcgtcaagctggaaaaactgacgcagcttattgccgccgcgcagaaacagggcatccgctgcattattgatagttcgggcgatgcgctcaacgcggcgttatctctcggcaatattgaactggtcaaaccgaaccaaaaagagctgagcgcgctggtcaatcgcgaactcacgcagcctgacgatgtgcgccaagcggcgcaggaaatcgtgaagagcggcaaagcgcgccgcgtcgttgtttctctggggccgcagggggcgctggcggtagatagcgaaagctgcgtccaggttgttccccctcccgtcagaagtcaaagtaccgtcggcgcgggcgacagcatggttggcgcaatgacgctaaaactggcggaaaacgcctcgctggaagagatggtgcgtttcggcgtctcggcaggcagcgcggcgacgttgaatcaaggaacacgtctgtgttcccgggacgatacgcagaaaatctacgcctggctttctcagtga

SEQ ID NO: 73221 - DNA, 288 bp, Citrobacter koseri
atggccagtggtgatgtcatccgctatgtcataaccgtgaaatttcatgaagactcgctgacagaaattaacgagttgaacaaccatctgacgcggtgcggttttctgctcaccatgaccgacgagcaagggcatgtgcatgaactgggtaccaacacatttggttttatcagcgccctgagcgaagatgagatcgccgcgcttaccgccgggctggcggaaagcgctttagataagaaaccagaaatatcggtcatgacatgggaggagtggactaaagaccgataa

SEQ ID NO: 73222 - DNA, 861 bp, Citrobacter koseri
atgtggcaggctatcagtcgtcttttaagcgagcaattaggtgaaggcgaaatcgaactgcgtaatgaactgcccggcggagagctccatgccgcatggcatttacgctatgcgggacgcgattttttcgtcaaatgtgatgaaagagagctccttcccggctttacggcggaagctgaccaactggagctgctttcccgcagtaaaaccgtcaccgtcccgaaagtctgggcgcagggctcagacagagactacagttttctggtgatggattatctccctccccgtcctctggatgcccacaacgcctttatcctcggtcagcaacttgcccatttacatgaatggagcgaccagccccagtttggccttgattttgataacgccctgtccaccacgcctcaacccaatgcctggcaacgacgctggtcaacattttttgccgaacaacgcattggctggcagcttgaactggcggcagaaaaaggcatcgcatttggcaatatcgatgcgatcgttgagcatgttcagcagcgtctggcctcgcatcagccgcagccttcgctgctgcacggcgatttatggtcaggaaactgcgcgcttgggcctgatggcccctacattttcgatcccgcctgttactggggcgacagggagtgcgatctggccatgctgccgctgcataccgaccaacccccgcagatctatgatggctaccagtctgtttctccgctaccgctggattttctggatcgccagccgatttatcagctctataccctgctcaatcgggcgagactgtttggcgggcaacacctggtggtggcgcaaaaagcgatggaaaggttgctggcggcatag

SEQ ID NO: 73223 - DNA, 537 bp, Citrobacter koseri
atgacgtatcaacaagctggacgcattgctgtcttaaaaaggattctgggatgggtgatttttatccctgcgcttatttccacactggtttcattgctgaagtttatgtatgagcacagcgaaaagcaggaagggattaacgcggtgatgcttgattttactcacgttatgattgatatgatgcgggcgaataccgcgttcctgaacctgttctggtataactcgccaacgccggattttcaacacagtctgaacattgttttctgggtgatttttgtgttgattttcgttggcctggcattgcaggactcaggcgccaggatgagccgccaggcgcgttttcttcgcgaaggggttgaagatcagcttattctggaaaaagcgaaaggcagcgaggggctgtcacgcgagcaaattgagtcgcgcatcgtggttccgcatcacacgatcttcttacagtttttcccgctttatatcctgccggtgattatcatcgtgttgggctacgttttcttttcgcttcttggatttgtgtag

SEQ ID NO: 73224 - DNA, 669 bp, Citrobacter koseri
atgtcaaccccgcgtcagattcttgctgcaattttcgatatggatggactactgatcgattccgaaccgctttgggatcaagctgaactggaggtcatggcaagtttaggcgtagatattacccgccgccatgaactcccggatacgctgggtttacgcatcgatatggttgttgacctctggtacacccaacaaccgtggaatgggccagaccgtcaggcggttaccgaccgaatcattacccgcgccatctcactggttgaagaaactcgcccgctgctccccggcgtgcgcgaagcggtcgcgctgtgcaaatctcaggggttaatggtcggtctggcctccgcttcccccctgcatatgctggaaaaggtgctgaccatgtttgatctgcgtgaaagtttcgatgccctggcctctgcggaaaaactgccttacagcaagccgcatccgcaggtatacctcgattgcgcggccaaactgggcgttgacccgttaacctgcgttgcgctggaagactccgtcaacggcatggtcgcctcaaaagcggcgcgaatgcgctcaattgttgttccggcggaagaaggccagcacgacccgcgctttgcccttgccaacgtcaaactgacttcgctggctgaactgaccgcagcgcatctgcgcggttaa

SEQ ID NO: 73225 - DNA, 762 bp, Citrobacter koseri
atgattctggatgcgtttagtcttgcaggtaaagtcgcgatagtgaccggatgcgataccgggcttgggcagggtatgacgctggcgctggcggaagcaggctgcgacatcgtcggcgttaatcgcaaagtcccccacgatacggcagcaaaagtggaggcgctcggacgccgttttatggcgatccaggccgacctgagccagcaacgcgctatcccggctattgtctcgcaaacggtcgaacagcttggccgaatcgacattctggtgaacaacgccgggacgatccgccgcgaagacgcgctgtcgtttagcgagaaagactgggacgatgtgatgaatctgaatcttaaatccgtgttctttctctctcaggccgtcgcacggcaattcctgaagcaaggtgatggcgggaagattattaatatcgcctcaatgctttcattccagggcggcattcgcgttccttcttataccgcgtcgaaaagcggcgtattgggcatcacgcggttgctggcgaacgaatgggcggagcaccacatcaacgtgaacgccatcgctcccggttatatggcgacgaacaatacgcagcagctgcgggatgacgccgcacgcagcaaagagattgttgaccgcattccggccggacgctggggcacacctgccgatctgcaaggcccggttgtctttctcgcttcttcggcgtctgattacgttcacggctataccctcgccgtcgatggcggctggctggcgcgctaa

SEQ ID NO: 73226 - DNA, 591 bp, Citrobacter koseri
atgacggcggaaggccaccttcttttttccattgcctgcgcagtgtttgccaaaaatgcggaattgacgccggttctcgctcagggcgactggtggcatattgtcccttcggccatcctgacctgcctgctgcccgatattgatcatccaaaatcatttcttggccagcgtctgaaatggatatcaaaacctgtcgcgcgcgcgttcggccatcgcgggtttacgcacagcctgttcgccgtgttcgctatgcttgcccttttctacctgaaagtgccggagagctggattattccggccgatgccctgcaaggaatggtgctcggttatttaagccatattctggccgatatgctgaccccggcgggcgttcccctgctctggccctgccgctggcgcttccgtctgccgatcctcgttccgcaaaaaggcaatcaactggagcgttttttatgcatggcgttattcgtgtgggctatctggatgccgcagacaatgcccgaaaacagtgcagtgcgttggtcgtcgcagatgattaatatgctgcaaatgcagttcgatcgctttataaatcaccagattgctgagtaa

SEQ ID NO: 73227 - DNA, 1392 bp, Citrobacter koseri
atgaattttccattaatcgcgaacatcgtggtgttcgttgcactgctgttcgtgctggcgcaaactcgccacaaacagtggagtctggcaaaaaaagtgctagtcggtctggtgatgggggtgatcttcggtctcgccctgcacaccgtttacgggtctgacagccaggtactaaaagactccgttcagtggttcaacatagtcggcaacggctatgtacaactgctgcaaatgatcgtcatgccgctggtcttcgcgtctattctcagcgccgttgcgcgtctgcataacgcgtctcagttgggtaagatcagctttctgaccattggcacgctgcttttcactaccctgattgccgcactggtgggtgttctggtcaccaacctgttcggtctgacggcggaaggtctggtgcagggcggcgcggaaaccgcgcgtctgaacgccatcgaaactaactatgttggaaaagtcgccgacctcagcgtgccgcaactggtgctgtcgtttgtgccgaaaaacccgtttgctgacctgaccggcgcaaacccgacctccatcatcagcgtggtgatcttcgcggcattcctcggcgtcgcggcgctgaaactgctgaaagacgacgcgccgaaaggcgaacgcgtgttaatcgctatcgataccctgcaaagctgggtgatgaagctggtgcgcctggtaatgcaactgacgccatatggcgtactggcgctgatgaccaaagtcgtcgcagggtctaacctacaggacatcatcaaactgggtagcttcgtggtcgcgtcttatcttggcctgatcatcatgtttgtggtgcacggtatcctgctgggcgtcaacggcgtcagcccgctgaaatatttccgtaaagtatggccggttctgacgttcgcctttaccagccgctccagcgccgcgtccattccgctgaacgtggaagcgcaaacgcgtcgtctgggcgtaccggaatccatcgccagcttctccgcctcttttggcgcgacgattggtcagaatggttgtgcaggcctgtacccggctatgctggcggtgatggttgcgccaactgtcggtattaacccgcttgatccggtctggattgccaccctggtcggtattgtgaccgtcagctctgccggtgtcgcgggcgtcggcggcggcgccaccttcgctgcgctgatcgtcctgcctgcgatgggcctgccggtcacgctggtcgcgctgctgatttccgttgaaccgctgatcgatatgggtcgtaccgcgctgaacgtgagcggctcaatgactgccggtacgctgaccagccagtggctgaagcagacggacaaaacccttctggacagtgaagacgatgccgaactggcacatcattga

SEQ ID NO: 73228 - DNA, 759 bp, Citrobacter koseri
atggaacgcttattgattgtgaatgcggatgattttggcctgagcaagggacaaaactacggcattgtcgaggcttgtcggaatggcgttgtgacgtccacaacggcgctggtcaatggtgaagccatcgaccatgcggcgcaattgtgccgtgacgtgccgaaactggcggtggggatgcattttgtactcaccttagggaagccgctgacggcaatgccgggcctgacgcgtgaagggttgctgggaaaatggatctggcaaatggccgaggaagagaccttgccgctggatgaaatttcgcatgagctggagtgtcagtatcagcgttttatcgacctttttggccgtgagccaacgcatctggacagtcatcaccatgtgcatatgttcccgcaaatttttcccatcgtggcacagtttgcggcagaacgcggcgttgctctgcgtatcgatcgccagtcggtgcttaatgctgacgatctgccggtagcgttacgctgctcgcagggattcagcagcgagttttacggcgacgctatttcagaagcgctgtttcttcaggtgctggatgcctctgctgacagaggcgaaaagtcactggaagtgatgtgtcatccggcgttcatcgacaatatcatccgtcagagcgcctattgttacccccgcttgactgagcttgacgtgctgacgtctgcgtcgctgaagtatgcgattgcggaacgtgggtatcgtctcggcagttttcttgatgtctga

SEQ ID NO: 73229 - DNA, 1356 bp, Citrobacter koseri
atgagccagaaattaaaagtcgtcacgattggtggcgggagcagctacacccctgaattactggaaggttttattaagcgttatcatgaattgccggtttctgaattatggctggtggatgttgaagacggaaaagagaagctggatattatttttgacctctgccagcgcatgatcgacaaagccggtgtcccgctgaaattatacaaaacgctggatcgtcgcgaagctttgcaaggggcagatttcgtcactacgcaactgcgcgtgggccagctgaaagcccgtgaacaggatgaacgcattccgctaagtcacgggtatctggggcaagagaccaacggcgcaggcggcctgttcaaagggttgcgcaccatcccggttatctttgatatcgtgaaagatgtcgaagaactgtgcccgaacgcgtgggtcattaacttcactaacccggcaggcatggtgacagaagcggtttatcgccacacccactttaagaaattcatcggcgtatgcaatatccccgtggggatgaaaatgttcatccatgacgtgctggcattgcaagacagcgacgatctgtcgatcgacctgtttggcctcaaccacatggtgtttattaaagacgtactggtgaatggcgaatcgcgctttgctgaactgctggatggcgtggcgtccgggcagttaaaagcgtcaacggtgaaaaatatttttgacctgccgtttagcgaagggcttattcgctcgctgaatatgctgccgtgttcctatctgctttactacttcaagcaaaaagagatgctggcgattgaaatgggcgaatactataaaggcggcgcgcgcgctcaggtggtgcagaaggttgagaaacagctcttcgatctttataaaaatccagagctgaacatcaaaccgaaagagctggagcagcgcggcggggcttactattccgacgccgcatgtgaagtgattaacgctatctataacgataagcagacggaacactacgtcaatatcccacatcatggtcatgtggataatatccctgctgactgggcggtggagatgacctgcacattagggcggaatggggcgacgccgcacccgcgcatcacgcatttcgatgaaaaagtgctgggcctcatctataccatcaaagggtttgaagtcgcagccagtaaggcggcgctgagcggcgagttcaatgatgtgctgttagcgcttaacctgagcccgctggtgcactccgatcgcgatgcggaaaccctggcgcgggagttgattctggcccacgagaagtggctgccgaattttgcggaatgcatcgagaaactcaaaggcgcacaacactaa

SEQ ID NO: 73230 - DNA, 843 bp, Citrobacter koseri
atgatgcagctacaggttaacgcaccggagatcgctaccgctcgtgagcaacagctttttaacggcaagaatttccatgtgtttatctataacaaaactgagagcatcagtgggctgcatcagcatgattattatgaatttaccctggtgttaacggggcgctactatcaggaaatcaacggtaaacgtgtgctgctggagcgtggtgatttcgtgtttatcccgttgggatcgcaccaccagagtttctatgagttcggcgccacgcgtattcttaacgttggtatcagtaagcgtttttttgaacaacactatcatcctttattaccgttttgttttgtcgcatctcaggtataccgggtcaacagcgctttcctgacttatattgaaacggttatcgcgtcgctgaacttccggggaaacgggttagatgagtttgtagaagtggtcaccttctacatcattaaccggctgcgccatcaccgtgaagagcaggtgattgacgatattccgcaatggctgaaagcgaccgtggagacaatgcacgacaaaacgcagtttggtgaaaacgcgctggaaaatatggtgcatctgtccgcaaaatctcaggagtatctgacccgcgcaacgcagcgttattacagcaaaacgccaatgcagattattaatgagatccgtattaattttgcgaaaaaacagctggaaatgaccaactactccgtaacggatatagcgtatgaggcgggttacagtagcccaagtctgtttattaaaacgtttaaaaagctgacctcatttacaccgaacagttatcgtaaaaaattaactgaatttaatcagtaa

SEQ ID NO: 73231 - DNA, 351 bp, Citrobacter koseri
atgttggatctcgaaaacgtagcgggtacgccgtcagaggctgaagaacttgaagaagtggtgatggggcttatcatcaactccggtcaggcacgcagcctggcttatgcggcgctgaaacaggccaagcagggcgattttgctgcggcaaaaacgatgatggagcagtcgcggatggcgctcaatgaagcgcatctcgtgcagacgaaactgattgaaggcgatcagggcgaaggtaaaatgaaagtcagcctggtgctggttcatgctcaggatcacctgatgacgtcgatgttagcgcgggaactggttacagagttaatcgagcttcacgagaagctggaacagtga

SEQ ID NO: 73232 - DNA, 1359 bp, Citrobacter koseri
atgagtaacgtcattgcttcacttgaaaaggtactccttccttttgctgttaaaataggaaagcagccgcacgttaatgcaatcaaaaacggctttattcgcttaatgccgttaacccttgcgggggccatgtttgtattaatcaacaacgttttcctgagctttggggaggggtcgtttttttattctttaggcattcggcttgatgcttccaccattgaaacattgaatggcttaaaaggcattggcggaaacgtctataacggtacgcttggtattatgtcgttaatggcgccgttctttatcggaatggcgctggcggaagagcgtaaagttgatgcgctggcggcggggctgttatccgtggcggcctttatgaccgttacgccatatagcgtaggcgaagcttatgcggttggcgcgaactggctgggcggtgcgaatattatctccggtattattattggtctggtcgtggcggaaatgtttacctttattgtgcgccgtaactgggtcattagattaccggacagcgtcccggcgtcggtttcccgttcattctcggcgttaattcctggctttattattctctccattatggggatcattgcgtgggcgctggcgaactacggttctaacttccaccagatcattatggataccatttctacgccgctggcatcgctgggcagcgtggttggctgggcctatgtgctgtttgttccgctactgtggttctttggtattcacggctcgttggcattgaccgcgctggacagcggtattatgaccccgtgggcgctggaaaacatcgccatctaccagcagtttggttccgtggatgcggcgctggaagccgggaagacgttccacgtctgggcgaaaccaatgctcgattcctatattttcctcggagggagtggcgcgacgctgggtctgattatcgctatcttcctggcctcgcgtcgtgcggattaccgccaggtagcaaaactggcgctgccgtccggtatcttccagattaacgaaccgattctgttcggcctgccgattattatgaacccggtgatgtttatcccgttcattctggttcagccgattctggccgccattacgctgattgcgtattacctggggattatcccgccgattaccaacatcgcgccgtggacgatgccaaccggtctgggagcgttctttaacaccaacggcagcgttgccgctctgctggtcgcactgttcaacctgggcgtcgcgacgctgatttatctgcctttcgtggttgtcgccaacaaagcgcagaatgcaattgagcaagaagaaagcgaagaagaaatcgctaacgcactgaaattttaa

SEQ ID NO: 73233 - DNA, 321 bp, Citrobacter koseri
atggaaaagaaacacatttatctgttttgttctgcgggcatgtcgacttctttactggtatcgaagatgcgcgctcaggctgagaaatatgaagtgccggttattattgaagcatttcctgagacgctggcaggagaaaaaggtctttcagcggatgtcgtgttattaggcccacaaattgcttatatgttacccgaaattcagcgtttgttacccaataaacctgtggaagtgattgactcgctgctgtacggcaaagtcgatggtttaggcgtgcttaaggctgctgtcgcagcaattaaaaaagccgctgcaaattaa

SEQ ID NO: 73234 - DNA, 342 bp, Citrobacter koseri
atgaacaagaatatagcaggaattctgagtgcagcggcggtaatgactatgctggcagggtgtacggcgtacgatcgtacaaaagaccaatttgtccagcctgtagtaaaagatgtgaaaaaagggatgagccggtcgcaggttgagcagattgccggtaagccttcatctgaagtgagcatgattcacgcgcgcggtacttgccagacctacatcctgggtcaacgtgatggtaaagctgaaacctattttgtcgcgctggatgacactggtcatgtgattaactccggctaccagagctgtgcagagtatgacaccgatccgcaggctccgaagcagtaa

SEQ ID NO: 73235 - DNA, 831 bp, Citrobacter koseri
atgacgctacagcaagagataatccgggcgcttggcgcaaaaccgcacattaatgcagaagaggaaattcgccgcagcgtagatttcctgaaagcgtacctgaaaacatatcccttcctgaaatccctggtactgggtatcagcggagggcaggattcgacgctgacgggcaaattgtgccaaaccgcaattactgaactgcgtgaagagacagggaacgacgccctgcaatttattgccgtgcgtctgccattcggcgtgcaggccgacgagcaggattgtcaggatgcgatcgcgtttattcagccggacagagtcctgaccgtcaatattaaaggcgccgttctggccagcgagcaggcattgcgtgaagcaggcattgagttaagcgattttgttcgcggcaacgaaaaagcccgcgaacgcatgaaggcgcagtacagtatcgccggaatgaccaacggtgtggtggtcggcaccgatcatgccgccgaagcggtgacgggcttcttcactaaatatggcgacggcggtaccgatattaacccgcttttccgtctgaacaagcgccagggaaaacagctgctcgccgcgctgggttgcccggaacatttatataagaaagcgccaacggcggatctcgaagacgatcgcccttctctgccggacgaagcggcgcttggcgtcacctatgacaacattgatgattatctggaagggaaaacgctggatgccagcatcgcgaaaatcatcgaaggttggtatatccgaacggaacacaagcgtcgcacacccattacggtgtttgacgatttctggaagagatcataa

SEQ ID NO: 73236 - DNA, 576 bp, Citrobacter koseri
atggaatactttgatatccgtaaaatgccggtaaacctctggcgcaatggtgcgggcgaaacgcgcgagatttgttgttttcctccggcgacgcgggattttcactggcgcgccagtattgcgtctatcgccgggaacggggagttttccctttttcctggggttgagcgcgttattacgttactggaaggcggagaggtgatgctggaaggcgtgaatacgtttacccataccctcaagcgacatcagccgttcacgtttgcaggcgatagcgttgtgaaagccacgctgtcggaagggcaaatgtcgatggatctcaatatcatgacccgacgcgatcgctgtaaggcgaaggtcagggttgccgatcgcacgtttacgaccttcggttcgcgcggtggcgttgtgtttgttattagcggcgcctggcaactgggagacaagctcctgactgccgatcagggcgcctgctggcatgacgggaaacacacgttacggttgttgaagccagaaggacagctgttgtttagcgagattacgtggttgccgggttatacgccggacaccgtccagtaa

SEQ ID NO: 73237 - DNA, 489 bp, Citrobacter koseri
atgcgtaaattaactgcactgtttgttgcctctaccctggcgctgggcgctgcgaacctggctcacgcggctgataccactaccgctgctccggcagatgcgaagccgatgatgcaccacaaaggcaaattcggtccgcatcatgacatgatgttcaaagatttgaacctgaccgacgcgcagaaacagcaaatccgcgacatcatgaaaggtcagcgtgaccagatgaaacgtccgccgctggaagagcgccgcgcaatgcacgatatcatcgccagcgacagcttcgataaggcgaaagccgaagcgcagattgcgaagatggaagaacagcgcaaagccaatatgctggcgcacatggaaacgcagaataagatctacaacattctgacgccggaacagaaaaaacagtttaatgccaattttgagaagcgtctgacagaacgtccggcgccggaaggtaaaatgccaacaccccctgctgagtaa

SEQ ID NO: 73238 - DNA, 969 bp, Citrobacter koseri
atggataactttctggcgcagacgctggcaggaatatcccccgatattacgcaaggggaaacggagagctttcactggcgctggcagatgcctggtgtgcttgaacttacgcctgccgttgaggttggccgcgctctggtgctctctgcgggcatccacggcaatgaaacggcgcctgtggaaatgctggacgcactcctttcggcgctgtttgaagggaaaatccccctgcgctggcgattgctggtgattctggggaatcctccggcgctggccgagggggtacgctattgccatagcgatatgaaccgtatgttcggcgggcgctggcagatgttcgaggagagcggggaaacgctgcgcgcccgcgagctggaacaactgctggaggatttttattcccgccgcaaaacgcggatacgctggcatctcgatctgcatactgcgattcgcggctcccgccacgttcggtttggcgttttgccgcaacggtcgatcccctgggatgaacactttttgtcatggctgggggcggcagggctggaggcgctggtttttcatcaaacgccgggcggcacctttacgcattttagctgtgagcattttggcgcgttgtcctgcacgctggagctgggcaaagcgctgccgtttgggcacaacgatctgacgcaatttacccccaccgtgcaggcgctggcgacgttgctggcgggagaaaagccgatggaagggggaacgaggccggttcgctatcgcgtggtggcgcaaattacacgccgcagcgacgcgtttgttctctatatggataaccagacgctgaatttcacgccgttcaaagaaggaacgctactggcgcaggatggcgatgagcaggtgatcgttacccatgatgttgaatatgttctctttcctaaccctaatgtggcctgtggcttacgcgctggcctgatgctggaaaagctcgcgtaa

SEQ ID NO: 73239 - DNA, 1344 bp, Citrobacter koseri
atgaaagcgcatgaagtgaattttgacggtctggtggggttaacccaccactatgccgggctgtcctttggtaacgaggcgtcgatacagcaccgctttcaggtgtcgaatccccgcctggcggcgaagcagggcttactcaagatgaaagcgctggcggatgcggggttccctcaggcggtcatccccccgcacgagcggccgtttattcccgtgcttcgtcagctaggttttagcgggcaggacgagcaggtgctggagaaagtggcgcgccaggcgcctcactggctctccagcgtcagctccgcctcgccgatgtgggtggcgaatgcggcgacggtatgtccttcagcggacgcgcttgacggcaaagtgcatctgacggtggcgaacctgaacaacaaatttcaccgcgcgctggaggcgccgaccacggcgtctttgttgcgggccatcttccgcgacgcgcagtttttcgcagtgcacgacgcgctgccgcaggtggcgctgctgggggatgaaggcgctgccaaccataaccggcttggcggtgattatggcgcgccgggcattcagctgtttgtctatgggcgtgaagagggcgtcgacacgcgtccggtgcgctatccggcgcggcaaacccgcgaggccagtgaagcggtggcgcgtcttaaccaggtgaatccgcatcaggttatctttgcccggcagaatccagacgttatcgatctcggcgtgttccacaatgatgtgattgcggtgtcgaatcgccaggtgctgttctgccatgaacaggcattcgcaaagcagggcgagctgatgcgccagctccggtcgcgcgtggcgggatttatgccgcttgaggtgcctgccagggaggtttccgtgcaggatgccgtcgccacgtacctgtttaatagtcagcttttaagccgcgatgacggctcgatggtgctggttctgccgcaggagtgccgggaacatgccggtgtgtggcggtatctgaacgcgttgctggcggctgataaccccatcagcgatctgcgcgtgttcgacctgcgcgaaagtatggcgaacggcggcggcccggcctgtttacgcttgcgcgtggtattgaccgaggatgagctgcgggaggtgaatccggcggtgatgatgaacgataccctgttcagcacgctcaatgactgggtggatcgttattatcgcgaccgcctcaccgccgccgatctggccgatccgcaattgctgcgtgaagggcgggaggcgcttgatacgctgacgcaactgcttaacctggggtcggtgtatcccttccagcaggagggcgcagggaatggataa

SEQ ID NO: 73240 - DNA, 1479 bp, Citrobacter koseri
atgactttatggataaatggcgactgggtaactggtcagggggagcgccgggtcaaaacgaatccggtgaatggcgaagtgctctggcagggcagcgacgcggatgcgacacaggtcgctgaggcagggcgtgcggcgcgtgcagcgtttccggcctgggccaggctgcctttcgccgcgcgacaggccatcgtggaaaaatttaccgccttgctggaggttcataaagcggagttgacggcaatcattgcgcgagaaaccgggaagcctcgctgggaagcggcgacggaagtgacggcgatgatcaataaaatcgctatctcggtgaaggcataccatgcccggacgggagaacaacaaagcgaattgccggacggggcggcgacattgcgccatcgtccgcatggcgtgctggcggtgtttggcccatacaattttcccggccatttacccaacggccatatcgttccggcgctgctggccggaaataccctgatttttaaaccgagcgagctaacgccgtggactggcgaagcggtgatgaaactgtggcaacaggcggggttgccgcctggcgtactcaacctggtgcaaggagggcgcgaaacgggacaggcgctcagcgcgctggacgcgcttgacggcttgctctttaccggcagcgcgaatacggggtatcagttgcaccgtcagttatccgggcaaccggaaaaaatcctggcgctggaaatgggagggaataacccgctcattattgagaatccagaggacattgatgcggcggtacacctcacgattcagtcggcgtttgtcaccgccggacagcgctgcacctgcgcccgccgtttgctggtgaaacgcggggaacagggcgacgcgtttctggcgcgcctgctggaggtgagtcagcgtttaacgccgggtgagtgggatgatgaaccgcagccgtttatcggcgggctgatttccgaaccggctgcgcgtcatgtgtatgaggcctggcagcgtcttgaggcgatgggcggacgaacgctgctggccccacgtatactgaaagcgggaatgtccttgttgacgccgggcattatcgaaatgaccggcgtgacgcaggtcccggatgacgaggtgtttggcccgttactgagcgtctggcgctatgagcgctttgatgaagccattcgtatggcgaataacacccgcttcggtttgtcgtgtgggctggtgtctcccgatcgtaagcagttcgaccagctactgctggaggcgcgtgcgggtattgttaactggaacaaaccgctgaccggagcggccagcacggcgccgtttggcggcgttggcgcgtcggggaaccatcgctccagcgcctggtatgcggcagattattgcgcctggccgatggcgagcctggaatcgccgacgcttgtactgcccgattcgctcagtccggggctggacttctctcgcgaggaaccggtatga

SEQ ID NO: 73241 - DNA, 1035 bp, Citrobacter koseri
atgatggtgatccgccccgtcgaacgacgtgatgtcagtgcgttgatgcagcttgccagtaaaaccggcggcggcctgacctctctgccagcagatgaagcgacgctgacgtcgcgtattgagcgcgcgctaaaaacgtggcgtggcgaactgccgaaaagcgaacagggttacgtgttcgtgctggaggatagcgatacgggaagcgttgcgggaatttgtgcgattgaggtggccgtggggttgaacgatccctggtacaactatcgcgttggcacgctggtgcatgcttctaaagagctgaatgtctataacgcgctgccgacgctgttcctcagtaacgatcacaccgggagcagcgaactgtgcacgctgttcctcgatcccgactggcgtaaagagggcaacggctatttactctctaaatcacgctttatgtttatggcggcgtttcgcgacaaatttaatgaaaaggttgtggcggaaatgcgcggggtgatcgacgaacgcggctactcgccgttctgggaaagcctgggagaacgctttttttccatggaattcagccgggcagactatttatgcggcaccgggcagaaggcgtttattgctgaactgatgccgaagcaccctatctacacccatttcttatcggaagaagcgcaggcggtgattggcgaagtacatccgcaaacggcgccggccagaacggtactggagaaagaaggtttccgctaccgcaactatatcgacattttcgacggcggcccgacgctggagtgtgacattgatcgggttcgggcaatccgtaaaagccgcctactggacgtggtggaaggccagcccgcaccgggcgagtttccggcgtgtctggtcgccaatgaaaattatcatcactttcgcgccatgctgattcgtaccgacccggatacgcaacgtctggtgctgactgcggcgcaacttgatgcgctcaaatgccacgcgggagatcgcgttcgtctggtacgtctttgcgctgaggagaaaaccgcatga

SEQ ID NO: 73242 - DNA, 1221 bp, Citrobacter koseri
atgtctctgtcaattacgcgtgaaaattttgatgaatggatgatgccggtctatgccccggcaccttttattccggttcgtggagaaggctcacgcctgtgggatcagcaggggaaagagtatatcgacttcgccgggggaattgcggtgaatgcgctcggccatgcgcacccggctttacgcgaggcgctgaatgagcaggcgagcaaattctggcataccggaaatggctacaccaacgagccggttctgcgactggcgaaaatgctgattgacgccacctttgctgaacgcgtcttcttctgtaactccggcgcggaggccaacgaagcggcgctgaaactggcgcgtaagtatgcgcacgatcgttttggcacgcataaaagcgggattgtggcattcaaaaatgcctttcatggccgcacgctatttaccgtcagcgcaggcgggcagcccgcgtattcacaggatttcgctccgctgccgccggatatccgccatgccgtgtataacgatctcaacgcggccagcgaactgattgatgacacgacatgcgcggtgatcgtggagcccatgcagggcgaagggggcgtgcttccggccacgaaagcattcttacaggggctgcgtgaattgtgcgaccgacacaatgccttgctgatttttgatgaagtacaaacgggggttgggcgtaccggcgagctgtatgcctacatgcattatggcgtcacccccgatctgctcaccactgcgaaagcgctgggcggcggtttccccatcggggcgctgttggccactgaaaaatgcgcctgcgtgatgacggtaggcactcacggaaccacctacggcggcaacccgctggcttctgcggtggcgggaaagctgctggaaatcgtcaatacgccggaaatgctgaacggcgttaagcaacgccatgactggtttgtcgaacgcctgaacgccataaatgaacgcttcggattgttcagtgaaattcgtggactggggctgcttattggctgtgttctggaggctgagtttgccgaaaaagctaaacttatttcacaggaagccgcaaaagccggagtgatggtgttgattgcgggcgctaacgtggtgcgtttcgcacctgcgttaaacgtcagcaaagaggaagtggcaaccgggctggatcgctttgcgctggcctgtgaacgcatcaaagcaggaggttcgtcatga

SEQ ID NO: 73243 - DNA, 807 bp, Citrobacter koseri
atgaaatttgtctcttttaatatcaacggcctgcgcgcccgtcctcatcaactgtcagccattgtcgacaagcaccagcctgacgtgatcggcttgcaggagacaaaagttcacgacgatatgttccctcttgaagaggtagcaaagctcggctataacgtcttctatcacggacagaaaggccattacggcgtcgcgctactgaccaaagagacgcctgtttctgtgcgccgtggttttcccgacgacggcgaagaggcgcagcgccgtatcatcatggcggaaatcccgtcgccgctgggcagtatcaccgtcattaacggttatttcccgcagggcgaaagccgtgaccacccgctgaaatttccggcaaaagcgcagttttatcagaacctgcaaaactacctggacaacgaactgaaacgcgacaatccggtgctgatcatgggggatatgaatatcagcccaaccgatctggatatcggcattggcgaagagaaccgcaaacgctggctgcgtaccggtaagtgctccttcctgccggaagagcgcgagtggatggatcgcctgattagctgggggctggtggataccttccgtcacgcgcacccggaaacggtcgataaattttcatggtttgattaccgctcaaaaggtttcgacgacaaccgggggctgcgcatcgacctgctgctggcgagcaatccgctggccgaacactgcgttgaaaccggcattgactatgaaatccgcagcatggaaaaaccgtccgaccatgcgcccgtctgggcaaaattccgggtctga

SEQ ID NO: 73244 - DNA, 1164 bp, Citrobacter koseri
atgcgtcgtactctattactggcgggtctgctgttgacgggccatgtgcaagccgtcgaaaactggcaggcggtgaaagatgaagccaaaggtcagaccgtctggtttaacgcctggggcggcgacaatgccgttaatcagtatctcgactgggtcagcggcgagatgaaaacgcattacgccattaacctcaggattgtccggcttgcggatgccgccgatgccgtgaaacgcattcagactgagtccgccgccgggcgtaaaaccgatggttccgtcgatctgctgtgggtaaatggcgagaacttccgcacgctgaaagaagccggactgctgcaaacccactgggcggaaacgctgccaaactggcgctatgtcgatacgcgcaaaccggtacgcgaggatttttccatgccgacgcaaggggcggagtcaccctggggcggcgcgcagttaaccttcattgctaaccgggatattacgccgcagccgccgcaaagcccgcaggcgctactcgcttttgcgaaagcccatcccggtactgtcacctacccacggccgccggattttaccgggacggcgtttctggaacagctgttactggcgttaacccctcaaccggatgcgctcaaggtcgcgccggatgacgcgacgttcaattccgtcaccgcgccgctatgggcatatcttgatgcgctgcatcccagcctgtggcggaagggaaaagacttcccttcctctcccgcccggatggacgcgctgctgcaagccggttcgctgcgcctgtctctgacatttaatcccgctcatgcgcagcaaaagatcgccagcggcgaactgcccaaagccagctacagtttcggtttttcacaaggcatgattggcaacgtgcattttgtcacgatcccggcgaacgcccgcgccagcgcaggcgcaaaggtggttgccaattttctgctctcccccgacgcgcagttgcgcaaagccgatccggcgttctggggcgatccttccgtgcttgacccgcataagctgcccgccgggcagcgggaagcgttacggtcgcgcattcctgacgggttgccgcctacgctggcggaaccgcattctgcatgggtgaacgcgctggaacaggcatggctacgccgctacggtacgcagtaa

SEQ ID NO: 73245 - DNA, 1536 bp, Citrobacter koseri
atggctacgccgctacggtacgcagtaaccctgctggtctggggcgtgatggcggtcatctggttgccgctggttcctgccgcattcacgcttatcacgcccgcgctctccgctacgcactggctggcgctgtttagcgatccgcagcttccgcaggcgctgcgggcaacgctggtctccgtcaccctggcggcaaccggcgcgctggctattgcgctgacgatcgtcgtcgcgttgtggcctggcgcaaaatgggcgcatctttgcgcccgcctcccctggctactggccattccccatgtggcctttgccgccagcgccctgctgctttttgccgaaggcgggatgctttatcgccttttcccctcgctcacgccgcagatggatcgctatggcatcgggcttgggctcacgctggccgtcaaagagagcgcctttctgctctgggtcctgtcggcattattaagtgaaaaacagctttcgcagcaggtcatcgtgctggataccctgggctacagccgtctgcaatgcctgagctggctgctgttacccgccgttgcgccaggattaggcgcggtgatgctggcgattgtcgcctggtcattatcggcagtggatgtcgcgatgattctggggccgggcaatccacctacgctggcagtgttaagctggcaatggctgagccagggcgacgccgaccaacaggccaaaggcgcgctcgccagtttactgctcgtggcgttgcttatgctttttgctctgttcggctatctcatctggcggggatggcaacgtacccttcctgccatcaacggtcttcgccgccagcgcttatcaggcagaagcggaaaaacgttgacgctaacgctgccgttaagcggcatactatgcgtggcgctgctggcttgtatggctgaacccgcgtcggtgaaccgcgaagcgctggtgaacagcctgcaaatggggctggcgtccgccgtgctggggttgatgacgctgttcttatggctggaatgggggccgcaaaccgagcaccgcagggtctggctgccaatattgctgcctgcgctgccgttggtcgccgggcaatacaccctggcgctgctcaccgggcaagacggccagtacgctaccgttatctgggggcacctgctatgggttatcccgtggatgttattcgtcctcaaacccgcctggcagcgcattgacccacggctggtgctgatcgcgcaaacgctgggctggacgcgggttcgtatcttctggcgcatcaagtgcccacttttactgcgccccgcattgtttgccttcgcggtaggcttttccgtcagcatcgcccaatatatgccgacactctggctgggcgccggacgctatcctacgctcaccacagaagccgtggcgctcagcagcggcggcagtaccacaattcttgcatcgcaggcgctatggcaactgctgttacccctgctggttttcgcgctgacggcgctatgttcacgcgtcattggccactatcgtcaaggactccgctaa

SEQ ID NO: 73246 - DNA, 633 bp, Citrobacter koseri
atgctcatcgttcaacatctcacgctgcgccagggcaatcaccgcttattgaatcaggtcgcctttcaggtcaaaaaaggtgacattgtcacgttaatggggccttccggtagcggaaagtcttcgctgttttcgtggatggtcggcgtactgccatctcagtttcaggcctccggcgagctttggctcaacgaacgacgcatcgatacgctccccaccgcgcaacgtcaaatcggtattttgtttcaggatgccctgctgtttgaccatttcagcgtcgggcagaacctactgctggcgctgcctgccgcaataaaaggggcggccagacaaacggaagtgcggcatgctcttgagcgcgccgggctggacgggttcagccgccgcgatccggcgtcattgtccggcggacagcgcgccagggtggccctgcttcgcgcgctgctggcgcaaccgcaggcattactgctggatgagccgttcagccgactggacgccgggcgccgcgacgccttccgccggtgggtctttgccgaagtacggcaacaaaatattccggtggtacaggtgacgcacgatatccaggatgtccctcccggcggcacggtgctccagatggaggcgtgggcgtga

SEQ ID NO: 73247 - DNA, 1308 bp, Citrobacter koseri
atgaaacgtgtttctcaaatgaccgcgctggcactggcttcaggactcgcctgcgcttcctcctgggctgctgatatggcgcagtcgcttaccttcagccagctacagcaaaaacagggcgccgcaattgatacgcgccagagcgctttctacaacggctggccgcaaacccttaatggcccttccggtcacgaaccttccgcactgaatctgtcagcctcctggctcgataaaatgagcgacgagcagctcgccgcctggctgcaacggcatcagctcaggaaagacgccccgctggcgctgtatggcaatgacagtggcgtacaggcggtgaaatcacgtttacagaaggcaggcttcagccagattgctacgctgagcgatgcactgaccgatccttcccgactgcaaaagctccctcacttcgagcaattagcatacccacagtggttgcatgcccttcaacaaaaccagccggttacggctaaaccggcgggagactggaaggtgattgaagcaggctggggcgcgccgaaatattatctgctcagccacattcccggcgccggatacatcgacaccaatgaggtggaaagcgaaccgctgtggaataaagtctctgacgcgcagttgaaagcgatgctggcgaaacacggtattcgccatgacacgacggttattctgtatggccgcgacgtgtacgctgcggcgcgcgttgcgcagattatgctctatgcgggcgtgaaggacgttcgtctgctcgacggcggctggcaaacctggtccgatgcgggcctgccggttgaacgcggcatgcccgctgacgtgaagccggaacccgactttggcgtggcgatcccagcgcagccgcagttaatgctggatatggaacaggcccgcgccctgctgcaccgtcaagacgcatcgctggtcagtatccgttcctggccggaatttatcggcaccaccagcggatacagctatatcaagccaaaaggcgaaattgccggcgcgcgttggggacatgcgggcagcgactccacgcatatggaggatttccataacccggacggcaccatgcgtagcgcagaggatatcgccgccatgtggaagcagtgggatatcctgccagatcagcacgttgccttctattgcggcaccggctggcgcgcctccgaaacgtttatgtacgcgcgggcgatgggctggaaaaacgtcgccgtgtatgacggcggttggtacgaatggagcagcgatccgaaaaatccggtgtccaccggcgagcgcgacccggacagcagtaagtag

SEQ ID NO: 73248 - DNA, 636 bp, Citrobacter koseri
atgtttgatcggcatctgcacccacgggttaaaccgctcctgcaccgcggtgctgcgtatctcgataaaccggcgatcaccccggacggcctgacgctgttcggatttgccattggtgtgctggcgctgccgtttctggcgctgggctggtatctggccgcgctggcggccattgtgctgaatcgcctgttcgacgggctggatggcgcgttggcgcggcgcagagggttaaccgatgcggggggatttcttgatatcaccctcgactttctgttttacgcactggttccgtttggctttattctggccgcaccggaacaaaacgcgctggcagggggctggctgctgtttgcgtttatcggtacgggcagcagttttctggcgtttgcggcgctggcggcgaagcatcagattgataatccgggctatgcgcacaaatcgttttactatctgggcgggttgaccgaaggcaccgagacaatattgctttttgttctgagctgcctgtttccgcgttattttcccgttctggcgtgggtatttggcgcgttgtgctggatgaccaccctgacaagggtctggagtggatacctgacgctgaaggttatccggcctggaaaaagagcctccctgtag

SEQ ID NO: 73249 - DNA, 570 bp, Citrobacter koseri
ttgaacgatccacaaccctgggttagcccattgacccatatcccttccagtctgaaacctctcgtcgctacgcagaaaaaacattacggcgacgttctgcaccccacgcgctggtgggggcgaatgccgtttctgttctggctggtggcgctgtttgtcgggtttctggaacgtaagcgcgcgcggttaacgccggtgatgcgcgcgttgttgatgacgcgcgtttcgcaggtgtgccattgcgccttctgtgtggatgccaacagtttacgtctggccgaacggtgtggagcgctggataaagtacaggccgttgccgggtggcaatcgtccacgctgttcagcgaggaggagcgtgtcgcactggcttatgccgaggccgtgaccgccacgccgccgcaggttgatgaggcgctcaaggcgatgatgaaacgctattttactgacgacgcgattaccgaaatgacggcgctgatcgcctttcagaacctgtcggcgcgttttaatgctgcgctggatattccttcgcaagggctgtgtgacgcattgaaaggggcgccacatgtttga

SEQ ID NO: 73250 - DNA, 423 bp, Citrobacter koseri
atgaatatgatgaaaaccattgatgtcgtcgccgcaatcattgagcgtgacgacaaaatattgctggctcaacgcccggaacacgccgatcagccgggtatgtgggagtttgccggaggcaaagtggagtccagtgagacgcaacctcaggcgttgattcgcgaactgcgtgaagagttgggtattgaggcggttgtcgggcgctatatcgccagccatcagcgcgaagtctctggccggctgatccatctgcacgcctggcacgtcccggcgtttaccggcgccgtcaccgcgcattatcaccagaacatgatatggtgttcgccaaaagaggcgctgcgttacccgcttgcgcctgcggacattccgctgttagaggcgtttatggctttacgcgacgccagaccaacggattcgtactga

SEQ ID NO: 73251 - DNA, 276 bp, Citrobacter koseri
atgcatcgtttatttatcgcggcagcagcggcgatggtctcttttgccgcgctggcgaatcagcattatcgcccggatgtggaggttaacgtcccgcccgaagtgttcagctccagcgggcagcgtgcgcagccctgcaatcagtgctgcgtctaccaggatcaaaactattcggaaggggcggtgattaaagccgaaggcgtgctgctgcaatgccagcgcgacgaaaaaacgctcagtacgaatccgttggtctggcgtcgcgtaaagccataa

SEQ ID NO: 73252 - DNA, 1344 bp, Citrobacter koseri
atggatcagacatgttctctggagtcgtttctaaaccatgttcaacagcgtgaccccaatcagaccgagttcgcgcaggccgttcgtgaagtaatgaccacgctgtggcctttccttgagcaaaatcctcgttatcgtcagatgtcattgctggaacgtttggttgagccagaacgcgtgatccagttccgcgtggtgtgggtggacgatcgtaaccaggtgcaggttaaccgtgcctggcgcgtacagtttaattccgccatcggcccgtataagggcgggatgcgttttcatccttccgttaacctctcaatactgaaattcctcggctttgagcagacgtttaaaaatgcgctgaccacgctgccgatgggcggcggtaaaggcggcagcgatttcgatcctaaaggcaagagcgaaggcgaagtgatgcgtttctgtcaggcgctgatgacagagctctatcgccatttagggccagacactgacgtacctgctggcgatatcggcgtgggcggacgtgaagtgggctttatggccggtatgatgcgtaagctctccaacaacagcgcctgcgtgttcaccgggaaaggcctctcgtttggcggtagcctgattcgcccggaagccaccggttatggcctggtgtactttaccgaagcgatgctcaaacgccacggtctgggttttgagggtatgcgtgtggcggtgtccggttccggcaacgtggcgcagtacgctatcgagaaagcaatggcgttcggcgctcgtgtggtgacggcttcggactccagcggcaccgtcgttgatgagagcggcttcaccgaagaaaaactggcgcgcttgtgcgaaatcaaagccagccgtgacggtcgcgtggcggattacgcccgcgagtttggcctgccctatatggaaggcaaacagccgtggtcagtgccggttgatatcgccctgccgtgcgcaacgcagaacgaactcgacgtggacgccgcgcgcgtgctgatcgccaacggcgtgaaagcagtggcggaaggcgccaatatgccaaccaccattgaagccaccgatctgttcctcgaagctggcgtgctgttcgcgccgggtaaagcggccaacgcaggcggcgtggcgacctccggtctggagatggcgcaaaacgccgcgcgaatgagctggaaagccgagaaagtggatgcgcgtctgcaccacatcatgctggatattcatcatgcctgcgtggaatacggcggcgaaaacaaacataccaactatgttcgcggggcgaatatcgcaggcttcgtcaaagtggccgacgcgatgctggcgcagggtgtgatttga

SEQ ID NO: 73253 - DNA, 1944 bp, Citrobacter koseri
atgcggttgtttattgccgaaaagccgagtctgggccgcgccattgcggatgtgctgccaaagccgcaccgcaaaggcgacggctttatcgaatgcgggaatggacaggtggtgacctggtgcatcggccatctgcttgaacaggcgcagccggacgcgtatgacggtcgttatgcgcgctggaatctggccgatctgccgattgtgccggaaaagtggcagctccagccgcggccttccgtgacgaagcagcttaatgtcattaagcgctttttacatgatgcaagcgaagtgattcacgcgggagacccggatcgcgaagggcaactgctggtggacgaggtgctggattatctgcaactgtccccggaaaaacgccagcaggtgcagcgttgcctgatcaacgatcttaacccgcaggcggtggagcgtgcgatttcccggctgcgcgccaacagcgaatttgtgccgctgtgcgtctccgcgctggcgcgtgcgcgcgccgactggctgtacggcattaacatgacccgcgcgtatacccttctcgggcgcaacgcgggttaccagggcgtgctctcggtagggcgtgttcagacaccggttctcgggctggtggttcgccgcgatgaagagatcgagaacttcgtcgccaaagatttctttgaagtgaaagcacatatcgtcacgccagctgaggagcggtttaccgccatctggcaacccagtgaagcgtgcgaaccgtatcaggatgaagaggggcgtttgctgcatcgtccgctggcggagcatgtggtgaatcgtattaacggtcagcccgcgatcgtcaccagctataacgataaacgggaatcagaatctgccccgttgccgttttcgctgtcggcgttgcagattgaagcggcgaaacgctttggcctgagcgcgcagaacgtgcttgatatctgccagaagttgtacgaaacccacaaattaattacctatccgcgttccgactgccgctatctgccggaagagcattttgccggacgccatgcggtgatgaacgccattggcgtgcatgctgcggatttgttgccgcagccggtggttgacccggacacgcgaaaccgctgctgggatgataaaaaagttgacgctcaccacgcgatcatcccgactgcgcgcagttcatcaatttccctcagcgacaatgaagcgaaggtgtacaacctgatcgcacgccagtacctgatgcaattctgcccggacgcggtatttcgcaaatgcgtcattgaactggagattgcgaaggggaaattcgtcgccaaagcgcgttttctggcggaggccggatggcgaacgctgttgggcaataaagagcgtgacgaagagaacgacggtacgccgttaccggtggtggcgaaagacgacgagttgctgtgcgaaaagggcgaggtcgttgagcgtcagacccagccgccacgccattttaccgatgctacgctgctgtccgccatgaccgggattgcccgtttcgtgcaggataaagatctgaaaaagatcctgcgagcgaccgacggactgggaaccgaagcgacgcgcgcgggcattatcgaactgctgttcaggcgcggattcctgaccaagaaagggcgttacattcattcaacggatgccgggaaagccctgattcactcgttaccggagatggctgcccgaccggatatgacggcgcactgggagtctgtcctgacgcaaatcagtgaaaagcagtgccgctatcaggattttatgcagccgctggtcggcacgctttttcagttgatcgatcaggctaaacgcacgccggtacgtcagttccggggcattgtcgcgccaggcggtggcggcgagaagaaaaagagcgcgccccgtaagcgagcggcgaaaaaaagcccgccgtcagaagaggcgagcgtataa

SEQ ID NO: 73254 - DNA, 1044 bp, Citrobacter koseri
atgagcgagcacgctattcgtttaacgcaatacagccacggagccggttgcggttgtaaaatttcccctaaagtgttggaaaccatcctgcacagcgagcaggcgaagtttgtcgacccgaacctgcttgtgggcaatgaaacccgcgatgacgcggcggtatacgacctgggtaatggcaccagtatcatcagcaccaccgacttctttatgccgattgtcgataatccgtttgattttggccgtattgcggcgaccaacgccatcagcgatatcttcgcgatgggcggcaaaccgattatggcgatcgccattctgggctggcccatcaacaaactgtcgccggaaattgcccgggaagtcaccgaaggcgggcgttttgcctgtcgtcaggcgggtattgcgctggcgggcgggcactctatcgacgcgcctgagcccatcttcggtctggctgtcaccggcgtggtgccgaccgagcgcgtgaagaaaaacagcaccgcgcaggccggatgcaaactgttcctcaccaagccgctgggcattggcgtgttgaccaccgccgagaaaaaatcactgctcaagccggaacatcaggggctggcgacagaagtgatgtgccggatgaacattgcgggggcgtcgtttgcccatatcgacggcgtgaaagcgatgaccgacgtgaccggttttggtctgctggggcacctcagcgaaatgtgccagggcgcaggcgtgcaggcgcggatctgctatcaggacattccaaaactgccgggcgtcgaagagtacattaaacttggcgcagtgccgggggggacggagcgtaatttcgccagctatggccatctgatgggcgacatgccgcgcgaggtgcgtgatctgctgtgcgatccgcaaacgtctggcggcctgctgctggcggtcacgccggaagcggtagaggaagtgaaagtcaccgcggcggagtttggtattgaactgacggcgattggtgaactggttgacgcccgtggcggtcgcgccatggtagagatccgttaa

SEQ ID NO: 73255 - DNA, 552 bp, Citrobacter koseri
atggacgcactcgaattacttgtaaaccgtcgtagcgcctctcgtctggccgaacccgcgcctgcgggtgaacagttacaaaatattctgcgcgcgggcatgcgcgtacccgatcacaaatccctgcaaccctggcgtttttttgtgattgaaggtgaggggcgtgagcgcttcagcgctgttctggagcagggcgccattgcggcggaaggcgatgagaaagcgatagagaaagcgcgcaccgcgccattccgcgcgccactgatcatcacggtggtggcgaaatgcgaggagaaccacaaagtgccgctgtgggagcaggagatgtcagcaggatgtgcggttatggcgatgcagatggcggcgattgcgcaaggcttcaacggcatctggcgcagcggcgcgttaaccgaaagcccggtggttcgcgaggcgttcggctgtcgcgcacaggataaaattgtgggcttcctctatctgggcacgccgcagttgaaagcgtcaacgaccatcagcgtgccggacccgacgcctttcgtgacgtatttctaa

SEQ ID NO: 73256 - DNA, 1857 bp, Citrobacter koseri
atgcgaaccctgtggcgatttattgccggattttttaagtggacatggcgactgctgaatttcgtccgggaactggtgctcaacctgttcttcatctttctggttctggtgggcgtcggtatctggatgcagcttagcgatggcaacaccagccaacaaactgcacgcggcgcgctgctgttggatatttccggcgtgatcgtcgataaaccgtccagcaccaaccgcctgggcgtcattggccgacagctgtttggcgccagctctgaccgcctgcaagaaaactcactgtttgatatcgtcaacaccattcgtcaggcgaaagacgatcgcaatatcaccggcatcgtgatggatctgaaaaacttcgcgggcgccgatcagccttccatgcagtacatcgggaaagcgctgcgcgaatttcgcgatagcggcaagccggtctttgccgtaggcgacagctacagtcaggggcaatattacctggcgagcttcgccaataaaatctggctttctccgcagggtacggtcgatctgcacggcttcgcaaccaacggcctgtattacaaatccttgctggataagctgaaagtctccacgcacgtcttccgcgtcggcacttataaatccgccgtggaaccgtttatccgcgatgatatgtcgcctgccgcgcgcgaagcggacagccgctggattggcgagctgtggcaaaactacctgaacaccgttgcggcgaaccgtcagatccccgcgcagcaggtcttccctggcgcgcaggctatgctcgacgggctgagcaaagtggatggcgataccgcgaaatacgcgctcgacaacaaactggtggatgcgctggcgtctaacgccgaagtggaaaaagcgctgaccaaacagtttggctggagcaaagcagaaaacaactatcgggccatcagctattacgattattcgctgaaaacgcctgcggataccggcgacggtattggcgtcgtgttcgccaatggcgcgattatggacggtgaagaaacaccgggcaacgttggcggcgacacgacagcgtcgcaaatccgcgatgcgcgcctggacccgaaagtgaaagcgattgtgctgcgcgtaaacagccccggcggcagcgtcagcgcctctgaagtcattcgcgccgaactggccgctgcgaaagccgcaggcaagccggttgtggtgtcgatgggcggaatggcggcatccggcggttactggatctccaccccggcaagctacattgtggcgaacccgagcaccctgacaggctcaatcggcatctttggcgttatcaacaccgttgagaacagcctggattcgatcggcgtgcataccgatggcgtcgccacctcgccgctggcggacgtttctgtcaccaaatcgctgccgcctgaagtgcagcagatgatgcagctcagcattgagaatggctacaaacgctttatcacgctggttgccgatgcgcgtaagagcaccccggcgcagattgataaaatcgcgcaggggcatgtctggaccggtcaggatgcaaaagcgaatggtctggtagacagtctgggtgactttgacgacgccatcgccaaagccgcagagctggctaaactgaagcaatggcatcttgagtattatcaggatgaaccgacattcttcgacagaatcatggacagcatgtccggctccgtgcgcgcaatgctgccggaagccattcaggcgatgctcccggcgccgctggcgacagccgccagcgcggtaaaagcagagagtgataaactggctgcctttaacgatccacaaaaccgttatgcgttctgcctgacctgcgcgaacgtgcgctaa

SEQ ID NO: 73257 - DNA, 1017 bp, Citrobacter koseri
atgcagaagaaatcgatttacgttgcctataccggcggtacgattggtatgcagcgctcggaacagggttacattccggtatcaggtcatctccagcgccagctggcgctgatgcccgaatttcaccgcccggaaatgccggacttcaccattcatgaatatgccccgctgatggactcatccgatatgacgccggaagactggcagcatatcgcagaagacatcaaggcgcgttacaatgactatgacggctttgtcatcctccacggcacggacacgatggcgttcaccgcctcggcgctctccttcatgctggagaatctgggtaagccggtaattgtgacagggtcacaaatcccgctggcggagctgcgctccgatgggcagattaatctgctgaatgccctgtatgtcgccgcgaattaccccatcaatgaggtcaccctctttttcaataatcggctgtttcgcggcaaccgcacgacaaaagcgcatgccgatggctttgacgcgttcgcctcccccaaccttcagccgctgctggaagccggaattcatatccgtcgcttaagtacgccgcccgcgccgcacggcgaaggcgagctgattgttcatccgatcacgccgcagcctattggcgtcgtcaccatttatccgggaatttctgccgaagtggtgcgtaacttcctgcgccagccggtaaaagcgctgatcctacgttcttacggcgtcggcaacgcgccgcagaacaaagagttcctcaaagaactggaagatgcgagttcacgcggtatcgtagtggttaacctgacgcaatgtatgtctggcaaggtgaatatgggtgggtatgccaccggcaacgcgctggcgcatgcgggcgtggtcggcggcgcggatatgaccgttgaagcaacgctgactaagctgcactacttgttaagccagaatctggatacacagaccattcgtaccgcgatgacgcaaaatctgcgcggtgaactgacgccagacgaataa

SEQ ID NO: 73258 - DNA, 642 bp, Citrobacter koseri
atgacgacccgggccttactgctggttgatttgcagaatgatttttgcgccggcggcgcactggccgtccctgaaggcgacagcaccgtggacgtagcaaaccgtcttatcacctggtgtaaagcgcgcggcgacgcggtgatcgccagccaggactggcatcctgccggacacggcagtttcgcctgccagcatcaggcacagccctacagccagggacaactggacggtttagcgcaaaccttctggcccgatcactgtgtacaaaatagcgacggcgcggccctgcatcccctgctcaggcagaacgccatcgacgcggttttccataaaggcgagaatccgcaggtggacagctacagcgccttttttgataacgggcgccgccagaaaaccgccctggacgcctggcttcgtgagaacggcgtacagacgctgatcgtgatggggctggcgaccgattactgcgtgaagtttaccgtgctggatgcgctgcaactgggttatacggtgaatgtgattaccgacggctgtcgcggcgtgaatattcagccgcaggacagcgcgcacgcctttatggagatggcggccgctggcgccacgctgtatacgctggctgactgggaagaaacgcagggttag

SEQ ID NO: 73259 - DNA, 276 bp, Citrobacter koseri
atgaatcttgatgagatgatcgacagcatgacgccggaagtttatcagcgcttatctaccgccgttgagctgggaaaatggccggacggcattgcgctgacgccggagcaaaaagagaacagcatgcaactggtgatgctctggcaggcgcggcacaataccgacgcgcagcatatgaccattgataccaacggtcagatggtgatgaaaagtaagcagcagttgaaagaggattttggcattgcgccaaaatcgattgcgacgctgaaactgtaa

SEQ ID NO: 73260 - DNA, 414 bp, Citrobacter koseri
atggctaatcaaccctctgcggaagatctgaaaaaaaagttgtccgaaatgcaattctacgtgacgcagaatcacggtacagaaccgccatttaccgggcgtttgctgcataataagcgtgatggcgtctaccactgtctggtctgcgacgcgccgctgtttcattcccaaaccaagtatgattccggctgcggctggccgagcttttacgagccggtcagtgaagaatctatccgttacattaaggacttttcccacgggatgcagcgtatagaaattcgctgcggcaattgtgacgcgcacctgggacatgtcttttcggatggcccacagccgacgggtgagcgttattgcgtcaattcggcctcattaagcttcaccgatgatgaaaacggcgaacaaactaagggctga

SEQ ID NO: 73261 - DNA, 996 bp, Citrobacter koseri
atgactatcaaagtaggtatcaacggttttggccgtatcggtcgcattgttttccgtgctgctcagaaacgttctgacattgagattgttgcaatcaacgatctgttagacgctgaatacatggcttacatgctgaaatatgactccactcacggtcgtttcgatggcaccgttgaagtgaaagacggtcatctgatcgttaacggtaaaaaaatccgtgttaccgctgaacgtgatccggctaacctgaaatgggacgaagttggtgttgacgtagttgctgaagctaccggtatcttcctgactgacgaaaccgcacgtaagcacatcactgctggcgcgaaaaaagtggttctgacgggcccgtccaaagacaacactccgatgtttgttaaaggcgctaactttgacaaatacgaaggccaggacatcgtttccaacgcatcctgcaccaccaactgcctggcgccgctggctaaagttatcaacgacaacttcggcatcatcgaaggtctgatgaccaccgttcacgcgaccaccgctactcagaaaaccgttgacggcccgtctcacaaagactggcgcggcggccgtggcgcagctcagaacatcatcccgtcctctaccggtgctgctaaagcggtaggtaaagtgctgccggaactgaacggcaaactgactggtatggcgttccgcgttccgactccgaacgtatccgttgttgacctgaccgttcgtctggaaaaagcggcttcttacgaagacattaagaaagcgatcaaagctgcttccgaaggcccgatgaaaggcgttctgggttataccgaagacgacgtagtctctaccgatttcaacggcgaagtgtgcacttccgtgttcgatgctaaagcaggtatcgcgctgaacgacaacttcgtgaaactggtctcctggtacgacaacgaaaccggctactccaacaaagttctggatctgattgctcacatctccaaataa

SEQ ID NO: 73262 - DNA, 885 bp, Citrobacter koseri
atgattaacacaattttcgctctcccggtcatcgaacaaattacccctgtcctctcccgccgccagctcgacgagcttgacgtgatcgtcgtcgatcacccgcaagttaaggcgtcttttgcactccagggcgcacatttgctctcctggaaaccagcaggcgccgaagaagtgctgtggctgagcaacaacacgccgtttaaaacaggcgttgcgctgcgtggcggcgtaccgatctgctggccgtggtttggcccctctgcgcagcagggtctgccgtctcacggctttgcccgtaacctgccgtgggcgctgaaagcccacaacgaagacgacaacggcgcggtactgacatttgaactacagagcagtgaggcgactcgccagtactggccgcacgatttcaccctgcttgcgcgcttcaaagtgggaaaaacctgtgagatcgaactggaagcccacggcgaattcgaaaccacgtctgccctgcacacctactttaacgtcggcgatatcgccgcagttaaggtcagcggccttggcgaccgtttcattgataaagtgaacgacgccaaagaagatgtgctggcagacggcgtccagacgttcccggatcgtactgaccgcgtttacctgaacccggaagcctgtagcgtcatccacgatgatgcgctgaaccgcaacattgacgtcatccaccatcacaacattaacgttgtgggatggaaccctggcccggcactcgccgccagcatgggcgacatgccggatgatggctacaaaacctttgtctgtgtggaaacggcttacgccaccgcgccgcaaaaagccagcgaagaaaaaccgtcccgcctggtgcaaacaattcgcgtcgcaaaacgttaa

SEQ ID NO: 73263 - DNA, 747 bp, Citrobacter koseri
gtgaccaaactcaaacttctggcatttggcgtgcttatcgccacatcagctggcgtagcgcaagctgaaaacgacttgacgctgggcgctggcgttggtgtggttgaacatccttacaaagattacgatgctgatgtgtatccggtgccggttatcaactatgaaagtgataacttctggttccgggggctgggcggcggatactacctgtggaacgacaaagcggataaattgtcgattaccgcgtactggtctccgctgtactttaagccgggcgacagcgacgatcgccgactgcgcgaactcgacaagcgtaagagcaccatgatggcgggcctgtcttacatccacaataccgaatacggtttcctgcgcaccacgctggcgggcgatacgctggataatagcaacggcatcgtgtgggatctggcctggttgtaccgctataccaatggcgcgctgacgctgacgccgggtattggcgtgcagtggaacagcgaaaaccagaacgaatactactatggcgtttcgcgcaaagagtcctcgcgcagcggcctgcgtagctacgatccagaaagcggctggaacccgtacctggaaatcagcgctaactacaacttcctcggggactggagcgtttacggtacagcgcgttatacccgtttgtcggatgaagtgaccgacagcccgatggttgataaatcctggaccggcctgatctcaaccgggatcacctataagttctga

SEQ ID NO: 73264 - DNA, 327 bp, Citrobacter koseri
atgaatatattcgatcactatcgccagcgctatgaagctgccaaggacgaagagttcacactgcaggagtttcttaccacttgtcggcaagatcgcagtgcttatgccaacgcggcagagcggctactgatggctattggtgagcctgtcatggtcgatactgcccaggaacctcgactttctcgactcttttcgaaccgggtcatcgctcgctatcccgcattcgaagagttttacggcatggaagacgcgattgaacagattgtctcttatctgaaacacgcggctcaagggctggaagagaagaaacagatcctgtatctgtag

SEQ ID NO: 73265 - DNA, 1557 bp, Citrobacter koseri
atgcagcatgtgcctatttatgttctgagcgccaacggtgagcgtagtccggtaaacgatcacccgttatgcctgtttaatccgcaggaggacgcgcagattctggaaaaagagtacggcattccgcgccgctatctcggcaccattatgtcgccgtgggccgcgaaacgtctgcatgagttcggcggggatattaccaaattccgcgtcatcaaagtctggccgtccattctggaacagattgctatcgccaaaacagaacccggcgatgaaaacaaccaggatatttccgcgctggtcggcaaggtggatattcgtaaactcgaacaccacgcgcaaaacgacccggatgcctatggctattccggcgcgctgtgccgcgctaaccaggggatcatggagttcgtcgagatgtttaaagcaccgattaaagtgctgcatccgctgctgaccgccactcaggaaggtaactacaacgggacggaaggtatctccgccctgccgtttaacggcattattcttgcccactcgaacgaatccgaatgggtgactttccgcaacaacaaaaataacgaagccttcctcgaccgtgtttacatcgtgaaagtgccgtattgcttacgcatttccgaagagatcaaaatctacgagaagctgctgaatcacagtgagctgactcatgcgccatgcgcgccgggtacgctggaaaccctgtcgcgcttctcgattctttctcgtctgaaagagccggaaaactcgagcatctactcgaaaatgcgcgtctatgatggcgaaagcctgaaagataccgacccgaaagcgaagtcctatcaggaataccgggactacgccggcgtcgatgaagggatgaacggtctgtccacgcgtttcgcgtttaagatcctctcccgcgtgtttaactttgaccatgccgaagtggccgccaacccggtgcatttgttctacgtactggagcagcaaatcgagcgcgaacagttcccgcaggagctggctgagcgctatctggagttcctgaaaggttatctgatcccgaaatacgccgagtttattggcaaagagatccagaccgcctatctggaatcctattccgagtacggacagaacatttttgatcgttatgtcacctatgcggatttctggattcaggatcaggaatatcgcgacccggataccggccagctctttgaccgcgagtcactgaacgctgaactggagaaaatcgaaaaaccggcgggcatcagcaacccgaaagatttccgtaacgagatcgtcaacttcgttctgcgtgccagagcgaataacagcggtcgcaatccaaactggaccagttacgaaaaactgcgcacggttattgagaagaaaatgttctcgaataccgaggagctgctgccggtgatttcgtttaacgcgaaaacctcaaccgacgagcagaaaaaacacgacgattttgtcgaccgcatgatggagaaaggttatacccgtaagcaggttcgcctgctgtgcgaatggtatctgcgcgtacgtaaatcgtcttaa

SEQ ID NO: 73266 - DNA, 1284 bp, Citrobacter koseri
atgacctggtttattgaccggcgtcttaacggtaaaaacaagagcatggtgaaccgccagcgcttcttacgccgttataaagcgcaaattaaacagtcgatctccgaggccattaataaacgttcggtgaccgatgtagagagcggcgagtccgtttcaatcccgacggatgacatcagcgaaccgatgtttcatcagggacggggcggcttgcgccatcgcgtacaccccggcaacgatcatttcgtacagaacgatcgcattgagcgtccacaaggtggcggcggtggttccgggagtgggcaaggccaggccagtcaggatggtgagggtcaggatgaattcgtctttcagatttccaaagatgagtatctggatctgctctttgaagatttagcgctgcctaatctgaaaaaaaatcagcaacggcagcttactgagtataaaacccaccgcgcgggttttacctccaacggcgttccggccaacatcagcgtggtgcgttccctgcaaaactctctggcgcgccgcacggcgatgactgcgggtaaacgtcgggagctgcgcgcgcttgaggacgacctggacatcatcaccaaaagcgaacccgcgcagttgctggaagaggagcggctacgtaaagagattgccgaactgcgggcaaaaatcgaccgtgtcccctttatcgacacctttgatttacgctacaaaaattatgaaaagcgccctgacccttccagccaggccgtgatgttctgcctgatggacgtatccggttcgatggatcaggccaccaaagatatggccaaacgtttttatatcctgctctacctgttcctcagccgaacctataagaacgttgaagtggtctatatccgccaccatacgcaggcaaaagaggtggatgagcatgagttcttctactcccaggaaaccgggggcactatcgtctccagcgccctgaaattgatggatgaggtagtgaaagatcgctacgacccggcgcagtggaatatctacgcggcgcaggcttcggatggcgataactgggcagatgactctccgctgtgtcatgagattctggcgaaaaaactgctgccggtggtgcgctattacagctatatcgaaatcacccgccgcgcccaccagaccttatggcgcgaatatgagcatctgcaatcgacctttgataactttgcgatgcagcatatccgcgaccaggatgatatctatccggtcttccgtgaactgttccagaaacaaagtacgacaagtaaagactag

SEQ ID NO: 73267 - DNA, 771 bp, Citrobacter koseri
atgagtgcgaatgaaaaagcgggccatacatttttagcaagcctgggcaaaacccgtctgcgtccgggcggcattgaggcgacggagtggctgttcagccagtctcagctgacgccgggcagccaggtgctggaagtggcatgcaatatggcgacgaccgccattgagttggtgcaacgttttggttgttcggtctacgccatcgatatggataaaaacgcgctggcaaacgcgcggaacaatgttgcggcgcacgggctggaaaatcacatccatgtcatggctgccaatgccaacagcctaccctttgccgataacagttttgatgtcgtgattaacgaggccatgctcaccatgtatgccgacaaagcgaaagcaaagctgatcggtgaatattatcgggttctgaagccgggtggccgtctcttaacgcacgatattatgctgaccagccagaagctggcggaaggtgagcagaaccagcttcagcatgtggtgaaatcgaatgtaagcccgatgaccaaacaaggctggcgcgatctgttgctggattccgggtttgagcaggttttacagcagaacggtgaaatgtcgctgatgtctccgcgagggttgattcgcgatgaagggctgaaaggggcgcttaaaattgtttataacgggctgtgcatccgtgacaatcgcagccgttttatcaagatgtttcgcttctttaaatcacagcgccatcagttgaattacattgcctgctgttcggttaaggggaaataa

SEQ ID NO: 73268 - DNA, 1488 bp, Citrobacter koseri
atgaaattgcatcataaagcgctcaggctctttatctccgcaagcgtcattgtactgacgtcctcttttctggcttatgaattgatcgccagtgacagggcgatgaatgcctatatgggctatatcatcgaaaaggcagactcttcatttttgtatgacaagtaccagaatcagagcattgcagctcatttaatgcgcacgttcacggagcccaaaacaccaccatccgatgaacaacaatatgcgttatgccgcggatttgaaacagacagcaatacccacggcatcaatctcaccactcataataacccatcgctacatggaacactgcaaaccgccgaggcaagctgcgcgatcgtagctgacgacgctcctctgttgttcgcttttgatcaggcggtggcggcgaatcgtaaccagaaggattatggtaaagggctgggcactgtagaagataaattccactactatctggatattaaaaaacgctacgtctatttttataacctgattgactccagacaattttttatgcaccactggtcttttctgcgaaaaggaacgctgggaatcaaccataacgatattgatggtcaattcacagggcgaacagtgctctcaagcatttatcaggacgatcttacggaaaaaaatgtgatgagttttttaactcccgtttatctacatggaaagttaaaaggcatagtaatggtggatattaaccaggataacctgaagaatattttttacactcaggatcgtccactggtctggcgctatctggacgcgactctgttcgacctgaattcagagaaaaaaatcattgtccatcagagcgaaaataacctctttaattatgttaattatgttcacgatctgccaggcggaatccgtgtcacattatctctcgacatcctgtattttattgtctcatcatggaaactgttcgccttttacctgctcgttaccgctacgttactgaacatggtcagaatgcattttcgcctttaccataatgttaatcgtgaaaatatcagcgatgcaatgaccggcctctataaccgtaagatcctgacaccgcagcttgaacagcgtttgcagcgactggtcaacacaggcacctccgtgacgtttatcgccatcgatctggataggttgaaagtcattaacgacacgcaggggcatcaggaaggcgatcgcacaattacattgctggcaaaagccattgaagcatcggtgcgtaaaacagattacgcaataagactgggaggtgatgaattttgtgtaattcttatcgattcagttgtaccggcaacaactttacctgagcgtattgccaataagttgcgaatcatcgcgccagataaggcgattagtttttccgctggactttatcatatgcaacctgaggatacgatccaggatgcatacaaggcctctgatgagcaactctatctcaacaaacaacaaaatcatgcacgtttgtga

SEQ ID NO: 73269 - DNA, 504 bp, Citrobacter koseri
atgaatgaagtcgctaaggggatcacggctcaccagcgtttgattacccttttatcgcaggaaggcgccacttatcgtgtactcagccacgaggcggtcggtaagtgcgaagcggtttcggaaattcgcggcaccgcactgggccagggggcaaaagcgctggtgtgtaaagtgaaaggcaatggcgtcaatcaacatgtcctggcgatcctttccgctgaccagcaggccgatctcacccaactcgcaaaccatctcggcggactaagagcttcacttgccagccctgccgaggtggatgcgctgaccggctgcgtctttggcgcgattcccccttttagcttccaccctaacctgaagctggtggccgatccgctgttgttcgagcgcttcaacgaaatcgcgtttaacgccggtgtgctggaaaaatcggtcattatgaataccgacgattacctgcgcattgcgcagcctgaactggtcaactttcgccgagcgcaataa

SEQ ID NO: 73270 - DNA, 447 bp, Citrobacter koseri
atgtttgatgtcactctgctgatcctgcttggactggcagcgctgggctttatcagccataacaccactgtcgccgtttcaattctggtgttgatcattgtccgcgttaccccactcaatacgtttttcccgtggattgagaaacaggggctgaccgtcgggatcattatcctgactatcggcgtcatggcgccgatcgccagcggttcgctgcctccctctacgctcattcactccttcgtcaactggaaatcactggttgccatcgccattggtgtctttgtttcctggctgggcgggcgcggcgttacgctgatgggaagccagccgcagctggtcgcgggtttactggtggggacggtactgggcgttgcactgttccggggcgtgccggtcggcccgctcattgccgcaggcctggtgtcgctgattattgggaagcagtaa

SEQ ID NO: 73271 - DNA, 789 bp, Citrobacter koseri
atgattggcctgagactggatggctacgagcctgaccttcaccatgatgcggctgtggctttttgcattcgcgctcgcgaagatgagcttttcagtccgctgcatcaccatcgaaaagggcaactgatcctggcgctgcatggcgctattacctgcgaggtagaaagcgccatgtggatggtgccgccacagtatgcggtatgggttcccggcgaaattccccacagtaaccacgtcacggcgggggcggaattatgttttctgtttattgagccggatgcggtcgtgatgccggatcgctgctgtacgctaaaaataacgccattgtgccgggagctgattctggcgcttgccgcgagaacggatattcagcgtaccgagccaatgacgcagcgcctgacacaggtcttgtttgatgagcttccgcagcaaccacaggagcagatgcagcttccggtctccgggcatcccaaaatacgtcaaatggtagagacgatggcgcgtgaaccagcccgctggcaaacgctggggcagtgggcgagcctgttcgccatgagcgaacgcaatcttgcccgactggtggtaaaggaaaccggcctgagctttcgtcgctggcgtcaccagttgcagcttattctggcgttgcaggcgctgattgacggacacagcgtgcagcacgtcgcccaaacgctgggttatgattcaacgaccgcgtttatcaccatgtttaaaaaggggctggggcaaacgccaggccgttatctggccgggcttactgcttcccaataa

SEQ ID NO: 73272 - DNA, 1188 bp, Citrobacter koseri
atgactatttccccttcattacgcggcaaaaacggtgcattactgattgccggtattctgatgattgcgacgacgctgcgcgttaccttcactggcgctgcgccgttactggagacgattcgtgcggattacgggctaactaccgcacaaacgggcctcctgaccacgcttcccttgctggctttcgcgctggtctctccgctggcggcaaacattgcgcgtcggttcggcatggaacgtagcctgtttgccgccatgctgttgatttgctttggtattgccgtgcgctcgctgccttctgccggcttcctgtttaccggcacagccattattggttgcggtatcgcgctgggaaacgtgctgctccccgggctgattaaacgcgattactcacagcatgtggcaaaactgaccggcgcctattcattgacgatgggcgccgcagcagcggtgggttcggcaatggtcgtaccgctggcgttgcatggctttggctggcgcggcgcgctgttaatgctgatgctgtttcccctgctggcctttcttatctggctgccgcagtggcgcaacacggccaccgccaacctgagcagctcccgcgcgttacactcgcgcggcatctggcgatcctccctcgcctggcaagtcaccttattcctcggcattaactcgcttatctattacgttatcatcggctggctgcccgcgattttaatcagccacggctacagtgaagcgcaggccggatcgctacacggtctgctgcaactggcgacggctgcgccgggactgttgattccgctcatcctgcaccggttcaaggatcagcgcagtattgccgcgctggtatcgctcatgtgcgctctcggtgcggccgggttctggtttgtgccggaacaggcggtgctgtggacgattctgtttgggtttggctctggcgcgacgatgattttgggtctgacgtttatcgggctgcgcgccagttccgcacaccaggcggcggcgctttcgggcatggcgcaatctgtcggctatctgctggcggcatgtgggccgccgttgatgggtaagattcatgatgccaacggcgactggcacatcccgctaattggcgtggcggttctggcggtcgcgatggcgatattcggcctttatgccggacgcgatcgggagatcgcagcaaaataa

SEQ ID NO: 73273 - DNA, 708 bp, Citrobacter koseri
atggaactttcccctgttaaagacacgctacgtattgcgctggtgggtgattacaaccccgatattgtggcgcaccaggccattccccttgctattgatgatgcggccgccgtgctggagttaatggcggactatgactggctgacgacgcctgacatcaatagtgacgaagatttggtgggctatgatgccatctgggttgttcccggcagtccctataaaaataccgaaggggcactgattgctattcgctatgcccgtgaaaacagcattccttttctgggaacctgcggcggattccagcacgcgatcctcgagtatgcccgcaacgtgctgggctggcgcgatgcggcgcacgccgaaactgatgcttccggccggatggttatcgccccgttgagctgctcgctggtggaaaaaacggatgatatcgaactgagggcgaatacgctggtcgccaaagcctacgggcaggacgttatctccgaagggtatcactgcaactacggggtatcagaggattttgccgctgaacttgagaatggcgatttgcgggttaccgggtgggatgaggcgggagacatccgtgccgtggaactggtaacgcatccctttttcgttggtacgctttttcagcatgaacgtggcgcgctggcgggaaaacccgttcccctggtgcaggcgatgctgcgagccgcacggggataa

SEQ ID NO: 73274 - DNA, 348 bp, Citrobacter koseri
atgaaaattcagtgtaaacgcgtctacgacccggcagaaaaaagcgacggctaccgtgtactggttgacaggctgtggccgcgaggggtcaaaaaaaccgatctggcctttgacgagtgggataaaacacttacgccttcatctgaattacgcaaggcctttcactctgaattgattgatttcaagaactttactgagcaataccggagtgaactcgaccaacagaagcaggaaggtaaacggctggcggatattgcccgccagcagacgctgaccctgctatatgcggcaaagaacacagagcagaatcacgcacttgtcctggccgactggctacgcggattgtga

SEQ ID NO: 73275 - DNA, 255 bp, Citrobacter koseri
atgagattcatgtttgtcgcgctgccgtgcgcgttggcgctctccgcctgttcgtcgtcatcccagcccgaggcgccgaaacctccgcagataggtatggcaaacccggctgccgtctattgcgaacagaagggcggtacgcgagtgcccgttcaaagcccgcaaggggtacgcacggaatgtaaactacccggcggtgaagtgattgaagagtgggatctctggcgcagagatcatcctgccagcggtaagtga

SEQ ID NO: 73276 - DNA, 249 bp, Citrobacter koseri
atgggcattatttcatggattatctttgggcttattgcaggtattctggcgaagtggattatgcctggtaaggatggcggcggattcttcatgacgatcatcctggggatcgtcggtgccgtggtagggggatggatcagcacgttcttcgggtttggcaaagttgacggcttcaactttggcagctttgccgtagcggttatcggcgcgattgtcgttctgtttatctacagaaaaatcaaaagttaa

SEQ ID NO: 73277 - DNA, 2148 bp, Citrobacter koseri
atgaaaaaaatcaccagtgtgtgcccgtactgtggggccgggtgcaagctcaagcttgttgttgaaaataacaaaattatccgtgccgaaggcgcagagggtgtaaccaaccagaaccagttatgcctgaaaggctactatggttgggacttccttaacgacacgcggcttttgacgccacgtctgacccgcccgatgatccgctatcaaaaaggcggaaaatttacccccgtcagttgggatgaagcaatccgctataccgcacaacgcttatccgccattaaagaaacctttgggccccgcgccattatgacgacaggctcttcccgtgggacagggaatgaaaccaactacgtcatgcagaaattcgcccgcgccgtactcaataccaacaatgtcgattgctgcgcccgcgtatgccacggcccttccgtcgccgggttgcaggagacgctgggtaatggggcgatgagtaactccatcagcgatatagagaactccaagtgcctgctgattttcggctataactgcgcagactctcaccctattgtcgcgcgcagagtcattaaggccaggcagaacggcgccaaaattatcgtgtgcgatccccggcgcattgaaaccgcccgtattgccgatcagcatctgcaactgaacaacggctgcaatatggcgctggttaacgcctttggctacgttctgcttgatgaacacctttacgacacggagtacgtacaaaagcacacggaaggactggaggcctaccgggagaccgtaaaagattacgccccggaatccgtcgaacatttaaccggcgtccctgcccagcaggtgcgtcaggcgatgcgaacgttcgccgccgccccttccgccacggtcatgtggggaatgggcgtgacccagtttggtcaggctgtcgacgtcgtgcgcggtttgtcgagcctggcgctgctgacgggcaatctggggcgtcctgacgtcggcgtcggcccggtacgcggtcagaacaacgtccagggagcgtgcgatatgggcgttctgcctaaccagttccccggctaccaggacgtaacggatgcaaccgccagagagaaattcgcgcaagcctggggaatcgatgccagcctgatggatgacaaagtcggcacgcgtattaccgaggtgccgcacctggcgatggaaggcaaaattaaagcctactacatcatgggggaagatccgctgcaaaccgaggccgacctggggctggtacgggccggtttcgaggcgctggactttatcgtggtgcaggatattttcatgaccaaaacggcagaaatggcggatgttctcctgcccgcgacctcatggggcgaacacggcggcgtcttcacctgtgccgaccgtggcttccagcggtttgaaaaagccatcgaccccaccggagatgtgaagcgcgactgggagattatcagtctgctggcgaccgaaatgggctacccgatgcattatgaaagtaaccagcacatctgggatgagatgcgcgaactgtgtccgcttttctacggcgtcacctgggagaaaatgggcgatatggggcatgtgcagtggccgtgcccggatcttgaccaccccggcacaccgtatctttacgcacatagtcagtttgatacgcccagcggcaaaggcaagttattcgccgcaccgtggcgggctccggcggaagttcctgatgatgcgttcccgatggtgctctgtaccgttcgcgaagtgggacactattcctgccgctcaatgaccggcaactgcgctgcgctacaggcgctggcagatgaacctggcaacgtgcaaatcaacacgaacgacgcggaaaaactggggattcgtcatcgtgaactggtgtgggtgagttcacgtcgcggtaaagtcatcagccgggccgatgtttcagatcgcattaaccagggaacggtctatatgacctatcaatggtggataggcgcctgtaatgaactgactcaggataatcttgatccgatttcgaaaacgcctgaaaccaaatactgcgccgtgaaggtcgaagccattaccgatcagcgctgggcggaaaaccatgctgcccaatcgtacagcgatatgaagtcgcgtttatgcgaggcaattgcataa

SEQ ID NO: 73278 - DNA, 657 bp, Citrobacter koseri
atgaccaccatgaaatttgatactcgattaacctcgtcggctctcgtccttgcgcttgttgcgttggttattcctttcactgcgaactggcacgtacctctgctaaatggcgtcgtggtgttatggattgaaaatgggcaggcgctatggctactgtttggtgcgctatttaccgcctggtatatcaggccgttgtctcgccctgacggcgcaaagcagttttggctttgggcggtggtgtggtggctggtgttattagggcgaagcaccagctgggggcgcgactattttcctgatcatcccaaaatgatcttccgggggatctccgtcgtcctgatcgccgcgcttgtgcttccggtattgatctcaaagactttgcgccaggaaattgcgcgtcggctgcgtgaagaatccctgccgctgtggttgctaactgttactgcctgcgcgtttttaatttccgatacggtggagcatcatcggttactggcgccgctgttcctgcacagtaagcaatacaccgatttgattgaagaactgtacgaattgccgttcatgatcgggctttttttggttacgctgacgtttatgaaacgcgataaacaagatgaatatattgcgttgcagacggcggaaccgcagcatgcggaatattga

SEQ ID NO: 73279 - DNA, 183 bp, Citrobacter koseri
atgggcaaagcgacctataccgttaccgtaaccaataacagcaacggtgtttcagttgattatgaaactgaagcgccgatgacactgctggtcccggacgttgcggcagaagtggtgaaagatctggtgaacaccgtgcgctcatacgacaccgaaaacgagcacgacgtttgcggctggtga

SEQ ID NO: 73280 - DNA, 363 bp, Citrobacter koseri
atgcttcaaattccacaaaatcatatccatacacgctccactccgttctggaataaagacaccgcgccagccggaattttcgaacgccaccttgataaaggaacccgacctggggtttatcctcgcctgtcggttatgcagggggcggtcaaatatctcggatacgcagatgaacacagcccggaaccggaaaaagtgatgatcattgaagccggtcagttcggcgtttttcccccggaaaaatggcacaatatcgaagtgatgagcgacgatacctactttaacatcgacttttttgttgcaccggaagtgctgatggaaagcgccagccaacgaaaagtcattcataccgggaaggagtaa

SEQ ID NO: 73281 - DNA, 639 bp, Citrobacter koseri
gtgttcgcagagtatggagttctgaactactggacgtatctggttggggccatttttatcgtgctggtgccggggcctaatacgatatttgtgctgaaaaacagcgtcgggcgagggatgaaaggtgggtatctcgccgccagcggggtgttcattggcgatgcggtgctgatgtttctggcgtacgcgggcgtcgcaacattaataaaaacaacgccggtgctgtttaatatcgttcgttatctcggcgctttttatctgctgtatcttggtgcgaagatcctttacgccacgctcaaatcgaaagggagcgaagtggcgcatgatgaggttccgtttggcgcaatctttaaacgtgccttaattctgagcctgaccaatcccaaagccatccttttttacgtttcgtttttcgtccagtttattgacgtcaatgcgccacacgcggggctgtcattttttatcctggcgacaacgcttgaagtggtgagctttttctatctgagcttcctgattatttcgggcgcttttgtaacgcagtacattcgcacgaaaaagaaactggcgaaggtggggaattcccttatcggtttgattttcgttggttttgccgcacgtctggcgacgcttcagtcataa

SEQ ID NO: 73282 - DNA, 651 bp, Citrobacter koseri
ttggcgattcattttgaaaaattagcagtagctctgggaatgcttctggttagcggacatgcgcttgcgcatgggcaccattcacatggcgcaccgctaacggagatggagcaaaaggcggcagaaggcgtttttgacgataaaaacgtgaaagacagggtgctaacggactgggacggtatgtggcagtctgtttatccgtatctggtaagcggggagcttgatccggtatttaaaaagaaagcggagaaagataacagcaaaacggccgaggagattaaggcctattaccgtaaaggctacgccaccaatgtggatactatcggcattgagaatggcgtcatggaatttcacaccggtaatcaggttgagtcctgccaatacgattatgccggacacaagatcctgacctatgcatccggtaaaaaaggcgttcgctatctgtttgagtgtaaagatgcgaagagcaacgcgcctaaatatgtgcagttcagcgatcatattatcgcgccgcgtaagtcgagccatttccacatctttatggggaacacctcccagcaggcattgcttgaagaaatggataactggccaacctattatccgtaccagctgaaggccgaagaggtcgtcgacgagatgttgcaccactaa

SEQ ID NO: 73283 - DNA, 2445 bp, Citrobacter koseri
atgaaactcacaagacgtgactttatcaagacggctggagcggcaaccgggactatggcgatttcttcggtgatcccaatgcctgcctgggccgaaaaccaaaatggcggcgccatcctgactgccgcacgttggggggccgtatatgtggaggtcaaagacggcaaagttgtctcttcaaaaggcgcattacctaaaaccataccgaactcattgcagcaaaccgcgccggatcaggtacataccaacgcccgagtaaaatacccaatggtgcgtaaaagctatctggaaaatccaggtaaagcggacggtaaacggggaagcgatccctttgtgcgggtgagctgggaacaggcgctgaaactcattcatgagcagcatagccgtattcgtagcagctatggcccgtcctccatttttgcgggttcctatggctggcgctccagcggcgtcttgcataaagcgcaaacattgctgcaacgctatatgagtatggccgggggatatgcaggccataccggggattattccaccggggcggcgcaggttatcatgccatatgttgtgggatcggttgaggtatacgaacaacagacgacatggccgatggtgcttgagcacagccaggtggtggtgctgtgggggatgaacccgctcaacacgttaaaaattgcctggagcagtacggatgaacaagggcttgagtattttaatctgctgaagaaatcgggaaaaaccgttatcgcgatcgacccaatgcgctcagaaaccattgagttttttggcgacaatgcaacgtggatcgccccgcatatgggaactgacgtggcgatgatgctggggattgcgcatacgctggtgaaaaaagagcgtcacgataaagcgttcctggaaaaatacaccaccggttatccgcagtttgaagagtatctgctcggcaagagcgacaacgttgagaaaaccgctgaatgggcatccggcgtctgtggcgtacccgcagaacagattgagaaactggcggaaatttttgccagcaaccaaaccatgctgatggcgggctgggggattcaacgtcagcaatacggtgagcaaaaacactggatgctggtgacgctggccgcgatgctggggcaaattgggacggaaggcggcggtttcggtttctcctatcactattccaacggcgggaacccgacgcgtaccggtggtgtactgcctgcgatatcggcgcaaattgaggggggatcgtcggcagggaacgactgggcggtatcggatgcggtggtgaatctgcctgtggcgcgaattgtggaagcgctggaaaacccgggaggaaaatatcagcataatggtaaagagcagaccttcccggatatcaaaatgatctggtgggcaggcggcgcgaactttacccatcatcaggataccaaccgcttaatcaaagcgtggcagaagcccgagctggtggtgatttccgagtgttactggacggcggcggcgaaacatgccgatattgttctcccgatcaccacatcgtttgaacgtaacgatctcacgatgaccggagactacagcaaccagcatctggtgcccatgaagcaggtgattgcgccgcagtttgaggcccgtaatgactttgacgtctttgctgatttagctgagatgctcaaacccggcggcaaagcggtctataccgaaggtaaagatgagatggcgtggcttaagcaattctacgacgccgcgcaaaaggcggctcgcgctcaacgtgtggcaatgcctcagttcaatgcgttctggcagcagaataagctgattgaaatgcgcgagaacgaaaagaacaacaagtatgtgcgttatgccgatttccgccatgatccggtcatgaatgcgctcggtacgccaagcggtaagatcgagatctactcaaaaaccattgaaggttatcactacaaagactgtccgcctcatgcttcatggattgaaccggatgagtggaaagggtccgcggataaggatcagttacagttgctgaccgcccatccggcgcaccgtctgcacagtcagttgaactatgcgtcgttgcgaaaagagtatgccattgccgatcgcgagccggtgacgattcatccagatgatgcgaaggcaagaggcattgccgaaggcgacctggtacgcgtatggaatggtcgtggtcaggttctggtcggggcgcacgtcagcgacgggatcaagccggggatcatctgtatccatgaaggcgcctggcctgatatcgagaatggcatctgtaaaaacggcggcgccaacgtgctgacggcggacatcccgacgtcaaggctggcgaacggttgcgcggggaatacgaccctggtatatgcagagaaatttaccggcgaagccccaacgctcacggtatttgatgagccagagattgtcactctgtaa

SEQ ID NO: 73284 - DNA, 1095 bp, Citrobacter koseri
atgagaaaaataaataaaaccattttatggatgctgctgctttgcatcgttcttggcgcagtaattgttttagcggggcaatggacgttacataaaacatcgagcactgaattttgtctgtcttgccatacgatgcaggcgccttatgaggagtatacgggctcggttcacttccagaatcagaaggggattcgtgcagaatgcgcggattgccatatcccggaaggcggggtggattacctggtagccaagctccttgcctcgaaagatgtctatcatcagttcatcaccaaaaaaatcgacacgccagagaagtttgaagaacatcgtctggagatggcgcaaaccgtttgggcgcagttgaaagccagcgactccgcaacctgtcgtagctgtcatagcatggatgcgatggatcttgacgcgcaaagcgctgatgcccgcaaaatgcaccaaatgggcattcaggaaaaacaaacctgtattgattgccacaaaggcgtcgcccacttcccacccgaaataacaatggacgacagcgccctcaaagcgcttgaggcccagtctgcatctacccccgcatctgcaaaaacgctctatgccgtaagcaataccgcacttggcgatctggcaacggtctatccggccacgcaaatgcatgtcctgaaatcgacggaaacgtcacggctggtggagattcgcgggagccagatgcaggggagcgagcaggttatttactacgcggcaggccagcggttgatccttgccagcctgagtgagaaagggcagcaatcactcaacattttctctgactggaaaaaagatgattacggtaacgcgtggcgggatgtggcgctacagggcgagtggagtggctctgcgctcgccagccgcgaaccgatgtgggactacgcgcgcaaactcgacaatgtgtattgcgcaggctgccatgcgccgattcctgcgaagcattttaccctcaatgcctggccctctgtggcgaaagggatgggggctcgtaccaacatcagtgaaaacgaactggatatcctgagccgttacttccagtacaacgcgaaagacatgcatgaatag

SEQ ID NO: 73285 - DNA, 429 bp, Citrobacter koseri
atgtatcgttctattctggtgccgattgatatctcagaagccagcttgacccgtcagatcatcccgcaggttgaggcgcatgctaaaaccgcaaaggtgcattttttggccgtaataccttctgtcccattctatgcctcactgggtctggcctactccagcgagttcccggatagaagcggtcttcagtcaaaggccgccgtcaaactggaggaaattgttaaacaattcaatatccccgagggcaggagccagtcccatgttgtctacggcccgcccaaagatcagatcctcaaactggcggatgcggtagaagccgacctgattatcattgcgtcgcatcaaccgggtttcagcacctatctgctgggttcaactgctgcggccgttgttcgccatgcaaactgccctgttctggttgtacgctaa

SEQ ID NO: 73286 - DNA, 258 bp, Citrobacter koseri
atgaacataaagagagttgccggcacgatttcaatcgtattgttgacggcttgtgtcgactcagaagtacaacccgcgccctcttccgccagcccaatttgtcagggattcggctgcgtaaaaactcccgggaaacttcccagccgcgccgccacccataaaccgacaaaagaagaaagaaaccgtgtgatccggggcgagaaacccgattttggctccgaagagtggagtgtcgggggcacgctgcctggctggtga

SEQ ID NO: 73287 - DNA, 132 bp, Citrobacter koseri
atgggcacggaacatgaacgcattcggtcagtattaacggggctgcttatcgcgctgctgatgctgcttgtcatggccgggtggccttatcttgtgcgtatgatctccggttatatcgccgggtatctgtaa

SEQ ID NO: 73288 - DNA, 816 bp, Citrobacter koseri
atgcgcgcattgcctcgcagggtaacaatagcccgtcgcaacctggaactttgctttaaggcgttacctgcgaaggagcgtgaaaaattactgattaaaaattttgagtcggtaggcatgggggtacttgaaaccggtatcgcctggttctggtcagacaggcgtttacgcaaatggtttacggttacgggttatgaacatatggaaagtgcgcgagctgaaaataaaggcgtgcttctcatcggtatacactttcttactcttgaacttggggcgcgcatatttgggatgctcaatccgggcattggcgtatacaggccgaacaataacgcgctgtatgactggttgcagacgcggggacgtcttcgctcaaataaaaccatgctcgatcgctatgatttaaaaggcatgatacgagtgctcaaacaaggtgagattgtctggtatgcacctgatcatgactatggcgctcgtaacagcgtgtttgttcctttttttgatgttcccgatgcggcgactaccgcaggcagttacatgcttgtcagaagcgcgcgcccggcggttgttccttttgttccccgacgccgagcggatggaagagggtacgagctgatcatcctcccggatatcggccatgaactgtatgacgagggcaaggaaaccgttgcgaccagaatgaatcgggcgattgaacgcgcaatcagcctggctcctgaacaatatatgtggctacaccgtcgctttaagacccgaccagcaggcaagccggccctgtatgggaagaaggaaaacgcgattgagagtaacggcgaatag

SEQ ID NO: 73289 - DNA, 1251 bp, Citrobacter koseri
atggaaagcaaagtagttgttccggcggaaggtaagaagatcaccctgcaaaacggcaaactcaacgttcctgaaaatccgattatcccgttcattgaaggcgacggtatcggtgttgatgtaaccccagccatgctcaaagtggtcgatgccgctgtcgagaaagcctataaaggcgagcgtaaaatctcctggatggaaatttacaccggtgaaaaatccactcaggtttatggccaggatgtctggctgcctgctgaaactctggatctgattcgtgattaccgcgtggccatcaaaggccctctgactaccccggtcggcggcggtattcgttccctgaacgtggcgctgcgtcaggaactcgacctgtacgtgtgtctgcgtccggttcgttactatcagggcaccccaagcccggttaaacaccctgaactgaccgacatggtcatcttccgcgaaaacgctgaagatatttatgcaggtatcgaatggaaagccgactctgcggatgccgagaaagtgatcaaattcctgcgtgaagagatgggcgtgaagaaaattcgcttccctgaacactgtggtatcggtattaagccgtgttccgaagaaggaaccaaacgtctggtgcgtgcggcgattgaatatgccatcgctaacgaccgtgattctgtgaccctggttcacaaaggcaacatcatgaagttcaccgaaggcgcgtttaaagactggggctaccagttagcgcgtgatgaattcggcggtgagctgatcgacggcggcccgtgggtcaaaatcaagaacccgaacaccggcaaagagatcgtgattaaagacgtgatcgccgatgcgttcctgcaacagatcctgctgcgtccggctgagtacgacgtgattgcctgtatgaacctgaacggcgactacatctctgacgctctggctgcgcaggttggcggtatcggtatcgcgccgggcgcgaacatcggtgacgagtgcgcgctgttcgaagcgactcacggtactgcgccgaagtacgcgggccaggataaagttaacccgggctccatcattctgtctgctgagatgatgctgcgccacatgcagtggttcgaagccgcagatctgatcgtcaaagggatggaaggcgcgattgccgcgaagaccgtcacttacgatttcgaacgcctgatggaaggcgctaaactgctgaaatgttcagaatttggcgacgcgatcatcgcaaacatgtaa

SEQ ID NO: 73290 - DNA, 654 bp, Citrobacter koseri
atgcggcaattgataagccctgaaaataccatgcaaaaaacttcttttagaaatcaccgggttgagcgattcagctcacgacaagtcactaagcggcggaaagaaaaccagccaaaacgcgtggttttgttcaataaaccttacgatgttttgccgcaatttacggatgaggccgggcgcagcacattaaaagactatattcctgtccagggcgtctatgcagcaggtcgtctggacagggacagcgaaggtcttctggtgctcaccaacgatggcgcattgcaggctcgtctgacgcagcccggcaaacgtaccggtaagatttattacgttcaggttgaaggcgaacccaccgcagaagcgctggaagccctgcgcaatggcgtgacgctcaatgatggccccactctgcctgcgggcattgaggtagtggacgaacccgaatggctgtggccgagaacgccgccgattcgcgaacgaaaaagtattcccacccgctggctcaaagtgaccttatatgaaggccgtaaccgtcaggtacggcgtatgacggcgcacgtcggctaccctacgctgcgactgatccgctacgcaatgggcaactacacgctggataatcttgccaacggtgaatggcgagacgctaccgattaa

SEQ ID NO: 73291 - DNA, 462 bp, Citrobacter koseri
atgttcaaaccgcacgtcaccgtcgcctgcatcgtccatgcagaaggtcaattcctcgtggtggaagagaccattaacggcaaagcgctctggaatcagccagccggacacctggaagccgacgaaacgctggtggaagccgccgcgcgcgaactctgggaagagacagggattaccgcgcaaccccagcactttattcgtctgcatcaatggatcgcgccggacaacacgccgttcctgcgtttcctgttttccattgagcttgccaggatgtgcgccactgaacctcacgacaacgacattgactgctgtcgctgggtcagcgccgacgcgatcctcaacgcccccaacctgcgttcgccgctggttgccgagagcattcgttgctggcagaacgggcaacgttatccgctggcgatcatcggcgaatttaactggccgtttacagagggtgtcaagtaa

SEQ ID NO: 73292 - DNA, 1107 bp, Citrobacter koseri
atgtcagaaagcccaaaaaaagtgatcgtcggcatgtccggcggtgtcgactcctccgtttccgcctggctgttgcaacaacagggctaccaggtagaaggcctgttcatgaagaactgggaagaggacgacggtgaggaatattgcacagcggcagccgacctggctgatgcgcaggccgtttgcgacaaacttggcattgaactgcataccgtaaactttgccgcagaatactgggacaacgtttttgaactcttcctggaagagtacaaagcgggccgcacgccgaacccggatattctgtgtaataaagagatcaaatttaaagccttcctcgaatttgccgctgaagatctgggcgctgattatatcgccaccggtcactacgtccgtcgcgcggatgtggacggcaaaagccgcctgctgcgcgggctcgacggtaacaaagatcagagctacttcctttacacactcggccatgagcagatcgcccaaagcctgttcccggtcggtgagctggaaaaaccgcaggtacgcaaaattgccgaagacctcggtctgatcaccgcgaagaaaaaagactctaccggcatctgctttatcggcgaacgtaaattccgcgagttcctcggtcgctatctcccggcgcagccaggaagaatcatcaccgtagacggcgacgaaatcggtcagcaccaggggctgatgtaccacacgctgggccaacgtaaaggtctgggtatcggtggcaccaaagaaggcaccgaagatccgtggtacgtggtcgataaagatgtcgagaataacattctggttgtcgctcagggtcatgagcatccacgtctgatgtccgtcggcctgattgcccaacagcttcactgggtcgatcgcgaaccgtttagcggccccttgcgctgcacggtgaaaacccgctaccgccagaccgacattccgtgcaccgtgaaagcgctggatgacgaacgcattgaagtgatttttgatgagccggtagccgcagtaacgccgggtcagtcggctgtcttttataacggagaagtgtgcctcggcggcggtattatcgagcagcgcctgcccctgccggtataa

SEQ ID NO: 73293 - DNA, 642 bp, Citrobacter koseri
gtggcaaagaattattatgacatcaccctcgcactggcaggcatttgccagtcagcacgcctggtgcaacagctggcgcaccaggggcactgtgatgccgatgcgctacacgtttcactgaacagcgttatcgatatgaaccccagctctacgctgggcgtattcggcggcagcgaagcgaaccttcgcctcggtctggaaaccctgctcggtgtcctgaatgccagtagccgccaggggctgaacgcagagctgacgcgctatacgctaagcctgatggtgctggagcgcaaactgtcagccgccaaaggcgcgctggacatgctgggcgagcgcattaacggcttacagcgtcagcttgaccattttgacctgcaatcagaaacgctgatgagcgcgatggccggtatttatgtcgatgtcatcagcccgctggggccgcgcattcaggtgacgggctcacccgccgtgctgcaaagcccgcaggtgcaggcaaaagttcgcgcctcgcttctggccggtatccgtgccgcagtgctctggcaccaggtcggcggtggccgcctgcaattaatgttttctcgtaatcgcctgaccactcaggcaaaacaaattcttgctcatttaaccccggagttgtga

SEQ ID NO: 73294 - DNA, 1371 bp, Citrobacter koseri
atggaattatcctcactgaccgccgtttcccctgtcgatggacgctacggcgataaagtcagcgcgctgcgcgggattttcagcgaatacggtttgctgaaattccgtgtacaggttgaagtacgctggctgcaaaaactggccgcgcacgcagcgatcaaggaagttcctgcttttgctgccgacgcaaacggtttcctggatacgatcgtcgcgaacttcaatgaagaagatgccgcgcgtatcaaaaccattgagcgcacgacaaaccacgacgtgaaggcagttgagtatttcctgaaagaaaaagtggcggatatcccggaactgcatgcggtttctgagttcatccacttcgcctgtacttctgaagacatcaacaacctgtctcatgcgctgatgctgaaaaccgcgcgcgacgaagtgatcctgccgtactggcgtcagctgatcgacgcggtcaaagatctgtccgttcagtatcgcgacattcccctgctctcccgtacccacggtcaaccggctacgccgtccacgatggggaaagagatggctaacgtggcttaccgcatggaacgccagttccgccagttaaaccaggtggaaatccttggtaaaatcaacggcgcggtcggtaactataacgcccacattgccgcttacccggaagtggactggcaccatttcagcgaagagtttgtgacgtcgctgggtatccagtggaacccgtacaccacacagattgaaccgcatgactacatcgcagagctgtttgactgcgtcgcgcgctttaacaccatcctgattgacttcgatcgcgacgtctggggttatatcgcgctcaaccacttcaaacagagaaccatcgcgggtgaaattggttcttccaccatgccgcacaaggttaacccgattgacttcgaaaactccgaaggcaacctgggcctggctaacgccgtactgcaacacctggcaagcaaactgccggtttcccgctggcagcgcgacctgacggactccaccgtgctgcgtaacctgggcgtcggtattggctatgcgttgatcgcgtatcagtccaccctgaaaggcgtaagcaaactggaagtgaaccgcgatcgtctgctggatgaactggatcacaactgggaagtgctggcagagccgatccagaccgtaatgcgccgctacggcattgagaaaccgtacgagaagctgaaagagttaacgcgcggcaaacgtgttgacgccgaaggcatgaagcagtttatcgacagtctggccctgccggaagaagagaaaacgcgcctgaaggcgatgaccccggccaactatattggtcgcgccatcactatggttgacgagctgaagtaa

SEQ ID NO: 73295 - DNA, 1266 bp, Citrobacter koseri
atgtttgcactcgtagacgtgaacagcttctatgcgagttgtgaaacggtgttcaggccagacctaaaaggaaggccggttgtcgttctctctaacaatgatggctgtgttattgcccgttcagcagcagcgaagtcctttgttaaaatgggggagccctatttcaaacaaaaagagacttttcgccgtcacggcatcgtcgcgttctccagtaactatgagctttacgctgatatgtcgaatcgcgtaatgacaacgctggaagaaattagtccccgcgtcgaaatttacagcatagacgaggcattttgtgacatgactggcgtgcgaaactgccgtgatcttactgaatttggccgggagatccgcactacagtattacagcgtacacatctcaccgtcggtgtcggtattgcgcagacaaaaaccctcgcgaaactggctaactatgcggcaaagaagtggcaacgacagactggtggtgttgttgatttatcgaacgtgggccggcagcgtaaactgttagctgcgctgccagttggcgaggtgtggggtatagggcgacgcatctctaaaaagctggaggggatgggcatcgaaactgctcttgacctggctgacacagatatccggtttatcaagaagcatttcaatgttgtgctcgaaagaacggtacgcgagctgcgtggtgagccgtgtctggaactggaagagtttgcaccagtaaagcaggaaatcgtctgctcacgctccttcagtggtcgtatcactgattacgaagagatgcgtcaggcgattttcagttacgccagccgggcggcggagaagctgcgcggcgagcatcaatattgccggtttatctccgcgttcgtgaagacaagcccgtttgcactgaacgaaccgtattacggcaacagcgcctctgtgaagcttctgaccccgacgcaggacagccgggacattatcggcgcggccacgcgatgcctggatgctgtctggaaagatggacgccgttaccagaaggcaggcgttatgctcggcgacttcttcagccagggggtggcacaactcaacctttttgatgataacgcgccgcggcgcaatagcgacaaactgatgaaggtgctggatcatctcaacaccaaagacggcgtaggtacgctctacttcgccggacagggcatacaacagcagtggcagatgaagcgggagatgctctcaccgcgatacaccactcgatatgaagaccttttgcgtgtgaagtga

SEQ ID NO: 73296 - DNA, 417 bp, Citrobacter koseri
atgcagtttttcacgcctacagatctacgccatgtggcgctcccaatgtttagtgaccttgtgcaatgcgggtttccttcccctgctcaggactatgttgagtcgcgtatagaccttaacgaattgctggtgaggcacccaagcgcgacgtatttcgtgaaggccacaggagattctatgcgtgatgccggaatcggcgaaggcgatttgttggtagtcgacagttcacgaaaagcagggcatggggacattgtcattgcagcggtcgacggtgagttcacagttaagcgcctgttgctgcatcctgctgtcatgctcaagcctgaaaactctgtgtataaaccaatcatgattggaagtgaagacaatctggaggttttcggcgtcgtaacttacatcgtgaagtctgctggctga

SEQ ID NO: 73297 - DNA, 426 bp, Citrobacter koseri
atgtcgatcaagtaccgcgttagtgctacacttgcactctttcagaattcactgatttttcacatgttaaagctatttagtcgatatgtttcggttggtgttgtgaacaccgcgattcattggttatgctttgctggtttgcttcacttctttggcgccagccaggccatttccaatgttacggcattttgcgtggctgtaacttttagcttcttcgctaatgcaaagtttactttcaactctcaggctacgaccgggcgttacattgcgttcgtcgtattcatgggggttatggctatgctcactgggtttatcgcagatcaactcaaggcaccaccgattttaacgcttgtggcgttctcggctttcagcctgatcgcgggatttatctactcaaaattcatagtatttagggatgctaaatga

SEQ ID NO: 73298 - DNA, 921 bp, Citrobacter koseri
atgaaaatctctctgatcgttccggtcttcaatgaagaggccacgataccgattttctacaaaacggttcgggaattcgacgaattaaaacaacatgaagttgagatagtattcatcaacgatggcagcaaagacacaacggaatcaattatcaatgcgcttgctgtatccgatccgctcgtcatgccattatcatttacccgtaattttggcaaggagccagctttgtttgccgggcttgatcacgcaacaggtgatgctgttatccctatcgatgtcgatttacaagaccccattgaagttatcccgcatctgatagagaaatggcaggctggcgctgatatggttctggctaaacgcaccgatcgttcaacggatggaaggctaaaacgaaagaccgcagaatggttctacaagttacacaacaaaatcagcaacccacagatcgaagagaatgtgggtgatttccgtctcatgtcccgtgaggttgtggaaaacattaagctaatgccagaacgtaacttgttcatgaaaggcgttcttagctgggttggcggaaagactgacgttgtggaatatgcccgcggcgagcgcgtagctggtgactctaaattcaatggctggaaattatggaatctggctcttgaagggatcacctccttctcaacgtttccgctacgcatgtggacatacattggcctttttgtcgcaggtctgtcattcctgtatggggcatggatgattgttgataagttatttttcggcaacagcgtccctggctatccgtcgctgcttgtatcaatacttttcttggggggtattcaacttattgggatcggtgttcttggtgagtatataggaagaatttatatagaaacaaagaaaagaccaaaatatattttggggaaacgcaaaaaatga

SEQ ID NO: 73299 - DNA, 1599 bp, Citrobacter koseri
atgagaataacgaagatttttattgtcactttgacattcattgttataagtctgcctttatttggtcacttctggacgtcaggagacctgtccgcccattattataggctcatatctataaaacatcagttggaaacacatcagtttccgatgtatttcgatttcgtaactgataacatgcaagggtatggatattcatggaatttattttaccctccactgacagcttttctgtatacaattatagagctattaagctttaatagcattgatgctgttatacagttaaaaataagcatagcaataatctcagcaataaatttttttattatgtatttttctgtaaagagaattttcaactcttcacaaattgcttttatctcagcgatactatccgttacatcatactattttctatacaatcaatacactcgctctgcatttcctgaagctcttgctatgagctttgtacccttgttacttttggggctatttgggtacatcaacaacaataaaaataaaatttatttaccattgtcgttttcgttaatactgttaacaaatatacccgcaaccattgtcactcttatatttataactttatttgtagtaatctttcataagaaattcatagaacaatatcgagatgtaattttacattcatttatagttattggtataacgtcattttttatacttccgctttattacacatctaaaggtgacatttacgcctttacatctatgaaatcaagttatgaatcaatgtggaagctaaccataccagttattaacttaatcataccgacaagaacaacggagtaccctttcagacttattacaccgggatgggttataatggggctaataatagccttgttcaccatgaaaaaaaatggtgataaattatcttccatgcttgatgggcaccataaggtggctatttcaatatctttattattcataataatgtgctcacaaatgttcccatggaatcacataccaaaacagcttccggtacttaatttcattcagttcccctggcgaatgatgcttatatcatcgccaatcctgtgcattttcgctgctctaactcttgtcaaaatcgcccaagaatcccaagggaagaaaggtttaatttatattgtcatattttcatcaattattctttctatgtatgcgtcaacaagtccattcgataacaaggcgagactgccatggtatcaagtatatcttgattacatgcctaacaacatggcgagaaaaataaatgaaattaaaaaaaccaaaaaagaacctatagtgttaagtggaaatggaagtattgtaagcgctagattaactggcggctatccaacatataaatatatttgcatggatgattgtacaattcaacttcctgtaattccttatagaggatatgaggtagaaggagttaaatctttttctgaaaacaacatggggttgatgcaggttaacgtatcaaaagggagtgggcaaataaatttaaaatataatccaattattatctacatatcatacggaattacgttaatcacaataatattgttgttatattttacaagaagaaaatcatga

SEQ ID NO: 73300 - DNA, 2037 bp, Citrobacter koseri
atgaccacctataacaccaatgaacctcttggttctgcatccgccaaggttctttacgataacgcacagaactttgatcacctttcgaatgaccgggttaatgaaacatgggatgaccgttttggcgtgccgcgccttacgtggcatggaatggaagagcgttataaaacagcgctcgcgaacctcggcttaaatccagtcgggacatttcagggcggggcggttattaattccgccggtgacatcattcaggatgagacaacaggcgcatggtatcgctgggatgatctaacgaccctaccgaaaaccgttccgccaggctctactccagattcatccggcggtacaggtgtcggaaaatggctggccgtagatgtcagcgatgtcctgcgccgcgaactggcgctgccaaccggtgcagatcagatcggctatggtgatgtgacggttgcagaacggctgtcttatgacgtgtatttcacggggggaagcggcgcaacaaaagaagaaatccaggcgtttttagatgagaatgctggtaggaactgccacttccccccaggtgattttgatattgaatggggaatgatcccacgaaacacgaccattaccggtgcgcaggccgtcacggtgcgttcacatagtatgcgtcatgaggcgacgacactcgcgacgcttatcagtgatccgggatttacccgatttaacctcaaaggcacccccgcaacgtacgtcctgacagacgttgtagagggcgctgatgacccggcgatcagtgcaggcttatgtatttgcgaccacggaatctcaatcaacaacgttgtgctgatggggtggcgcaaacggacagacgggactcttgaagcgccatcgctgaccggggtggatgacgtcggggcaacggcgtgcttctcatatggcctgtttgttccggcagtgtcagggttaaccttgtctggtactgcggttatcggctactttgcgaatgatgcagttctcctcgactgctcccgatctgaccagaataacggttctggcaatacgttcaatatcaatgggcgcatcaacagtcaaagcatgtgcgatttgtcattcgataatttctttgcatggcctctcgacccaaaacagcccactcagttggtaagcgcgattagctcgtatgggttgaaactaaagggtactgaccgggatatccgggacgggactaaatacccgcaaggggctaacggctacgcgcttaactggatttggggcggcacaggaacgtccgacctgtttttctcaaatagcgtcattcgcggggtttacctcgatgccgcgataaacaccgcagagaaacccgcgaaccgaatgaacgattacgctacagacggatctgggagtggtacaacgtcagtcaacggttatccgaaagaatggcaggatgggcgcggcagcaagctattctttgttaacacgaccattcgtgtagggaatctctacatgaaccgggtagcgaacgttaacttggtaaacacctatagtgaagctggaacccactatatgactaaccttacgggtcgagtgagtattattggtgggcacaacggcttgggtgtcagtgacctgacagtcaataatgttgatgggtctgcccctacagcatataaccggctattctctgccaactggatctgtatcggcaccgccaacccaatgcgcctcggcccggtatacgagtcaggtagccatgcgtacctgcggccacacagagacggcactatttcattaggcactgatgaagggactggcgtaggtgcgttacgttatcgctacgcagtcatccacgtagtatctggttcttttggtaacattacttctccgaacaacgtcatacaggctaacaaacctgtgcggataccgagctttacgaccgcactacgcccttcattaaacgcagcagatgcaggagcgcagatactggatacaactcttggttatgctatcacatggacaggaagtgcgtggaaagatggtgtgggtaatatagtttaa

SEQ ID NO: 73301 - DNA, 522 bp, Citrobacter koseri
atggcggttcagttaaaggatgttgtgttacacgaggttgggcattggctctcatggaaattacaaggtggtattgtcggccctatagagataattaatgattctctttcagggccgaaagggtcgaccactataatacctgactggaacatttatgatgtcaatgacgtaataacattcaccaaatccagaataattactttatggtctggtgtgtatgcacaggcatttaatggtattgcatataatgcagccaccgtgagaagagagtttaatgcaggtggaggagggcgtcttgactggttaaaagcgcatgaatacttgctgctattgaaaaatctttacggcaatagtatcagttttgaatcgctgcaccatcaagtagatcaggaaaccgcaacactgatagctgataattattcagtagtaaggaaattatcagatgcactttgtctctctgttgaggaagaggataaaaaatacactttccaagaaaatgagatcttgtctttcatcaaataa

SEQ ID NO: 73302 - DNA, 2718 bp, Citrobacter koseri
gtgaccattagaatttatccttcccgattacctggcgaaccgctggaaacgcatgaacatagtgctatcacgatccatcagtggatgacgcggaacgttgataattatcgcgctgatatgaaacatccgatcgccattgaagtggacggcgtgaatatcccggctgcggcatggttcgattatgcgatcagcccgacaagtgatgtgcgcatttatccggttcctcatggcgccgttgcgctggcgtggattgccgttgctgtttcggtcgcatctgtggcttatgcgctgttctttgcgcctggcgcatcagatcccggtggtttttcttcgtcgacaggcgattcactggacgttaacccggcaaaagcgaatcgtgcaaaactgggcgatccaatccgcgagctgttcggacgccgccgaatttaccccgattatgtagtgcagccggtaacccggttccgcccggacgatccgacagtgatgaccgttgaaatgttcgttgctctgggattcggacaattttcattcggcgaaggggatatgcgtgttggtgccacaccagtttcatcgcttggtgatggtttcacgtacaccgtttttcagccaggtcagaatgtggctggtgatcgccgtagcgaaaactggtttaactctaccgaggttggcgggacgtcatcgggtgccgggctggatatggcccagaccgcgccggatacggatgatgttgtggcgcagtcgctgacggtgtcgggaagtacaatcacatttaacggattaagcgctgacgacgatactgcaacaaacgagctgcctgattcctgggttgctggtgcgacggttgagctaatcgtacccgatcagtttgttgttaccaacgatggcgcatacagccgtattaccagtgacaatctggcggaaatcgccccttacgtcggaatgccggtaacgctctggtacaacagcgtcgactatagcctgtttatcgcttcgtatacgccgcatgcagacgcgacagaggaagaagaggaagtcaccgcgtctataacgctggcttatgagaatgaaaccggcgcgccttttacgggtattcctgaggggtatatcaggctttctgtttctcacgctggatatcagttcaaaattttcgacgtggacggcaccagtgtgactcttcaacgcttgattgacggtgttgtcgataacacatggccgggtttcgtggcgcgtaccgtacttgattttgaggcatctggcgttaaccagaatgactcctggatggggccatttctggcatgcccggataatgaaaccatcgacatgtttgaagtgaatttcttcttcccgaatggcatttgcgggtacgacaaaaaagggagaaaacaaaacagaacggttcgctgggaagttcagtaccgcgtttatggttctggttcgggatggatgagcaaaaccggttcgtataacacaaaaaatattaatggccttggtttcactgagcgcatcacgctgaattctcccggtcttgttgaagtgcggtgtcggcgcactaacgagcaggggcaggataacagccgagataatatgtactggcaatcattgcgtggccgcctgctgaccaggccgtcatcgtacgctggcgtaacgacgatgggcgtcacggtggaaaccggcggtaagctggcggcgcagtccgatcgccgggtgaacgtggtagctacaaggatttacgacactggcgcggcgcgcagcatctccggcgcgctgtactatgttggtaactcgctggggctggatatggacaccgacgccattgatgcgctggaaagtgcgtactggacgcctgacaatgagtttttcgacttcgagacgactgacagcacatctgcgctggaggttttgcagaagatcgccaacgccgggaaaagctattttctgctggcagacgggcttgcctcggttgcgcgcgaaggcgttaagccctggtcgggggttatcagtccacatgagatgacagaagacttgcaaaccgcgttcgtggctccgtcttacgacgactatgacggcgtggacgttacgtatatcaacggcaccacctgggcggaggaaacggtacagtgccggataccgggaaatccaacgcccgtaaaaatcgaagactatacgcttgacggtgtgctcgaccgggaccgggcatatcagatcggcatgcggcggctgattaagtacctacagcaacggctgacgcatacgacattaaccgaactggacgccctttgctataacgtcggcgaccgcatagtgctgacagacgatattcctggcaataaaactatttcctgtctggttgatgaaatgacaaccgaaaatgcgctgacaacattcacggtaaccgagccactggattggagttatgaaaacccgcgagtgatcatccgatttcaggacgggaccgcatcatctcttcttacggcaatcagggctgatgattatcaggtgacagtgcgatacctgaatgaatttgctgaaatcgtcctcaatgatccggctattgagccaccacgccttattttttgcgactcttcgcgcgttggctataacgccattatctctgagatcgcgcctcaatctgatggcacatgccaggtaacggcgaagcagtataaacccagcttctacgattacgacaatgccacttatcccggcaatgtaggatga

SEQ ID NO: 73303 - DNA, 381 bp, Citrobacter koseri
atgttcaatcaagataaatacctttcggtcagatggctgaagggcggtcgcgcttaccctgaacttgactgtttcggcattgtgaatgaggtgcgtcgcgatctggggcttcatgagtggccggatttcgccggagtgacgaaagatagtggagggcttaatcgagaagcgaggaaactgatgctttccctacaacgctgcgagccatgtgaaggtgcgggtgttgcctgctattcaggctcaactgttacgcatgtcggcgttgtcgtggtgcttaatggccgtctgcatgtggccgaatgcaaccctaaatccaacgtttctttcacgccggtggcacagtttgttcgccgcttcgttaaagtggagttctggaagtga

SEQ ID NO: 73304 - DNA, 489 bp, Citrobacter koseri
atgaccagtccgactttaaaacgactgtacgcctcttccggtgaagaggtcattatcaaaactttgcagatcaacatcggtgatgatgtcatgtatctctgcgatggctacgacaatataacagcgacgacggaaactggtgaagaggtcacattcatcgccagcgccatcgatgttgcgctaccggcgcggaacagtgacggcacgcaggacttgcagtttgctgtctcaaacatcaaaggagaagcatccacatccgtgcgtagcgcgctggaaaatctacgtggcgccacggtgacctaccgacaatatacatctgacgatttagccgcgcccgcagaccgtccttataccctgacggttaaaaacgggtactggactgcaacacaggcgcagattatcgcgggatacatgaatgtgctggatactgcctggccacgctatcgctacacactcccgttctatcctggccttcgttacatgagctaa

SEQ ID NO: 73305 - DNA, 465 bp, Citrobacter koseri
atggctgaaaaatactaccctcacgattatctccctatgccgcttcaggacggttatgcatttcagccagtcagtccgttaaagcgcaccgaaatgaccaccggccgcgcccgtcagcgccgcgcgtttatttcgacaccgacacaggcaaatgtgcagtggtttttcgaaaacgatgctcaggctcagctttttgagggctggtatcacgaaaccatcactgacggcgccgactggttttttatgcggttgcaaacgccgctgggcgttgaactctacaaatgtcggtttacggacatctatcaggggccgacgctggtcgccccgatttactggcagttctccgcgacgcttgagctgtggactcgacccgtcctcggcgatggctgggctgagttcccggattacatcatcaacagcagcatcatcgatattgcacttaacagggagtggccggaagcatga

SEQ ID NO: 73306 - DNA, 3042 bp, Citrobacter koseri
atggcagaacagacatcccgcctcgccgtcattattgacagcaccggcgcagaaaaaaatgctgaaagcctgaccagcgcccttcacgggcttaccgagtgggggcagaaagcagcggccagtgccgggaaggtgactaaagccaccgaggaagaatcttccgcattatcggaactgcttgaccgcattgatccagttaacgcggctctgaataaactggataaacaacagcaacaactcgcgaaattcaagtcgaaaggcatgctggacgatgagacctttgatgtctattcgaaaaaaatcgaagaggctcgtaatcgtctcaccgggttttcagagcaactgaaaaatactggcatgtcagcaaagcaaaccgcttttgcgatgcgcatactgcccgctcagatgaccgatatcgtcgtgggtctgtctaccgggcaaagtccgtttatggtgctgatgcagcagggaggccagttaaaggacatgttcggcggtatcggcccggcgattaaaggggttggctcctatgtgatgggcctgatcaatcctttcacgctggcggctgccgcggtcggcgtgctgggcgtggcgtactacaaaggcacgcaggagcaggacgctttcaataaatcacttatcctgacgggtaatcaggtagggaaaacatcggggcaactggcggatattgctgcgcgcgctggtatggcggcgaactctaccactggcaaagcggcatcgacgttaaatttactggtggagtctggaaaggtggtcggtgattcgctggagcgcgtgacaactgccgttgttaaaacgagcgaagccacaggtattgcgacagataaactggtggacgatttcaacaaaatcgccgcggaccctctggatgccatcaccaaactgaacgaccagtatcacttccttacgttggcaacatacaaccagattaaagctcttcaggatgaagggaatcagcaggaagccgcgcgcgttgccagcgaagcatattcttcgtcgatgattcagcgctccaatcagattaaggaaaatctggggtatctggaaaccgcatggaactcactggctaaagctgctggatgggcgtgggatgccatgcttgatgttggtcgtgaagcatccgtagagcaaaaaattcaggatgccagcagcgagcttgaacgcgcacagaaatcgcttgctgatttggagcgtggacaggccgctaatgcaggtccctatggtgcatggaaatctgatgatttagatcggcagcgaaaagcggtaactttgcttaaacagcggttatctacactgcaaagtgaaaaaacggcgcaggacgtaattaacaatacaattgatggatacaaccaacgccagcaaaaaagtattgaggcccagaaagttattaattcacttactgagcagacgttgtctaatgagcagaaaagaaaaaaggaacaggacaagctaaccaaagcaattaaagatggtgcagtaatcagcaaggaagaagaggctcgtttacggaaaaatatcaacgatagatacaaggatcccaaaaccccaaaaacacctaaaggtaaagcatataccgagaatgctggcgtgaggatgctggatcagttaaaccagcagtacgttactttaacctcacagttcgacacaacagagaaaataggttctgcgcaacaagctcttattaaatgggagcaacaactttctgatattaaatcgaagaaaactttgactgctgatcagaaatccctactggctaatcaggaggctattactgctcaattgcagaaaaacgcagctatcgaaaaggagatagcgctccgtaaagatgttgataagttgacagcgtataaaaatacgctttcttctggtctgcaaaatgatgctacagggctacaaaatagccttaatagcaacacggtgctttctcaggagcagaaacgtcagcaggaactgacaaaaatcgtcagtgagtaccaaaaaaagcaggtcgaattaaccaatcagagaacgaccgggcagatctcgcaaaacttatacgaccaggaaaccgccgctctacagcaggctctcaatcagcgccttgccatgcagcaatcctattacactcagttggatcaactgaatggtaactggcagttaggtgttcaaaatgggttgcagtcatatctgaacagtgtcccaacactttatgaatcagttactacagcagcaacatcaattctaaactccactgaaaccgccatttcatccaatctttcagcgatggtgcatggaacggaaagtttgagtgatggatttaaaaacatggcaacaggaatgggtgaagctgttattgatgcgctgacgaagatggcggcgcagtggctggtgtatcaggctgttcaattgcttgtaggaaaaacggcagcggctggcgcgtctgcatcaatgatcggacaagcaaccgcaatgtcacagattgcagcaattaacgcatatgcttctgcggctgcgatccctattacgggatgggcaatagctccagctgcgatggccgcagcagaggccgcaaccactcctttaattgcggcagttgccgctgcttcatcagccatgactgctggcgcaggcttcgctaatggtggttacactggcccaggagggaaataccagcccgccgggatagtgcataaaggcgagtatgtttttgaccaggctgcaaccaaccggataggcgtctcgaaccttgaggcgctgcgcaatggtggttctctggatgcaacgctgagcaagcccggtttcggtacgggggcgcagaacgtcaataacaacagtaattcaactgtattcagcccccagattcagcaggacttccatattcagcagggtgtaacgcctgagcagatggatatgtctctcgccaacaccgccaaaaaggcgacgacggacgcagttgatcaggtggcgaaccagattgtccggggtaacgggaaagtgggtaacgcaatgcgaggaacgtacaccggaaggagaacgacctga

SEQ ID NO: 73307 - DNA, 468 bp, Citrobacter koseri
atgattatcctaaacccacgaattgatgttggcggcgagcgctggtttacaccgctgaaagaccttaaacccattgaagggctgaaattgctcgtcagcagcattgataacgaccagtaccgctcacgtaatgcccttatccgccgccatattgaaaagatggatgccagttaccaggttggaaccagtgaatttagcttgtcagcggttggggaaattgactctgctgatgacctgctgatcgataactgcgcgcgttacctgctgaaagactggaagggtgttggtgagcttgttgatggcgaagaggtgccgatcgaatacacgccggaacgcggtgctgcacttatgaaacaggaaccagcgatttactggcaaattctggctgaagccgccagcatcgcccagggaaaagagcagcaaaagcaggaaaccgtaaaaaagccatcgaagcgcagaagtggctga

SEQ ID NO: 73308 - DNA, 1161 bp, Citrobacter koseri
atgtcgagcggcgctaaggtactctcggcctttatccgggagacgactccaggaattacgcctgcaggcgtctggaatcttttcaagcgtacaagctggggcgttggtccatcccagaataccaatgacaacgacgaaatcggcggtacccgaatggcacagggcgctacgctgggaacggtcgatgtaggtggcgatgtcggggcaaagttccgctacggccagcatgatgacttcctggcttcgtgctttggcgcggagtgggcgggcaacgtgctgacgatggggaatgaccgtatctctttctcactcgcaacatacgcttcggacgttggcattgcctctattattcgtggcgcgcaggtaagcgtgttccagttagaggtcccgaatgatggcgacgttaccgcgacagtcacattcgccgggctgggctggggctcaaaagcagatgatacgagttacatcaccggtactcccgcagataatgctggagaactgcgttactcgttcaaagaggtcactgcgataaacctgaacggaatcgacggtggtgatggcttctgtattgataccttcaacatccagttcgacaacaacgtccagacccagcgttgcatcggcaccggttcaccctatgccggggctaatatcccaaccacctttacgccgtcaggttcgatcacattgtcatggtctaaagctgcgtgggaggtctggagcaaaacacttaccggtgcaaccgtgccattcagtttcacgctggcgaatgacgaagggcaatacacatttaacttcccgaaagtgcaggtcgcaggcgactggccggatgggggcaataccgacattatccaggttcaactggatatcactgcggccgacgagtcaccgaccattacccgcgccgttaccattccagcaaccggcatcacggtaaccccggaaacagcttccgttgatgtgggcgatacaaccagcctcactgcaacgctggctcccgcaggcgcaacggatactgttacgtgggagtcatccgatcctgaagtggcaacagttagtgcgtcaggcgtcgttactggtgttgcggccggaacggcaactatcaccgctaaggcgcgcacttttaccgatacggcaaccattaccgtaactgaaccataa

SEQ ID NO: 73309 - DNA, 393 bp, Citrobacter koseri
atgaccctcacagaaattcgtaacgctgtcattgctcgcatgacggcgcagacggctattgcctctgatgccgtggattatccaaacggacccgtatttgatccaagtggtcgtgatatctgggctcgtttcaccaacatttcaggcatggccggagcaaatgaaatcggcggtggtccggttgttcaccgtaccggcgtcctcatcattcagatcttcgtccctgttggttctggctctctgcttatcactcaaacagcagacaaactccgtgaattattcgaattccaggatgacggaaaactcagttatttcgccgtatccgctgttcccgctggcgaaacggatggctggtctcagttcaatctacaaatcccttaccgcgctctgtag

SEQ ID NO: 73310 - DNA, 552 bp, Citrobacter koseri
atgactaaggcctggagtcttgaccctgcattgttcgctgacaaagtggaagaggatgtcggaaaactgcaacgcgttatagccattcagttgctcaatgagatcgttattcggtcaccggtcggtaaccctgaaatatgggctgtaaaccagacagcagttcaatacaacaaagcggtaagcgagtggaatgagtcgcagctctctaaccccgaaaatctgacaaaaacaggacggcttaaaaggaaagcccgcgtcaatgacagcatggatataaaacgtcccgcagaatatcgagcaggaacttttcgggcatcgcattttgttagcattggctctccaagcaattacgtgccaagcgagccagacccgaacggtgcaaacaccataaataacgggacgtcgacaattcttgcggcgccaagttattcggtcatctacatccagtcaaaccttccttattccgtaccgcttgaaaacgggcactcaaagcaggcaccggcaggcgtttatgcggtttcatttaatggtgtaacacaggcctacaaatga

SEQ ID NO: 73311 - DNA, 207 bp, Citrobacter koseri
atgcaatttcttctgctttatctaatctgcggactgcctctcggtcttttcgagtttgtatccgtattgctcgtcagggatggtggctcggtatggcttaaggctacttatggtgtaatcgccgtgcttttatggccgctaatttttgctgtactgttcgtgcctgaacggattctttgcaagtggcggagagtatgggatgactaa

SEQ ID NO: 73312 - DNA, 396 bp, Citrobacter koseri
atggtgtccatcatgggcattcgtgacgagcttcagaccgaaatcgccgcagcgttcgatgacgatcttgccgacgctgttaacgactttaccggctcttacgtcatccaaaccggatgggacccggtaacggaaacaggcggtgaaaccacagtgacctacaccgggcgtggcgttctgtcgaaatacagcctcaaccgcattgatggcgtcaatatcctgcacggcgacctgaaattaacagcgctgacgaatgaagttaccgacgaaccgaaagtcgatcacatcatcactgcaccagacctgattaccggcgaacagcaacgctacaaagtcattacggcaggaaccgatccggcgaaagcaacatattccattcagttgcggagggtgtaa

SEQ ID NO: 73313 - DNA, 411 bp, Citrobacter koseri
atgatcacctacatcacggtggcggacgttgatcagatactcggtgctgactggactgatgccagtaaaaaatcaaaatcggtactgatggctaacgcctggatgaatggtcttggcctgaaattaccatgtgacaaaaatacccacgaaatcattatccctgatgacgtgaagcaggctggcgcatatgcggcgcaggcggcagcaaatggcgggctgtatcagcagaaaacaaactctggttctttgctgagcaattccgttgatgctgacggcgtgagcgtatcaaagacattcgctgaacttgcggttaatagcactgcgcttcttgattccgatctgcaactggcgatggcgatgctcaagccatatggcgtcaatcagtcacaaatcaggctggtgagggggtaa

SEQ ID NO: 73314 - DNA, 264 bp, Citrobacter koseri
atggctggattgacgaaagagcagcgcgctcagcgagcggcggaaaaacttgctgctgaactggcggcgaaaaacaattctcaggagcaggagcaggagcaggagcaggagcaggagcaggagcaggagcaggagcaggatggtgctcagttggttgctatgttcactgacttcccggcattccccggcgcgcccaccaccgcagacgtgcatcctgacgaagtggacaactggaaggcggcaggctggcgcatagaggagtga

SEQ ID NO: 73315 - DNA, 1137 bp, Citrobacter koseri
atgtcgaatacactgaccgggttgatcccgactatctataccgctctggatatcgtttctcgtgagcaggtggggtttattcctgccgtcgcgcgcaataccaaagcagacgcagcggcgaaggggcagacagtaactgcgccggtcgcaccggaagcagttaccgaggatatcgtaccggggccgtctgcgccgaatactggtgatcagaacattggcactgtcgatgtaaaaattaccaaatccaaaatggcaccggtcaaatggaacggtgaagaacaactggctctcggcccggcaggtacttacaacactatcctagccgaccagttcacccaggcattccgcgcgttgtctaacgaagttgactccgatctgggggcactttattacggtacatcacgcgctgttggtactgctggcactaccccgtttggcatcaaagatgatctttccgacgcggcaaacacccgaaaagttctggaacaaaatggctctccgacgactaacctgcagatggttcttgattctgacgccattgccaacatgcgtggtaagcaatcggttctgttcaaagtcaatgaagccgggactgaacaattgctgcgtgagggtgttctggggcgtctgcagggcttcaatatccacagttctgctggagttaagcgcgctgctgccgctacagctgctggttacctggtgaatggcgccaagtccgaaggcgatatccttattgccattgataccggcacgggtgctattgctgcgggccagcttgtgactttcgctggtgacgataaccagtatgtcgttgctgctgcgaccgctaccactatcaccctggcagcaccggggctgcgtcaggacctggcagacggcgttgctatcactgtagtcggtggtttcactgcaaatatggcgtttgaccgcaacgcatttctgctggcttctcgtaccccggcgatgccggaaggtggtgacaccgctgatgacgtgatgaatgtcaccgacccagtttccggtatcaccttccagatcgcgctgtatcgtcagtaccgtcaggtgcgttatgaagttggcctggcgtggggcgtggcttccatcaaaccagcccacgcagtaatgcttctgggctaa

SEQ ID NO: 73316 - DNA, 765 bp, Citrobacter koseri
atgaaactgaagacagttgaagtaaatggtaagcactacgcagaagtcgatgctaatggtctgccggtttacgtgcatgacgacgggaaagaaattggcttcgatgccgctcaggctgtcagcaaaatctcggcgctgaatggcgaggctaaatcccatcgcgaagccaaagaagccgttgaaacaaaacttgctgctttctcagggattgaagaccctaaaaaggcgctcgaagcaatcgaaatgatgaccaaaatcgaccagaaaaaactgatcgatgctggcgcagttgaccaggtgaaagccgaaatcaccaaatcattccaggcgcaactggatgaggccaacaacaaaagtaaaacgctggaaggtcaactgtacgattcgatgatcggcggtagttttaccggctccaaatttatcaccgataaaatcgccatccctgccgatctgcttcaggcccgcttcgggcagtcgtttaaagtcgaagagggtaaagttgtcgcctatgacggcaccggcaacaaaatttattcccgctctaaaccgggcgaactggcctcattcgatgaagcgctggagttcctggtagagcagtacccgcaaaaagaccacatcctgaaagccagtggcaataacggcggtggttcacgaacgactcaacacgatgccgggcagaaaacaatgaaacgctcagcattcgattctctggatcagaccgggaaacagacagccctcaaagacggtatcaccatcgtcgactaa

SEQ ID NO: 73317 - DNA, 1113 bp, Citrobacter koseri
atggcgacggttaacgaacaactgcgtgatgagtccatagcgcacgctatctggattagtcgttacagtaccggcgttgccaacaggatggtgaagctgctcaacgaaagtgatgctgagttgacagcgcgcctgctggtggcgatggatggcatagagccgaacagctttacggtcacgcgtcttgaagcgctgctggcgagcgtgcgggaaattaaccgcactgcgataaacggcatgttttccagcctgtctactgaactgaatgacctggcgcaacatgaggcggggtatcagttgagtctctttgacgcgctgttgccggagttcgtgaccgacgttcatccgctggtgggtatctctccagacgctgtttatgctgcggcaatggcgcagccatttcaggggcgactgctcagtgagtgggcctcaaatctcgaagcggatcgcctcaaccgcatcagtaacgcagttcgacagggttttttgctgggagatacgaacgagcagatagcgcgcaaggttcgcggtcacgctaatcgcggctatcaggatggcgcgttacagatgagtcgcgccaatgccgccagcaccgcgaaaacggcagtggggcaccttgcggcgacggcgcgtaacagctttgctgacgccaataacgacctgatgaagggtaagcagtggctttccaccctggacaaccgaacgacgcagatgtgcaggattcgcgaccgccttaagtacacgctggaaaataagccaatcggtcataagattccttatttgcaggggccagggaaaattcatttctgctgccgttccactgaaaccttcatcctcaaatcagcgaaagagttgggtatcgatgttcgcgatatcccgccagcggaacgcgccagtatggatggtgttgtgcctggcgataccaactatcaggaatggttctcgcgtcagtcgttcgatcgccagaagcaaatcgttggcgagaagcgcgcccggttgattcgtgatggtggtatgtctcctgatgagttctacaccgataaaggcgaatggctgacgctggcgcagttgcgggaacgtgacgcacaggcgtttaaagaggcggggttgtga

SEQ ID NO: 73318 - DNA, 1404 bp, Citrobacter koseri
atgccagatatttcgacacccaacctcgactataacgacatggttgaggcgtgggacattaacgatgcactgatgggcggcacgctggaaatgcgccggcagggcgaagcctacctacctcgctggccgcgcgaggacaaagaggactataagaaacgcctgtctgttgcgacgctgctcccggcctacgaagaaagcattaagcaaaataccgggcgcgtatttgctgagccaacagtgttaagcgaaaaaacgccggaaaaaatcaaagattatgccgaaaacatcgatatggaaggcagtcgccttgatgtctgggcgcagcaattctttagcctggcgtttcagtatggtctcgcacatgcactggtggattacccgcgcacaaacgccgaagaaatccgcacaaaagctgacgagcaggctgctggtggtcgaccgtatgtaacgatgcttaatcctcggcaggtgatcggctggaaatcaaaggttgtcagcggaaaagttgtgctcactgagttacgcgtaaaagaagtcattgtcgtggatggtgacgacttcgggcaaaccaaagttgagcagatccgccacatcatgccgcgtaaagtggaaatctggcgccgtaacaaaggtgatggtggggaatccacctggactctttatgaagagtgggaaaccagtcgcgacgatattacccttgtaacgctctacaccaagaaaaccgggtttatgcgcggttctccgccgctgttgaatctggcattgctgaatatcaagcactggcaaagccagagtgagcaggacaacattcttcatgttgtgcgtgtgccgcttctgtcagtttttggtctggaagacgatcaggaactggtcattggctcatccagcgctactaaattcagcgaccgcgcaaagcagggtatggaatacaccgagcacaccggcgctgccattgaatccggcaaaacatcgctggatgatctggaaaatcagatgcgccaggcgggtgcgaaactgctgcgcgcagaaaacacatcaacaaaatctgacgaccagacgcatgaagagcatatgcaggaaaactcgccactgtacaccatggcgagttctctggaggatgcacttgataacattctgcaaatcatggctcagtggattggtgaaagtgatggcggcaatgttgatgtgcgcaccgaactggatgttactgctcagacgttcgattcatctgctgctatggccgttcagtccctgcgacaggggggcgacatccgccaggttgatgccgttcgcgtgcttcaggcgctaaaattcatcgaccctgacgcgaaaccggaagaggttatcgacgagctgaaaaaccagcaggtaacgttgatgggcggtaacaatggcgacggttaa

SEQ ID NO: 73319 - DNA, 1572 bp, Citrobacter koseri
atgaattacaaggctgtatggaagcctctgcccggatcacagtctctttcgctgagttgcccatgtaatgagatcctctacgagggaacgcgcggaccaggcaaaaccgctgcgcagttggcgcgttttcgccgtaatgtcggtgtcggttatggttcattctggcgcggtgtcatttttgacactgagtataagaacctggcagacatcatcacgcagtctaagcgtatgtataacctgttcggcgacggggcaaattttcttcggtccgcgagtgaattgcgatgggtgtggcctactggtgaagaactgctgttccggttcggaagcgaagctgatgattactggaacttccacgggcaggaatttccgtttatcggctttaacgagctgaccaaacaacctaactcagatttctacgaagcaatgttttcgtgtcgccgctcatcgttccggcctgaagactatccgcgaaaagatggatcgttgctaaaaccgatcccactcgaagtattcagcacgacaaacccatttggcatcggtcacacctgggtaaaaaaacgatttatcgaaccggcaccgcgcggaactgtacagcgtcacaaacaattagtgttcaaccctcaaaccgagcgggaagaagagatcacgttaacccgcgtcgcgatacacggttctttcaaagagaacccgtatctggatccgcagtacatagcaacgctgatgtccatcaaagacccgaaccgccgcaaggcatgggtagagggttcgtgggatgttaccagtggcggacgctttgaccatctatggagtgaggcgcttcacgtcattaagccgttccgcataccggatagctggaccgttgaccgttcccatgactggggtgagtcgaagccgttctctaatctctggtgggctcgcacggatggcactgtcgcgacgctgccggatgggcgtcaattctgcccgcccgccgggtctctgattctgattggcgagtggtacggttgcccgcctgacgaactgaataaagggctgaacatgtcatctaccaacgtcgcaaaaggcgttgcgtggattgataagcggctaacaggccaggaagttgacgaacctgatgagataaaactcgatggcgtcactcagggacaactcaacattatgccgggtatctgcaaaaaggttgttcccggcccggccgacagcgcgatctacaacactggcgatgatgaactttcaatcgctcagaaaatggaagtgcagggcgttaaatgggttgaggccaacaaaaagcccggctctcgcgttaatggcgccgcattgtttgccgacatgctggaggcggttgtcgaaggtaaaaaactggaatccgggataccagaaaaacctgcgttttatgtttttgattactgccgtggctggataagccgtattcctgtactcgtccgcgacagcaaaaaccctgatgacgttgacacgcaacaggaagatcacgactgggacggaactcgttatgaagttctgcattcaccgccgaagaaagtcggcaaagtcaccaaacttcggatgtaa

SEQ ID NO: 73320 - DNA, 489 bp, Citrobacter koseri
atggcggcattaaaaggtgaggtcaaagccttcatcgttcaatcgcttgcgtgcttcgacaccccttctcaggttgtggaggctgtcaaaaaagaattcggcatcacgatcccccgtcagcaggttgaatcccacgacccgacaaaagctaacggcaaaggcctggcgaaaaaatgggtggagatgttcaacgaaacccgcgagcgcttccagacggaaattgcagaaatcccgattgctaataaggcttatcggcttcgcgtactgcaacgaatgtctgtgaccgccgagaacatgaaaaacctcggcatgacggcccagcttctcgaacaggctgcgaaagaggtcggtgacgtttataccaacaagcaaaaggttgaacagaacgttatatcgactcacaacgttatgcccgttccatcctgtgacaacgttgacgactgggaagctgctgcgcagaaacaacaaaatgaggttcttggtggatga

SEQ ID NO: 73321 - DNA, 639 bp, Citrobacter koseri
atggctaacgatgacgagcgcaggccactcccgccggttaactttatcaatgctgaaaactggcagccatacaccaggctgatccccgccaatgaagtgcatgagtggataaacaggcaaatcctgagcgatacaggaagcatccataaccctgaccacgcgcacctgattgatgccgatctctgcttcatgtgggcgtccgattcgttcgcgaagaaagggcgctacgttctcggccaggccgaacaggtaatactccgcgccggcggctggcagaaggccagaatggaacagcagatgtatgaatggttcgggcgcattccgaagttcatcatcacgctggcagccgattactgctcacaatgcagtgaccttgagttttgcgcactggtagagcatgagctttaccatattgcccagtctaccgacgactatggcgcgccgaagttcaataaagagaccggtcagccggtactgacattgcgcggacatgatgtcgaagaatttgtcggtgtcgtacgccgatacggtgccagtaatgaagtgcaggaaatggttgatgcggcgaataagcctgcggaggttgcacatcttaacattgccagagcgtgcgggacgtgcatgctgaaactggcttga

SEQ ID NO: 73322 - DNA, 360 bp, Citrobacter koseri
atgtcaaaaaaagccacaatttcatattatgtaatggttaccttcgatattacggtcggtgataagtcgaacatctatagtgaggtttccgagctacttgaaaaaaatggacttaagaaggatttcgatggtaacgagcttcccgaaaatgtttacttagggaaaagaaaagctgaaattacttacgaaggtgaggggcttactcaaggagatattaaaaacagaggggcagagataactaaacgttactataagctcttaaaagatttctttaatgcagaaaaaattaaatataaaatattcatcacagccagccgtatgacgactacggccatacgatatacagttactaaaaaataa

SEQ ID NO: 73323 - DNA, 255 bp, Citrobacter koseri
atgcacaagcacaagccgctaaatctgctgccactgctgctggcctgtctgccactgttaaccagctgcgcaccgaagcaaaaaaactcgctacccgcctggacgccgcaaagcacaccgcaaatcttgccgcttccgtcagaagcaaaacagccggagtcgacgccggaatgctcgccgacatgctcggacgccttgcagaagaggctcgatattatgctgagcgatctgacgaaagctaccgagctggaatga

SEQ ID NO: 73324 - DNA, 531 bp, Citrobacter koseri
atgatggggtggagagcaaaacttagtgccgccgttctggcactggttctcgccggtgcgccagcgtcggttattctcgatcagttcctgaatgagaaagagggtaacagtctgacagcgtacaaagatggtggcgggatctggacgatttgccgtggcgccacaatggttgatggtaaaccggtggtgcagggcatgaagctgacgcaggcgaaatgtgaccaggtaaacgccattgagcgcgataaagcgctggcctgggtagagcgaaatatcaaagtaccactgacagaaccacagaaagcggggatcgcgtcgttctgcccgtacaacatcggctctggtaaatgcctgccatctggattttttcgtaagctgaacgcaggagaccgcaaaggggcctgtgctgaaatcaggcgttggatattcgacggcggaaaagattgccgcattcgctccaataactgctttgggcaggtttcccgtcgcgaccaggaaagcgcgcttacgtgctgggggatagaccagtga

SEQ ID NO: 73325 - DNA, 306 bp, Citrobacter koseri
atgagaatgaacgatcactcagggaacattttcacgcagtttttcgcgtgggttggaaccctcgcggcagcattaggttttaccacacaggacatggtctacatgttctttggtgctgtcggcctgcttatttctctgatctcttacgtaaatggccgaattgatgcccgtcgtaaacgtaaagaagacgagaagcgcacagccatgatccgcgattacctggatggaatcagtgataaacccattgctgagcgtccggcggctgtaagtgttgttgccgacgcgcttactaaggctggtgaatga

SEQ ID NO: 73326 - DNA, 321 bp, Citrobacter koseri
atgtcgcaaccaattaccgaacagcttcatttcagacccgcaagtgaaaaaccaaccaaagaatttaatgggcgttgggttatccttcttaacccctgtgatggttggcatattgctcaggtgctggcactcgaagaagacggcgaggtttaccatgttggtgcatacgaatttgctggtggagagtttgagccacatgatttctatgtcgcctgggcattgctgccagattcgataaatttggcaaaccattttgaagatcagcgactgagccctgagattagagaggcccgctggcgagaatgggtagcaaaaaactga

SEQ ID NO: 73327 - DNA, 684 bp, Citrobacter koseri
gtgaaaaatttatcctatattcgtcagcaactgattgcggccacggtagatctgagcggagcgacaaagggacagttaatggcctggctggagaacgcgcagttcgatacgaatacttatccccgcaagaggttgcgtgtacgcgatgaagttacgggaaaactgataacgctgaacaaccctccgatccccggaaaacaatcacacgccaaaggatcgcatatcccgctggtgcagccggtcgaatactccactgcttcatggcgtcgggcgctaatgtcactcgacgagcatcaaaaagcctggttgctctggaattacagcgaaagcacatgctgggatcaccaggtaatcattactcgctgggcgtgggagcagttcagtaagcaaatgggggggaagcgcgtggcgaaaaagacaatagagcgtctgcggcagcttatctggctggcggcgcaggatatgaaatcagcgctggcagggcgtgagcagtatcaatatgccgatctcgcggcgctggtgggggtagaggataaaaactggtccaagacctttacagcgcactggttgggtatgctccgactgtttgctgaactggacagggaatcattactatcattaaccaaaacacgttcgcagcaaaaagcgacaaattgtgagcaaagtattgcaaaagtagattaa

SEQ ID NO: 73328 - DNA, 387 bp, Citrobacter koseri
atgacaaccgaaacggaaaaagaactgagcaatgtcgttgcgttccccgagaggaaagaggatctgcgcgacgaactggcgatgcgacgggaagaaggcggcaaaatttattgtcatcacgattccgtctgggtggatgaaaaggagcgaacattgcgctgtcgtcgctgcgatgcgctggtggaccctttcaactacatcctgcacctatgtgataccgaaaacagatatgtcgagaatgtgaaatatctgcgtcgggaagaaaagcagcgccgacagaacatcgaaaagctgatccagattgagcgtaatgctaaatcaaggatcaggcgagcaggacataaagggatgttgccgctatggcaaaacgagagggtggacaagtga

SEQ ID NO: 73329 - DNA, 357 bp, Citrobacter koseri
atgaaaatttacgacatcacgccgatcggcaagcccagaatgacccgggccgacaaatggaaaactcgaccagcggtcatgcgttaccgggcattctgcgatgaagcacgcctgcgcaaaattcatctgccggagtccggcgcccacgtcacgttcgttatgccgatgccagcgagttggagcaaaaagaagcgagagcagttcaacggcaagccgcaccagtcaaaaccagactgcgacaacatgcttaaagcactgatggatgccctgtttgatgatgattccagcgtctgggattgtcgcatcacgaagctatggggcgagaaaggtcagatcatcatcgaggagggcgtatga

SEQ ID NO: 73330 - DNA, 207 bp, Citrobacter koseri
atggcgatgaagtattcatattttcaccacacggaatgcaccaccgagcaggcagagcgcctgattgccgattatcagtctcgcggcgtcagagccaaaaagagcctcaatcctgatttcctgacctggacagtcagcgcgaaattacaagagtgcgaacgtccggcgcggacgccgagaaccttccgacaaaaaggctgggggtga

SEQ ID NO: 73331 - DNA, 600 bp, Citrobacter koseri
atggcgcaattacaactcattaagcagtcaacaggaatcctgatccccgcgacgccggagaccagtgattttctgcaatcaaaatgcaagctcggctccgttctggttgccgactttaaacttgtacgcaatcctgcgtttcatcgccgtttctttgcgctcctgaatctcgggttcgaatactgggaaccaaccggcggcgctatttcttcgaatgaacgcaaactcgttaacggttatgccagattccttgcctcatacggcggcaatgaaagcgctctgctggacgctgccgagcagtatctggagcagatcgccagtcgccgtatcacgaacggcataagcctgtgcaaatcctttgacgcttaccgcgcctgggtaactgtcgaggccggtcactttgacgccatacagttaccagatggcacgctccgcaaacaccctcgcagcatcgcgttcgccagtatggacgaaaccgaattccagcacctgtataaggccgcactcgatgtcctgtggcgctggatcttgtcccgtaccttcaacagcagggaagaggccgagaacgccgccgcccagcttatgagctttgcggggtga

SEQ ID NO: 73332 - DNA, 249 bp, Citrobacter koseri
gtgagtaattcagctttgcaaacgtcagaagataactggtatgacattgtaagacggtctgacggctgcgtggtgtttagctttccttcgtcgggcaggcatcttatctatcgcgtcaatggcatggtttctatgcggcctttgctggatgatgaagaagtctttactcccaatggctttatgcaatttattcgccgtctcggctaccgggtaacgccaccttctgataatatgaaatcaacggtctga

SEQ ID NO: 73333 - DNA, 234 bp, Citrobacter koseri
atgaaagttgagttaactattgatcgaacaaagaaacttcctgatggcgcagtgccagcattagaagccgaactgttacgcaggctcagccagaactatgaaggggtcaaacttacaattcgccgcgccggggctgatggcctgagtattctggggggtgaaaaaggggacaagcagcgcattgaggagattcttcaggagacctgggaaagcgccgacgactggttttactaa

SEQ ID NO: 73334 - DNA, 264 bp, Citrobacter koseri
gtgagcactcattttttagcttgcgataaagtccgtaaatataagattgcaacacttgagaactataacggagagtccataattcagttgccaactgagcctcttgcttcagaccagacacaaacgccgattatgaaagattattttgttgttagacatttttttggtggggcaacatacttaatcgcaactcgagatggtgttttccctgaaaatcctcaagacgcgatcgcaaggtaccaaattcctccatatcagtgttga

SEQ ID NO: 73335 - DNA, 231 bp, Citrobacter koseri
atgagtgattttaacagtgcggcaaagtcacagaatgagcgaggcaaggttaacactggccttgccgtccaagtatcacgtaaaacggttgcaagagcatgtttgtcatcactaagaagcaagagcattttcgaaattacccagtggagggtaaagatttcctccgagcaaccgataaccttacttcaaggtagcgattcggtatacttaaaacaggaggaggagaagtga

SEQ ID NO: 73336 - DNA, 567 bp, Citrobacter koseri
gtgaatgaacctgtcattgctgtaattatagcatttttagccgcaattggcgcgatgattagtcttgttattactaaggaactaaaaacatctgagttccgtcaggcatggatctctgaattaaggcaagctctttcaaacctgcttggattttatgatgtattgagaagagactcggaagtttcagatgaagaacgaaaatctgcatacaaagggatcacagtagttcaatcagaaatttatctcaggctcaatcatagtaaaccttcaagagaagaaactgttctaagagatgccattaaattacttaatgttaaagtatcttctggaacaccttcttcagatttaaaagaagatatcgatgatttcaccatggcaagccataatgtattaaaaaaagagtggaagcgagtgaaaagaggtgagttattatacctttcaatgaagtggttatgcattattatctttgtaatatgtctcatctctttggttgtattcatttttagtcattggcccgcaattgtaagtgtgttattggggcgtgatattattatcttgagcatatag

SEQ ID NO: 73337 - DNA, 582 bp, Citrobacter koseri
atgaacgctaactcacagccaacgccagatcaagaaatcaagatcgaggtcatccgctggcatcaaaaactccaggaaatcacctacatcgaagctggtcaacacatgcgtgctttgaaccaactgatgtggcagattccaagtctggtaatcgccattaatggtgggctctggtatgctgctacactagttaatgaagcctcactttggatgatttttgcttttttaacagttttcgacctgctcactatttgcacgctttttcgacttagggttctgataggaaaaaaaataaccaaacaaaatgatattgaagaactatcgaaaaatagcatacttcaagaccttagtaataaatccggcataataatctcacctaccccagctcctaaaaaagagagcaagttcattgtagttggatgctggaccatatgcttattgctctgcgctattattaattttcatggctcatttaatccgtcgatattttcaaaacctagcgaaaacaataagtccgaacaaaacacaactcacctcatctgtgtttctaagacagcacccacaaatggagaaataaaatga

SEQ ID NO: 73338 - DNA, 606 bp, Citrobacter koseri
atgaccacatggaaattttatgatgacaatgccttacgtttatttaatgactatcaatccctaaattttaaagatatattttctgacgttgaatcctacttccttgcttcccgcggagatgctctggacgtaggtgctggttctggaagggattctgctgctttatttaaaatgggctacaatgtaacagctgtagagccaagcgataacatgcgaaatcttgcggccgaaaatcataagcactgtgatattacttgggtcaatgattcattgcctgaactaagaaagatcactcaatcactaaagacctttgaccttataattgttagtgcagtctggatgcacctaaatgaaaaccagcaggagaggtcgttatttactctattcaatcttctatccgccaatggagttatgatcattacattgcgattagggccagccgaacccgatagacaaatcagtgtgatttacacagaagatttaattgctctttcaaaaaaattagggctaacggttgaatatattagccctgtcaatacggatagttttaatagaccatccgttacttggcaaaaagtggttttatctaaaaaaaccacttcatag

SEQ ID NO: 73339 - DNA, 1245 bp, Citrobacter koseri
atgagcaacgcagcaatgattattgcaccgaccgacatcagcgaaaaaattcgcgaaattggattggcctataatcgctacctcactgaattccgcatccctgatgatcacaaaatcgtcgtcaattattcagcaggaaaggacagcacggccactctggcagttgcccatgcattgtttggcggtagagttcaggctgttatggctgatacagataatgaacacgagcttaccgtacagttcgcaaaaactatccatgaacagattggatgcgcgccagttcaggttgttaagcggatatataccgaggttgattttgaacgccgccgaggatacatccagaagaactgggttaagcgtcaggccattcgtatgggggcatataggggtgttgttatgccttcactcggccgctccgatacagcgtttgggcaggcctggctgcgtactgctgagcgttggggaattgaattcgaaactgcgctggatgctgctctgtctgttatgcatccaagcggaaatagctttctagactgcgcactgttgcatggtaaatttccgatgcttcgcgaccgattctgtaccgatgagctcaaaattcagatcgcctttgataaagctctgcaaccaatgctggatgatggcgacgtggtcgtccagtggtctggtgtacgggcagatgagtcatcaaagagagccagctatgagcgcttctccactgacaagcgtgacccggattttttgtataacttccttcccattcaccagtggacggccacagatgtattcgcgctccacaaatacttcgggatatcgccaaacccgctttacacgcagggagcctcacgtgtcggttgtatgaattgcgtgctgtgtaacaaagaagaaattgctgagacattttcgcgctggccggagcatattgagaagcacaaagagtgggagctgaaggttcgtctaacgtctcgctgggttcactggatgagtgttggcgagataaaccagcgctggatgaagtcgtttgacctgccccttggtagaaatgtgcagctctatgggttagaacctgaggtgcagcatattgattggtctgggttctatggacctcgcgcaaacctgaactcgccaagtgttgatgaagttgtggagtgggccaaaacaggtcgcggggggaaagtctacgacttggtcaaatcaagcctgaataccgaggtctgttcatcacgttatgggctttgtgagtaa

SEQ ID NO: 73340 - DNA, 414 bp, Citrobacter koseri
atgatcaccgagaaagacaacgttttttattgtgactgcggattctcctttgagagggggcgcagcggcgcgcatacctgtgaaactggtttgcgtaagaaacttgccgaatcggaagccaagctcgcggcgctggctgccgagaatgcggggcttaaggctgccaaaaagatcattcgccacctgaacgcgaaccgtgaagaggcgaatttttgcggtattgatgattgtcatatcgatgacgcggtggcagctatgatcaccccggcaaccgacgcgtacctggcagaagttcgggctcagggtgtggagatgtttgctgacagtttgaaagtccttgattgtcatgaacatccatattcaacggtggctaaagagtttaccgcccaactacgtcatggagtgaagctatga

SEQ ID NO: 73341 - DNA, 261 bp, Citrobacter koseri
atggccagaaagaaaaccgacaaagaacgcaccctgatcatcaaccggattatcgaacttgtgaaggagcagggacgcatcaccacgaatgacgtcgttgcgatgttcggcctgcaccggaccacagcggagaaatatctccgcgtagcggtagagcagggtggcctggttcgtcacgggcgctgcggaatcttccgtgacctgcgggcaactatcgactttgacctgaaacgtttttcacacaacaaggcggctgcatga

SEQ ID NO: 73342 - DNA, 687 bp, Citrobacter koseri
atggaaaccgtaattcaggtactggaaaaaatggggcgggcgacataccgcgaagttgctgaccgtcttgaaatcgacccggttgatgcgctcaccatgttacgtgagcagcgtgatcaggggttatgcgattttggagacggcggctggttcctcggtaccgtgaaaggtcagtctcagcagtcaacgcctaatgcacctgttcatccggcgccgcgcctgaaaggtgaggagccggaacccgtagatcctgatgtcgtccgacagcagctgcgtgagcagggggcaatgacgaccgtttcgctggccgcggccgtcaatcgcaatgcccgcggaatggtctctgttcttcgcgcgctggagcgccagggcgttgtggtgaagaacgggaagggcaaaggcgttacctggtcccttgctgttgtgacagaacccgttaagcaagaaccggtaccggaggcacctgccgcgccggaagaagcaaaaccggtcgaacagatcgtgagtgaaatcccctcgttcactgaagggcgcgccgcagtcgaagcggtaccagcggtgcgggacatttctcgcgaaatccgccgcaccagaaacaagctggagcaactgaccaaactgcgtgacgcggttcgtgttattggtcgccacagaaatctcgttcagcagctgacagggagggaataa

SEQ ID NO: 73343 - DNA, 690 bp, Citrobacter koseri
atgaccccggatctttatcgtgcaattcagaatcgcgacagcgaaatgctatcgcgcatggctggagattcttacgacggccgtaaggttgttaacagtgacgctgaaaagctggtggatatgctttttgaaaatctcatgcaggtatttccggcatccactcagacgaacctacgtactggcgatgatattcgcgttgcaaagcagcaatggatcgccgcttttgctgagtcaggcatcacctcccgtgagcagctttcagccggaatgcagaaagcccgatccagtcagtcaccgttctggccgtcgccgggtcagtttatttcgtggtgccgtgaggggagtggcgcgctgggggtcagtgtggacgacatcatgagcgaatactggcgctggcgaaagctggtttttcgctacccgaccagtgagcaatacccgtggagccagcccgtgctctatcacatttgccttgaactgcgcagacgcggtactgacggccagctcagcgagaaagagcttgttcgcgttgctggcgatttactccacgactgggaaatgcgtgttctcgatgggaaaccagttccaccagtacgtcgggcacttaccgcaccagatcaggatcgaggcccgactccggcgcagatgctgatggcgaaatacaaacagcgaaaagacgctggactgatttga

SEQ ID NO: 73344 - DNA, 999 bp, Citrobacter koseri
atgtcgaatgtcgcctacgccgattttgcggcgcgtaccgccgtcaggagcaaccggatggaaaaccagaagaccggattcatcccgttgtaccggagtgtactcaagcagccctggtcagaagatgtttacctgcgtacgttgtgggataacctgcttttgggcgctgccagccagccatacacagcgagctttaaaggtcgccaatggccgctacaaaccggacaactggtgaccacggcggccgatctgggcctgaaactacgtgacagaaaaggcaacccaacaagccgtgatgctgttgagagaatgctgacgttttttgtgcgtgaagggatgatttccattgaaggggagcggcaaagagggcgtgtgatcacgatctcaaattatgccgaatatgctcaaaaaatggacaatttgcccgcacaaacttccgcacataccagcgcacatatgcccgcacatggcgaagccagtaacggcgcgggtttggcggtaggtagcgcacatgaaagcgcacatacatccgcacaaacaagcgcacatcatgaacaatatatattaaatactaacgtatttaatgtacgtcagagaatttccaaagttgttcctgatgcagcagtccagactccgaaaggtgacaagtgggggacatctgacgatctccgctgcgcagagtggatgctggcgctgcgtgacatcaccaaaccatccctgaaaaaaccaaacatggctggctgggcgaatgacatacgcctgatgcgccagctggacggacgcacccacaaagagatttgtgagttgttcagatgggcctgcaaagactcgttctggtacaaaaatattctctcccccgcaaagctccgcgccaagtgggacacgttaacccttcaccgtgaagacactacccgcaagccacgcgcagatgtcagcgcaagcaaatccgaaaccggcccgcactggaacagtgctgaagcatgggagaaatttttatga

SEQ ID NO: 73345 - DNA, 255 bp, Citrobacter koseri
atgaatcatttggagttcatagaaaagcacgtccgggaagagttgatccgccagggcttcaccgtagcggtggctcaggggggggcatttcaggccgtcgatatgtacaagcgaatgagtcaggcaagcagaaaggggaggatttttgatgatgttttacgccacgcgaaattgtgggcagaaaagcaaacattaccggctgatcggtttgattcaaaacgggctaaacggggcaggcaacagggcttgttctga

SEQ ID NO: 73346 - DNA, 543 bp, Citrobacter koseri
gtgcattcaatttcatttcaacaaaataccgggtttcctccggccacgatgataaatcgcaatcagcctgatccggcggataagcatgaccagattcgtgctgccgttcgtgcgtggtcggcatcgctggacaaccaggacgtagtcgccgggatcatcgttgaagaatgggaacggcagggcggcgccgggttggattttcctgatgacttgagccgtaagcggcagaagcttttccgctggctggacagtgataccggatatgcgcgcgaaaacatccgccagctgactcctgcaatcctggctgttttgccgatggaatttcgtgggcgtcttatcggacaggattgtttcatgacgcgttttgcagcgatggagaaggaaatcagcgaggcgaaacaggccgtaatgctgaatgcgccaaagcatcagctggtgaaagaggtcagggaagggattgagcatctgctgaatatgttgccgggtgatgctgtcgttcaggttctgagtggtatcgcggccatagcgccgggtgtcatgtga

SEQ ID NO: 73347 - DNA, 234 bp, Citrobacter koseri
atgacagcacttgataaagcaattaaggctgctggttcagcgagaaagttaagcatggcacttggtgtaaccagtatgtcaattagccattggaaacatcgcgacagaggcattgtgccgccagattacatattaaaaattcacagcataaccggtgttacccctcacgaattgcgccctgatctgtatccgaacccaacggatggattaccggcgcaggaagcgagggcgtaa

SEQ ID NO: 73348 - DNA, 384 bp, Citrobacter koseri
atgagaaaagaagaacccaacaaagcattgatagcgcgactcaatgaggtctatgccagaggcattaccaaagcagatatggcgcgaatagccggagtctcgcctcaggcggtcaatagctggtttaaaaaaggcgttattagcaaaaaatcagcactggctatagccgatgctgttggcgtttcgatcgcctggctactcggggaagatgtcggcgagaaagatggtatgaagcccgacgagcagcgcctgctggaactctatcgccagttgccggaagaagagcagcagaacatgttgcggatcgtgtctctgcgccttaaggaactcgacgagctgtacgccaagtacatgggacggcggattaagggtgatgcggaataa

SEQ ID NO: 73349 - DNA, 909 bp, Citrobacter koseri
atggaagcaccttatcaattagaattcactgaaaacatttattattcaataggtaataaccccagcattaaagaaatcattgagtctcttcaaggctgggaagctattatcaaacaatctaaaggagtccttgcagagctaactggaagtgatatcctggatattgaagttagggttcaaaagttagaagtcgggagcctaactgaaaaaattcttatcaagttaggttttggcaacgaagagaattttgataaatttctcgaaaatgcgcatgaaaggtacatcggagaaggaaaaatgcgtagcgccttagtttggacggttatagcaggtgtactcgccacgggtatgtatttagccgtcaaaaacatggcacccaataatgcctcccacttcgaagcaaataataatataatcattaacataggtgctggcgaaactaacatttcacctgaaagaatacagtcggtgctcaatagtacattagttgataaaaaaaccgctgccaaaggtgctgtcaaaattttatctccagcgcgaaatgacgaaaatgcaacattaatgataggtagcgataacacttccgtaacaataccttcagatttaatctctaaaacaccaaccgaggttagttttgaagctgatacatatactcgagaccattacgatgttgaccttgagataagagctcttgatctcgacaatccgacaaagggatgggctgccgtgattcctggcttagttgatcgaagggtaaaactagttttggcacccgggattaaaccagaagacctatcccataaattcgccttccgcgctgatgtaaccattacttataaacttacgtcatctaaaggcgaagcatacaagccaacagaaatatttttaagcaaattaatcgcggaatga

SEQ ID NO: 73350 - DNA, 210 bp, Citrobacter koseri
atggattacgaggaactggcgcagttgcgctatcaggaaatgtgccggattgtgggtgatgttgtgtttgcgatggtggctgaagggcatgaaaccaaaagagtggctatagctgacgtgatacgaacggagatatcgaaggggctggataagtgggatgctgaccagattcaggcgatggaactggcggtgaagttgctggaagaatag

SEQ ID NO: 73351 - DNA, 273 bp, Citrobacter koseri
atgaaaattgatttagatctcaaggcgcagggagttgacgtttcaaccagcggttatcgcgattttgttaacgccgaaattcgcggcgttgaagtggatgatgtgctggaagaaatcgaaagcgatgtactgttcgctgccatcgacctgccggattacatcgactgggctgacaacaacagcaagttaccggaaattctggatcgtctttctcctgacgaggtcattagctggcttcgcgataacgggcatctggaggataacgatgattaa

SEQ ID NO: 73352 - DNA, 186 bp, Citrobacter koseri
atggagacgctattcgcactggtattaacggtcgcaatgaccaacggtgactttcaggatgtgattctcggtgtatatgacaaccagcaggaatgccaggccgcagctgtcgagcaaaaggttaatggtgagtgctggcctgttgagggaattattcgcaacggagagctgccagcaagcatctga

SEQ ID NO: 73353 - DNA, 159 bp, Citrobacter koseri
atgcagaaagaatgcggttactgccgcaaacccgttgaagaaggcaaagaagtaaagagcatccttttctatcgcaatggcaaccggcttgccaacaaagaaaaagaatactgctcaaagcaatgcgctgaatacgatcagatggcgcacgaaagttaa

SEQ ID NO: 73354 - DNA, 288 bp, Citrobacter koseri
atggaaatcgtaaaaatcgaaatgaacctgaaagcagtgaataaagaattggctgtattcaactgcgagaagaaagtatcaggcgttattcattcagccgaaacgggcgcggtcacggtcattcttgacggtggctatgtattcggcaagttcgactgtcctctttgtgctgtagaggcaatttcaatgctgtccgtaaaagtaagtgatggcgataacgccgggtttggcaactaccgcagctacaaactcgattactcagaaaaggttttcagcaccgttcattaa

SEQ ID NO: 73355 - DNA, 2913 bp, Citrobacter koseri
atgagtggaactaatcctgtatttttagtccgcaaagcaaagaaatcatcaggccagaaagatgcagttctctggtgcagcgatgatcttgaagcggcaaatgccacactggattatctcctgattaaatccggcgcaaagctgaaagattattttaaagctgttgccactaatttccccgtcgttaacgagcttccgccagaaggcgaactcagcttaacgttctgcgatttctaccagcttggaagcgacaacatgacctgggcgcagatccccggtgttacgttgccctcttctgatgctgccgccgaagcacgtcagcatatcgttaacggtgttgataccgaaacaggtgaagtgctggaagatcacacagaagaagttgttgataccgaaactggcgaaattacccagcacgaacagccgtcaactgaagacaatggcgatcgacctgaacaccctcagttaactgttgtggcaacgatgcccttccgtcatcgcgttctggctcaacatattggcgatggcgagtatctctatcatgtcgatgaagagcagaaaaaagcaattctcgctctggaaatggacactgataactcatatgtccagaaccttttacttgcgtctgagaatgttgaaccattcaaaaaggccattgaacacgatatccataaagcggtaaatgctgttaagaacgtgtttcctgccgatggcaaaatccctgagctggcaagcgttatccagtttctgaaaacatggttcgatacccctcatattgatcgcgggctgctcgttaaagagtggtgcaaaggtaatcgtgtatcagctattcagcgtactgaaagcggcgcgaacgctggcggcggaattgcatccgatcgcaaaatgccccagaccactctcggtcttgaatttgaaatagccttaggcctgctggcgcgtcagtatgaatttgatatttattctctgccattgcagatcgaactaaaggctaattcaatcatgaacgcagttgacgaccctgagtggctggcaacgcgcgaactgttcgtgtcaatgcctggtggtctggactattcccgcgcatgcatcgttgcaacggtaaaaaccacaccagatgaactgtacaaatccccatttcgccaccgcgagtacctgaataaggtgctgacagaaactgaccatgccaatcccgatccgcttgtcgttgatattgcctgcggacgttcgtccatgcctatgccaacgccagtaagacaggatgaaccatccgttgaaaaagtaaaccgacaactcgcagctgcgcgcggtgattacgttgaaggtatcagtgaccctaacgatccgaagtgggttcatgaagactacaacgccgcctcaaatgagggagaaaaaacggaaaatgaggacgtcgccgatgtgcaggttcaagaaactgacggtaatgaagaacaggctggtgatgcgctgcgtacaagcgaaagcgatctggggaatggtgaagaagcagataccggcgaacaagccgatgtagaccacaatcaaccggaagtgagccagaacaacgattctgcaagccattctgagccagaagcgcaacaggaagaaccaatgccagtgtggccggaatacttcgagccggggcgttatgaaggcgtaccgaacgaggtatatcacgcggcgaatggcaccagttcgacgatggtaaaagatgcccgggtatcgctgatgtatttcgaggcgcgccacgtatccaaaaccatccagaaagaacgcaccaaagtcctggatatggggaatctggtgcacgcgctggcattacagcctgaacaactggaaaaagagttcagcatcgagccggaaatcccggaaggtgcgctcacgacgacagcgacgatccgcgcggttatcgacgaacacaacgccagcctgccggcattactcaccgcagacgatatcaaagcgttgctggaagaatacaacgccaccctgcccgcgccattaccgcttggggcatccgttgacgaagcgtatgcgtcatatgagcaactcccggaagagttccagcgcatcgaaaacgggactaagcatacagcagcggcaatgaaggcctgcatcaaagaatacaacgccaccctgccgccgcaggtgaaaaccagcggaagccgtgacgcgctgcttgagcaactggcgatcatcaaccctgacctggtcgcacaggaagcacagaagccacagccgttgaaagtatccggcaccaaagcggatctgattcaggcagtgaaatccgtcaaacctgaaacagtgtttgccgacgagctgcttgacgcatggcgcgaaaaccccggcgataaaattctggttacccgccagcagttgagcaccgcgcaggccatccagaaagcgctgctgaatcacccgaccgccgggaagctgctgacgcatccgaaccgcgccgtagaggtgagctatttcggtattgatgaggaaaccgggctggaaatccgcgtgcgcccagaccttgaaatcgacatgggcggcctgcgcatcggtgcggacctgaaaaccatcagcatgtggaatatcaagcaggaaggcctgcgcgccaaactgcaccgggaaatcatcgagcgcgattatcacctgagcgctgccatgtactgcgaaaccgcagcgctggaccagtttttctggatattcgtcaacaaagacgagaactaccactggatcgccatcgtcgaggtatccgaagagttgctggaactcggcatgctggaataccgcaaagcaatgcgcgccatagcgaacgggttcgacactggcgaatggccagcgccgattaccgaagattacgccgaagaactcaacgattttgatgtgcgccgccttgaagcgctgcgcgtacaggcataa

SEQ ID NO: 73356 - DNA, 1089 bp, Citrobacter koseri
atgtccaatttagtcgccaccactgaaaaccaaactcagaaaatcgacaacgtttctatcctgacgaacggggaactgttcaaccgcctgcgcacgctttcggaggtaatggccaacagtggaaacttcgtcccagatcattaccgggggaaaccggacgcctgcatggctgttgtgatgcaggctgcgcgctggggcatggatcctttcgctgtagcgcaaaagactttcatcgtcgggaattccggtgtgcttggttatgaagcgcagctggttaatgcggtgatcaacactatggcccccactaaggatcgtatccactttgaatggttcggcgaatgggaaaatatcgttggacggttcgtggagaagacaagcagccagaataaaaagtacatcgcgccgggctggaatttgaaagacgaagctggcgtgggcgttcgcgcctgggcaacgcttaaaggtgaatctgaaccgcgcgagctggtcctgatgctttcgcaagcacaggtacgcaattcaacattgtgggcaaccgacccacgccagcagttagcctatctcgccgttaaacgttgggcgcgtctctactgccccgacgtgattctcggggtttataccgccgatgagattgacgagcgtgaggagaaggtaatcaacccctcgtctgttgaaagggtcaccattgatgagattgccagcagtgcgcgcacgacagccagcgcgcaggaatcaactaaaaacatcgatcagttagccgacgatctgcgtgaccgcattgaaaaagcaatgacggtcgaccaggcaagcgctatccgcggtgaaatcgagaccgaaaaaccaatacttggcacagctctatacacggaactgaaaaataaggccgttcgtcgttattacctggtcgatcaccgcaaccgggtggaagcggctatcaatgccctgcctaacccgggcgaaccagaagcggcagaactgtttgctaaagctgaaggcgttctcaatgccgccaaacgtcacttgggcgatgaactgtacgaccagttccgcatcaccctggacgacatgaaaccggaatacgtgggctaa

SEQ ID NO: 73357 - DNA, 240 bp, Citrobacter koseri
atgcgccttatcaatcgcagtaagcaatctccgttaggtcgtcgggcatgcgatgcagcactggcaaagcatgttgagctttacggggagtttggccgacagaaaacaaagaccacttataccgtggcggtcgacggcgtgaaggtgacagtagaagttgttaaccgacataagagctatgtcgccaccgcaatgacaggtatgcgccgactgcgcgcactgccagggcagattgcctga

SEQ ID NO: 73358 - DNA, 216 bp, Citrobacter koseri
atgtcacaggtaatttttaacgaagagtgggttgttgagtccagacttaccgaaagaacaggacttactgaaggacagattaaaaattatcgccagaaactatgggttgaaggtgttcacttcaagcgccttactgcgcttggacagactgacaactctaaaggtctgctttggtacaactacccgaagattaatcagttagttcaggatgcttaa

SEQ ID NO: 73359 - DNA, 1287 bp, Citrobacter koseri
atgaaatacccgactggtgttgaactgcataacggaaaaatcaggatcacatttatctatcgcggcattcgttgccgcgaagttctccagggttgggttgtcaacagtagcaatattaaaaaagcgggcaatctgcgcgcggcaattgtgagtgagatacaactcggtaagttcgactacgcagatcgtttcccggaatcaaaggctcttaagaaattttcgtccacaaaacggatctccacattcaaagaactgagtgatttttttacagatacaaagtcactggaggtatctgaagccactttgctatccatcacatcagtcgttaacaccctgaaacgagtcgtgggcgagaacacacggctggttgatattcagcacgcagatattctgaattaccgcaaagaactcctgaccggggaggttttcaacccttcaatgccaaaccgcatcaaaaatgggcgcgcgccctcaacagtcaataaacagatggctgttttatcagaaatgctgaagcttgcaaaccgaagccagtttatattgcatgctccttatgaaggagtgtcgagactcaagttatctaaaaatgatcccgatccacttttacttcatgagtaccaggcactgatagccgcccttccccgtagccaggcattaatcatcattattgcagtgcatacggggatgaggccgggcgagatatgcgcactggcatgggaagatattgatttggtaaaaggtgaaatccacgtatccagaaatttgacgaacaagcgagtatttgtaccccctaaaacagatgccgggataaggacgataacgttgctgaaacctgctcatgatgctctgctggagcaatacgaaatcaccgggaacagtccaaaacaggaaattaagtttcatcatcgtgagatcggaaaaactgagcagcaatatcttcgcttcgttttttcaccgacatcatactcgtcaacgaaaggcggttacttttccaaggactcgatttcctatggctggaggcgtggaactaaactttcaggtatacgtgagcgcaatccatatcagtcgcgtcacacatatgcctgctggacgctgatggccggagcgaacccgtcgttcattgccagccagatggggcatgaagatgcgcgtatggtgtacgaggtttactccaagtggattggtgacatgaaccaggatcaggtcaacatgctgaacaatcagatgccgacagcactgcccccaggacgcccccacgggcgagggagtatgaaaaaagtcatttaa

SEQ ID NO: 73360 - DNA, 675 bp, Citrobacter koseri
atgatgcgcgtactggttgtcgaagataatgccttattacgccaccacctgaaggttcaattacaggatttggggcaccaggttgatgacgcagaagatgcaaaggaagccgattattatcttaacgagcatctgccggacatcgccatcgtcgatttaggcctcccggatgaagacgggctttcgctgatccgccgctggcgcagcaatgacgtttcccttcctgttctggtattaaccgcccgtgagggctggcaggataaagtggaagtgctgagcgccggcgccgacgactacgtgacaaaaccatttcatattgaagaagtggtcgcgcgtatgcaggcgttaatgcgccgcaacagcggcctggcctcgcaggttatctctattccgccttttcaggtggatctctcccgccgtgaattgtccgtaaatgatgaagtgataaaactgacggcgtttgaatacaccattatggaaacgctgatccgcaataatggcaaagtcgtcagcaaagattcgttgatgctacagctctacccggatgcggaactgcgtgaaagccataccattgatgtattaatggggcgcttacgcaaaaaaattcaggcgcgatatcctgatgatgtgattaccaccgtccgtggtcagggatacctgttcgaactgcgctaa

SEQ ID NO: 73361 - DNA, 1464 bp, Citrobacter koseri
atgaataaattactgcgtcatctttttcctttatcgctgcgcctgcgctttctgctggcgacggcaggcgttgtgctggtgctctctctggcctacggcatggtcgcgctggttggctacagcgtcagttttgataagacaacctttcgcctgttacgcggtgagagcaaccttttctacaccctcgcgtcatggcaaaacaataaaatcaatatcgagatcccggaaaatctcgatatgcaaagccccacgatgacactgatctatgatgagaacggcaagttgttatgggcgcagcgcaacgttccctggctggagaaacgtatccagccggaatggctgaaagccaacggttttcatgaaattgaagccgatgtcgacgctaccagcacattgctgagtgaagatcattccgcccaacagcagctcaaagaggtgcgggaagatgacgacgatgcggaaatgacccactccgtggcggtgaatgtctatccggctaccgcgcggatgccgcaactgacgatagtggttgtcgataccatccccattgagctgaaacgctcgtatatggtctggagctggtttatttatgttctggcggcaaacctgctgttagtcatcccgttgctctgggtcgccgcgtggtggagtttacgccctatcgaagcgctggcgcgtgaagtgcgcgagctggaagaacaccaccgcgaaatgctcaacccagaaaccacgcgggaactgaccagcctggtgcgcaacctcaaccggctgctgaagagcgaacgtgaacgttatgataaataccgcaccacgttaaccgacctcacccatagtctgaaaacgccgctggcggtattgcagagcaccctgcgttcaatgcgcagcgaaaaaatgagcgtcagcgacgccgaaccggtcatgctggaacagatcagccgtatatcccagcagattggttattacctgcatcgcgccagcatgcgcggaagcggcgtgttactcagccgcgagctgcaccccgtagcgccgttactggacaatctcacctgcgcgctcaataaggtgtatcagcgtaaaggggtcaacattagcctcgatatttcgccggaaatcagcttcgtcggcgagcagaatgactttgttgaagtgatgggcaacgtgctggataacgcctgtaaatactgccttgagtttgtcgaaatttcagcccggcagaccgatgagcatctgcatattctggtagaagacgacggcccgggcattccgcaaagcaagcgtgatgtggttttcgatcgcggtcagcgcattgacaccctgcgaccagggcaaggcgtggggctggcggtcgcccgtgagatcactgagcaatatgaagggaagatcgtcgccggtgacagtttgctcggcggagcgcggatggaggtgatttttggtcgccagcacccgattcagcgcgatgaatga

SEQ ID NO: 73362 - DNA, 1122 bp, Citrobacter koseri
atggaatatcaattaacacttaactggcccgaatttcttgaacgccactggcaaaaacgcccggtggtgttaaaacgtgggttcaacaacttcattgatccgctctcccctgacgaactggcgggactggcgatggaaagcgaagtcgatagccgtctggtcagccatcaggatggtaaatggcaggtcagccacggcccgttcgagagttacgaccacctcggcgagaacaactggtcactgctggttcaggccgtaaaccactggcatgaacctaccgccgcgctgatgcgccctttccgcgcgttgccggactggcgtattgacgatctgatgatctccttttccgtccctggcggcggcgtgggtccgcatctggatcagtacgatgtctttatcattcagggaaccggtcgccgccgctggcgcgtaggcgagaagctgcaactgaagcagcattgccctcacccggacctgctccaggtcgatccttttgaagccatcattgatgaagagctggagcccggcgatattctgtatatcccacccggattcccgcacgaaggctacgcgctggaaaacgcgatgaactactcggttggtttccgcgcgccgaatacgcgtgaactgatcagcggttttgccgactacgttctgcaacgcgagctgggcagcacctattacagcgacccggatatcccgccgcgcgagcatcctgccgatgttctgccgcaggagatggacaagctgcgtgaaatgatgctcgacctgatcaatcagcctgaacactttaaacagtggtttggcgaatttatctcccagtctcgtcacgaactggacatcgcgccgccggaaccgccgtatcagccggatgagatctatgatgcgctgaaacaaggcgatgtgctggtgcgtctgggcggcttacgcgtcctgcgcattggcgatgaggtctacgccaacggcgagaagattgattctccgcaccgcccggcgctggaggcgctctccagtcacatcgtgctgaccgccgagaattttggcgatgcgctggaagacccgtcgttcctcgcaatgctggccgcgctggtcaacagcgggtactggttcttcgaagggtaa

SEQ ID NO: 73363 - DNA, 1227 bp, Citrobacter koseri
atggataaactacttgagcgttttttacactacgtgtcgctggatacccaatcaaaggcgggcgtacggcaagtgcccagcactgagggccagtggaaattattacatttgctcaaacaacagctcgaagaaatggggctggtgaacgtcacgttaagtgacaaagggaccgtcatggcgacgctgccagccaacgttgctggtgatattcccgcgattggttttatctctcatgtggatacctcacctgatttcagcggtaaaaatgtgaatccgcagattgtggaaaactaccgtggtggcgatattgcgctagggatcggcgatgaggtgctgtcgccggtgatgttcccggttctgcatcaactgctggggcagacgctgatcaccactgacgggaaaacgctgctgggcgctgacgacaaagcgggcgtggcggaaatcatgaccgcgctggcggtactgaaacagaaagacattccgcacggtgatattcgcgtggcctttacgccggatgaagaggtcggtaaaggggcgaaacattttgacgttgaggctttcggcgcgcagtgggcttataccgttgatggcggcggcgtaggggaactggagtttgaaaacttcaatgcggcctccgtgaatatcaaaatcgtgggcaataacgtacaccccggtacggcgaagggcgtgatggtgaatgcgctgtcgctggcggcgcgtattcatgccgaggttccggcggatgagagcccggagacgaccgaaggctatgaaggcttctaccatctggcgagtatgaaaggcaccgttgatcgtgcggatatgcactacatcattcgtgatttcgaccgcaaacagtttgaagcccgcaagcgcaaaatgatggagatcgctaaaaaggtcgggaagggactgcacccggactgctacattgagctggtgatcgaagacagctattacaatatgcgtgagaaagtggtcgaacacccacatattctcgatattgcacagcaggcaatgcgtgactgcgatattgtgccggatatgaagccgattcgtggcggcactgacggcgcccagctttcgtttatgggcttaccgtgcccgaacctctttaccggcggctataactatcatggcaagcatgagtttgtgacgctggaagggatggagaaagcggtgcaggtgattgtgcgtattgcggagctaactgcgaagcagcagtaa

SEQ ID NO: 73364 - DNA, 1137 bp, Citrobacter koseri
atgggacagagtaaaaaattgaataaacaaccgcgttcgctttcaccgctggtacaactggcgggaattcgcaaaagcttcgacggaaaagaggtcatttctaatctgaatctgaccatcaataacggcgaattcctcacgctgcttggcccctctggctgcggtaaaacaaccgttctgcgcctgattgccggtctggaaaatgttggtgccggtcatatcatgttggataaccaggacatcaccgacgttccagcggaacaccgctatgtgaacaccgtctttcaaagctatgcgttattcccccacatgaccgtatttgaaaatgtggctttcggtttacgcatgcagaaaacccccgccgccgagattacccctcgcgtcaccgacgctctgcgcatggtgcaactggaagagtttgcgcagcgaaagccacatcagctttccggcgggcagcagcagcgtgtggccatcgcccgcgccgtcgtcaataaaccgcgtttattgctgctggatgaatccctctccgcgctggattacaagctgcgaaagcagatgcagaacgaactgaaagcgttgcagcgtaagctgggcatcacttttgtgttcgttacgcacgatcaggaagaagcgctgaccatgtctgaccgtatcgtggtgatgcgcgacggcattattgagcaggacggcacgccgcgagaaatctatgaggagccgaaaaacctgttcgtcgccggattcattggcgaaatcaacatgtttaacgccacggtaattgaacgtctcgacgaacaacgcgtacgcgccaatgtagaaggacgcgagtgcaatatttatgttaactttgccgtcgttcctggtcagaaactgaacgtactgttacgcccggaagatctgcgcgttgatgaaattaacgatgataaccacattgaaggtctcattggctacgtgcgcgagcgcaactacaaaggtatgacgctggaatccgtcgtcgaactggaaaatggcaaaatggtgatggtcagcgaattcttcaatgaagacgatcctgacttcgaccactctctcgaccaaaaaatggccattaattgggtagaaagctgggaggtcgtactggctgatgaagaacacaagtaa

SEQ ID NO: 73365 - DNA, 858 bp, Citrobacter koseri
atgaagaacacaagtaaattccagaatgtggtgattgtcactgtcgttggttggcttgtgttgtttgtctttctgcccaacctgatgattattggtaccagctttttgacccgtgatgacgcgaacttcgtcaaaatggtctttacgctggataactacgctcgtctgctcgatccgctctattttgaggtattgctgcattccctcaatatggcgctcatcgccaccttcgcctgcctggtgctcggctatccctttgcctggtttctggcgaaactgccggaaaaagtgcgtccgctgctgctgtttttgctgatcgtaccgttctggaccaactcgctgatccgtatttacggcctgaaaatttttctcagcaccaagggctatctcaacgagttcctgctgtggctgggtgtgattgacaccccgatccgcatcatgttcacgccgggcgcggtcattatcggtctggtctatatcctgctgccgtttatggtgatgccgctctactccagcattgaaaaactggataagccgctgctggaggccgcccgcgatctgggcgccagtaaattgcagacctttattcgcattattattccactgaccatgccggggatcatcgccgggtgtctactggtgatgctgccggcgatggggctgttctatgtctctgacctgatgggtggagcaaagaacctgctgattggtaacgttattaaggttcagttcctgaacattcgcgactggccgtttggcgcagccaccagcattacgctgacgattgtgatgggcctgatgctgctggtttactggcgcgcatcgcggctgctgaataagaaggtggaactcgaatga

SEQ ID NO: 73366 - DNA, 780 bp, Citrobacter koseri
atgatcggtcgactgcttcgtggcggttttatgaccgctatctacgcgtacctgtatattccaatcatcatcttgattgtgaactcctttaacagttcgcgctttggcatcaactggcagggctttaccaccaactggtacagcctgctgatgaataacgacagcctgttgcaggcggcacagcactcgctgacgatggcggtgttctcggccacctttgccacgatcatcggctcgctaacggcagtggcgctgtatcgctatcgttttcgcggtaaaccgtttgtcagcggcatgctgtttgttgtcatgatgtcgccggatattgtaatggcgatttcactgctggtgctgtttatgctgctcggcatccagttgggcttctggtcgttgctgttttcgcatatcaccttttgcctgcccttcgtggtcgttaccgtttactcgcgcctgaaagggtttgacgtgcggatgctggaagcggcaaaagacctgggggccagtgaagtcacgattttgcgtaagatcattctgccgctggcaatgcctgcggtcgcggctggctggttgctcagtttcaccctgtcgatggatgacgtggtggtttcgtcattcgtcaccgggcccggctatgagattctgccattgaaaatttactcaatggtaaaagtcggcgtttcaccggaagttaatgcgctggcaacgattttgttggttctgtcgctggttatggtcatcgccagccagcttattgctcgtgataaaaccaagggccgttga

SEQ ID NO: 73367 - DNA, 1047 bp, Citrobacter koseri
atgaaaaaatggtcacgccacctgctcgcggcgggtgctctggcactgggcatgagcgccgctcacgctgatgacaacaacacgctctatttctacaactggaccgagtatgttccaccaggactgctggaacagttcactaaagagacgggcattaaggttatctattcgacctacgagtcgaatgaaaccatgtatgccaagctgaaaacgtataaagacggcgcctacgacctggtggtgccttccacctattacgtcgataaaatgcgtaaagagggcatgatccagaagatcgacaaaacgaagttaaccaacttccacaacctcgatcctgaaatgctcaacaaaccgtttgacccgaataacgactactccatcccgtatatctggggcgcaacggcaattggcgttaacagcgacgaaattgacccgaaaaccgtcaccagttgggctgacctgtggaagcctgagtataaaggcggcctgctgctgactgacgatgcgcgtgaagtgttccagatggcgctgcgtaagctgggttactccggcaacaccaccgatcctaaagagattgaagcggcgtataacgaactgaaaaaactgatgccaaacgtggcggcgttcaactccgacaacccggctaacccgtatatggaaggcgaagtcaacctggggatggtgtggaacggttctgcgtacgttgcacgtcaggcagggacgccacttgaggttatctggccgaaagaaggcggtattttctggatggacagcctttctattccggcgaacgccaaaaacaaagaaggcgcgctgaagctgatcaacttcctgttgcgcccggatgtggcgaaagaagtagcggaaaccatcggttatccgacgccgaacctggccgcacgtaagctgttaagccctgaagtggcaaatgataaatcactctaccctgatgccgacaccatcaacaaaggggaatggcagaacgacgtgggttccgccagtgctatctatgaagagtattatcagaagctgaaagcgggacgctaa

SEQ ID NO: 73368 - DNA, 822 bp, Citrobacter koseri
atgcagtcgcgtcgggctcatcgattaagccgttttcgtaaaaacaaacgccatttgcgtgaacgcctgcgtcagcgaatctttttcagagacagagtggtgccggaaatgatggaaaaaccaagagtattagttcttactggagcgggaatctctgccgaatccggcattcgtacatttcgcgccgctgatggtctctgggaagagcatcgggtagaggatgtggcgaccccggaagggtttgcccgcgatccagaactggttcagtcattttacaacgcccgccgtcagcagttgcagcggcctgagattcagcccaacccggcgcatgtcgcgctggcaaaactggaagaggcgctgggcgatcgtttcctgctggtgacgcaaaatatcgataatctgcatgaacgcgcgggcaacaagaatatcattcacatgcacggcgagctgttgaaagtgcgctgctcccagagcgggcaaattctggactggacgggcgatgtgacctcagacgataagtgccattgctgccagttcccggcttcgcttcgcccgcacgtcgtgtggtttggtgaaatgccgcttggcatggatgagatctatatggcgctggcgatggcggatgtgtttatcgctatcggaacatccgggcatgtttatccggcggccgggtttgtgcatgaggcccgcctgcacggcgcgcatacggtcgagctaaaccttgaaccaagccaggttggcagcgagtttgaagagaaatattatggcccggcaagccaggtcgtaccggcgtttattgagaaattattgaaaggactgtga

SEQ ID NO: 73369 - DNA, 912 bp, Citrobacter koseri
atgtattacgggtttgacattggcgggacaaaaattgccttaggcgtgtttgataacgagcgacgtttgcgctgggaaaaacgcgtaccgacgccacgcgaaggctatgaggcttttttaacggcggtctgcgatctggtggcggaagccgaccagcggtttgacgtaaaaggctccgtgggcattggtattcccgggatgccggaaacggaagacggaacgctgtatgccgccaatgttccggccgccagtggtaaaccgctccgcgccgatctcagcgcccggctggatcgtgatgttcgcctggataacgacgcgaactgctttgcactgtcggaagcctgggatgatgagttcacgcagtatccgctggtcatggggcttatcctcgggacaggcgtaggcggcggactggtgctcaacggtaagccgatcaccggtcgcagctatattaccggcgagtttggtcatatgcgtttgcctgtcgatgcgctcaccctgatggggttcgattttcctctgcgtcgctgcggctgcggtcaactgggctgcatcgaaaattatctttccggccgcgggtttgcgtggctgtatcagcattactatcatcaacctctacaggcgccggagattattgctttgtgggagcaaggtgatgaacgcgcgcgtgcgcatgttgaacgttacctggatttactggcggtctgcctggggaatatcctcacgatcgtcgatcccgatctggtggtgattgggggaggattatcaaacttcactgctataacaacgcaactggcagacaggttgccacgtcatctccttcctgttgctcgtgtaccgcgtattgaacgggcgcgacacggtgatgcgggcgggatgcgcggcgctgccttcttacatcttaccgattaa

SEQ ID NO: 73370 - DNA, 1245 bp, Citrobacter koseri
atggcttcgcctttatcgttattgatcggcttgcgctttagtcgtggtcgtcggcgcggcggtatggtgtcgctgatttccgttatctcgactatcggcatcgcgctgggcgtggcggtactgattgtcggcttaagcgcgatgaacggtttcgagcgcgagctgaacaaccgtattctggccgtggtgccgcatggtgaaattgaagcggtgaatcagccgtggactcactggcgcgaagcgctggaaaaagtgcagcacgtacaggggattgcagcggcagcgccctatatcaactttaccgggctggtggagagcggggcgaatctgcgcgcaatccaggtgaagggcgtggacccggaacaggaacagcgcttgagcgcgctgccgtcgtttgtgcaaaaccatgcctgggataacttcagggcgggcgagcagcagatcatcattggcaagggcgttgccgatgcgctgaaagtgaagcagggcgactgggtgtcgatcatgatccccaatgccagcgccgatcataaattgcagcagcctaagcgagtgcgtctgcatgtgacggggattctgcaactgagcggtcagctcgatcacagctttgccatgatccctatggaagacgcgcagcagtacctggatatgggggccagcgtgtccggcatcgcgattaaggtcaacgatgtctttaacgccaataaattggtacgggacgctggcgaagtgaccgacagttacgtttacattaagagctggatcggtacttacggctatatgtaccatgatattcagatgatccgcgccatcatgtatctggcgatggtgctggtgatcggcgtggcctgcttcaacatcgtttcgacgctggtgatggcagtaaaagataagagcggcgatatcgcggtattaagaaccttaggggcgaaagatggcctaatccgcgccattttcgtctggtatgggctgctggcgggtctgctcggcagtctgtgcggtgtggcgattggcgtggtcgtctcattgcaactgacccctattatcgaaggcatcgaaaagctgatagggcatcagttcctttctggagacatctattttatcgacttcctgccatccgaattacactggctggacgttatttacgtactggttacggcattgttgctgagcttgttggcgagctggtatccggcgcgccgcgccagcaatattgaccccgcgagagtgttaagcggccagtag

SEQ ID NO: 73371 - DNA, 702 bp, Citrobacter koseri
atgaataagatcctgttgcaatgcgacaacctgtgcaaacgctatcaggaaggctccgtgcaaaccgacgtgctgcacgatgtcagcttcagcattggcgaaggcgaaatgatggcgattgtcggcagctccggctccgggaaaagtacgctcctgcacctgctgggcggcctggatacgccgacgtcgggcgatgtcatttttagcggccagccgatgagcaaactctcgtcggcggcgaaagcggaactgcgcaaccagaagcttggctttatttatcagttccatcacctgctgccggatttcaccgcgctggaaaacgtcgcgatgccgctgctgatcggcaagaaaaaaccggctgaaattaccgagcgagcgcgtgaaatgttgcaggcggtggggctggatcaccgtgctaaccatcgtccatccgaactttccggcggcgagcgtcagcgtgtcgccatcgcccgagcgctggtcaacaatccgcgcctggtgctggcggatgaaccgaccggcaacctggatgcgcgcaatgccgacagtattttccagcttctgggtgaactcaatcgcgctcagggaacggcgtttctggtagtgactcacgatttgcagctggcgaagcgaatgagccgtcagcttgaaatgcgcgacggtctgctgacggcagaactgagcctgatgggagctgagtaa

SEQ ID NO: 73372 - DNA, 1308 bp, Citrobacter koseri
ttgatacttttcagaattacgctgacgaacacttacggttcagtcatttacccattccgctttcgcttatatactcagggctttgctaacagcaaccagacggatttcatgtaccaacctgtcgctctatttattggcctgcgttatatgcgtgggcgtgcagcagatcgtttcggtcgtttcgtctcctggctttccaccattggcattactctcggggtgatggcgctggtcacggtattgtcggtgatgaatggttttgaacgtgaactgcaaaacaacatccttggcctgatgccgcaggcaattctctcgtctgagcagggctcccttaatccacagctgatacccgaaaaagcggttacgttgaatggcgtcaatcgtatcgcgccgcttaccacgggagatgtcgtgctgcaaagcgcgcgtagcgtcgccgtgggcgtgatgctgggtatcgacccggcgcaaaaagatcccttaacgccgtatctggtcaatgtgaagcaaacctctcttgaagcgggcaagtataatgtcatcctcggcgagcagcttgccgggcagttgggcgtcaatcgcggcgatcaaattcgcgtgatggtgccttccgccagccagttcacgccaatgggacgcctgccgagccagcgcctgtttacggtgattggcaccttcgcggcgaacagcgaagtggatggctaccagatgctgaccaatattcaggatgcgtcgcgcctgatgcgctacccggcgggcaatatcaccggctggcgcttgtggcttaatgagccgctgaaggtggataccctcagccagcagacgctgccggaggggacgaaatggcaggactggcgtgagcgaaaaggcgagctgttccaggccgtgcgcatggaaaaaaacatgatgggtttgctgttaagcctgattgtcgccgtggcggcgtttaatattattacttcgttaggtttaatggtgatggagaagcagggcgaagtggctattttacaaacccaggggctgacgccgcgccagatcatgatggtgtttatggttcagggcgccagcgccgggattatcggcgcgctgctgggggcagtgctgggcgcattgctggccagccaactgaataacctgatgccgatcattggtgcattcctggatggcgctgcgctgccggtggcgattgaaccgctacaggttgttgttattgcgctggtggcgatggccatcgcgttattgtccacgctgtatccttcctggcgcgctgccgccacccaacccgctgaggctttacgttatgaataa

SEQ ID NO: 73373 - DNA, 1074 bp, Citrobacter koseri
atgaaacaaaaagaattgtggatcaaccaaatcaaagggttatgcatctgcctggtggtcatttatcactctgtgattacgttctatccccacctgaccgctttccagtatccgttatcggagatcctgacgaaatgctggatctactttaacctctatctggcgccgtttcgcatgccggtgtttttctttatttccgggtatctgatccgccgctatattgacagcgtgccctggggaacctgtattgataaacggatctggagcattgtctgggtactggcgctctggggagtggcgcaatggctggcgcttagctggctcaaccactggctggcgcccgaacgcgacatcaacaatgcctccaacgccgcttatgccgggtccgtcggcgagtttattcacggaatgctgacggccagcaccagcctctggtatctgtatgcgctggttgtctattttgtgctgtgtaaagtcttcagccaatgggcaaaaccactgttcgtactgtttgtactgctgagcgtgacgataaacttcgtgccgacgccgtggtggggaatgaacagcgtgatccgcaacctgccttactacagcctcggcgcctggtttggcgccacgctgatggagtggattaagcatgtcccactgcgtcgttatgccatcgcgtttgcgggcattgcgctgctcgccgtcatcgcctggctggctaatgtatccctgctgctctcactggtgtcgattgtgctgatcatgaagcttttctatcagtatgagcagcgcttcggcatgcgttcttccagcctgctgaatgtcatcggctcaaacactattgctatctatacaacccaccgtatcctggtcgaagcgttcagcttaacgttgattccgaaaatcaatggcgcggcatggtcgccgcagcttgagtttgctctgctgttggtttacccctttgccagtctgctgatttgcacgctgacgggccttaccgtccgaaaaatttcgcaacgcctgtttgccgatctcttcttctctccgccttcactccctgccgttaccagctattcgcgttaa

SEQ ID NO: 73374 - DNA, 3447 bp, Citrobacter koseri
atgcctgaacaacaacgttatactctgccaaccaaacccggcgatcagcgccagttgggtgagcttaccggcgccgcctgcgccacgctggtggcggagattgccgagcgccatgctggcccaatcgtgcttattgcacctgacatgcaaaacgccctgcgcctgcatgacgaagttcgccagttcaccgaccaactggtgatgaatctggcggactgggaaacgctcccttacgacagcttttccccacaccaggaaatcatctcttcacgcctgtccacgctttaccagttgccgtcaatgcagcgcggcgtattgattgttccggtaaatacgctgatgcagcgcgtttgcccgcacagttatttgcacggccacgccctggtgatgaaaaagggtcagcgtttgtcgcgcgacgccctgcgcgcacagctggatagcgcgggctatcgccatgttgatcaggtcatggaacacggtgaatacgccactcgcggcgcgctgctggatctgtttccgatgggcagcgaacagccctatcgtcttgatttttttgatgatgaaatcgacagtttgcgcctgtttgatgccgatacccagcgtacgctggaagaagtcgacgccatcaatttgctgcccgcgcatgaatttccgaccgataaaacggccatcgagctgttccgcagccagtggcgtgacacatttgaagttaaacgcgacgccgagcatatttaccagcaggtcagtaaaggcacgctgcctgccgggatcgaatactggcagccgctgttcttcaacgagccgctgccgcctctgttcagctacttcccggcgaacacgctgctggtgaataccggcgcgctggaaaacagcgctgaacgcttccaggccgataccctggcacgttttgaaaaccgtggcgtcgatcctatgcgcccgcttttgccgccggaatccctgtggctgcgggtcgatgagctgttctccgaactcaaacgctggccccgcatacagttaaaaaccgaacatctgccaggtaaggcggcgaataccaatctgggtttccagaaactgccggatctggcggtacaggcgcagcaaaaagcgccgctggacgcgctgcgtagatttcttgaatccttcaacgggccggtcattttctccgtagaaagcgaaggccgccgcgaagcgctcggggaactgctcgcccgtattaaaatttcacccaaacgaattttgcgcctggatgaagcgctcgacgccggacgttacctgatgattggcgctgcggagcatggcttcattgatacgcagcgtaatctggcgcttatttgcgagagcgatttgctgggtgaacgcgttgcgcgtcgccgtcaggactcacgtcgcacgattaaccccgacacgctgatccgcaacctggcggaactgcatcctggccagccggtggtacaccttgagcatggtgtggggcgttatgcgggtatgacgacgctggaagccggcggcatcaagggcgagtacctgatgcttacctacgccaacgacgccagactgtacgtaccggtgtcatctttgcatctcatcagccgctatgccggaggcgccgaagagaacgcgccgctgcataaactgggcggcgacgcctggtctcgcgcccgacagaaagccgcggagaaagtgcgcgacgtggcggcagagctactggatatttacgcccagcgcgcggcaaaagaaggtttcgcctttaagcacgatcgcgagcagtatcaactgttctgcgacagcttcccgttcgagaccacgccagaccaggcgcaggccattaacgccgtcctgagcgatatgtgccaaccgctggcaatggatcgtctggtgtgcggcgacgtcggcttcgggaaaaccgaagtggcgatgcgcgccgcgttcctggcggtggaaaaccacaaacaggtcgcggtgctggtgcctaccaccctgctggcgcaacagcatttcgataacttccgcgaccgcttcgccaactggccggtgcgcatcgaaatgctctcccgtttccgtagcgccaaagagcaagcgcagatccttgagcaggtcgctgaggggaaaatcgacattctgatcggcactcataagctgctgcaaagcgatgtgaaattaaaagatttgggcttactgattgtcgatgaagagcaccgtttcggcgtgcggcataaagagcgcatcaaggcaatgcgcgccgacgtcgatattctgacgctgacggcaacgccaatcccccgtacgctcaacatggcgatgagcggtatgcgcgatctgtcgatcattgccacaccgcccgcccgtcgtctggcggtaaaaaccttcgtccgtgaatatgacaacctggtggtgcgcgaggctatcctgcgtgaagttctgcgcggcggccaggtgtattatctgtataacgacgtggagaatatccagaaagccgcggaccgactggcggaactggtgccggaagcccgcatcgcgattggtcacgggcagatgcgcgagcgcgaacttgagcgcgttatgaacgacttccaccaccagcgctttaacgttctggtgtgtaccaccattatcgaaaccggtattgatattccaaccgcgaacacgatcatcattgagcgcgccgaccatttcggcctggcgcagctacaccagctacgtggccgcgttggacgttcgcaccatcaggcgtatgcctggctgctgacgccgcatccaaaagcgatgacgaccgacgcgcaaaaacgcctggaagccattgcctcgctggaggatttgggcgccggttttgcgctggcgacccacgacctcgaaattcgcggcgctggcgagctgcttggcgaagatcagagcgggcagatggagactatcggcttctcgctgtatatggagctgctggaaaacgctgtggatgcgctgaaagccggacgtgagccgtcgctggaagacctcaccagccagcagacggaagtcgaactgcgtatgccgtcgctgttgccggatgattttatcccggatgtgaatacgcgtctgtcgttctataaacgcattgccagtgcgaaaaacgaaaacgagctggaggagctcaaggtagagctgatcgaccgtttcggcctgctgcctgacccggcgcgcaatctgctggatatcgcgcgtctgcgccaacaggcacagaagctgggcattcgaaaactggaaggcaacgagaaaggcggtacgatcgagtttgccgagaaaaatcacgtaaacccaacctggctgattggtctgttgcaaaaacaaccgcagcacttccgcctcgacggcccgacacgcctgaagtttattcaggatctggcggagcgtaaaacgcgtatggactgggtgcgccagtttatggcgcaactggaagaaaacgcggcggcgtaa

SEQ ID NO: 73375 - DNA, 969 bp, Citrobacter koseri
atgataatgaataacatgcgactttcccgctggctggcgttttttacgctcgccgcgtccgtagcgctggcgataccggcgcaggcgaacacctggccgcttcctcctcccggcagcaaactggtgggcgagaatacatttcacgttgtcgaaaacaacggcggctcgctggaggcgattgctaaaaaatacaatgtcggttttttagcgttgctacaggcaaacccgggcgttgatccttacgttccccgcgcgggcaacgttctgaccatccctctgcaaaccttactgccggacgcgccacgcgaaggtattgtgattaacctcgccgaattgcgtctgtattactatcctcccggaaaaaattcggtgaccgtgtatccgatcggtatcggtcaactgggtggcgatacgctgacgccaacgatggtcactaccgtctcggataagcgcgcgaacccaacctggacacctacggcgaatatccgcgcccgttacaaggctcagggaatagacctccctgccgtggttcccgccgggccggataacccaatgggccatcatgcgatccgcttagcggcttatggcggcgtctatttgctgcacggcacgaatgctgatttcggtatcgggatgcgcgtcagttccggttgtattcgcctgcgtgacggtgatattgagacgctgttccgtcaggtcacgccgggtacgaaggtcaacattattaatacgccgatcaaagcgtccgttgaacctggcggcatgcgcctggtagaagtccaccagccgttatcgaagaatattgatgacgatccgcagatattgccgatcgtattgaacggtcaaatgcaggctttcaaagatgccgcacagaccgatgccgccgttatggagcatgttatggaagtgcgttcaggaatgccggtcgatgtcacccgccatcccgggataacgcagcagtcgatgtaa

SEQ ID NO: 73376 - DNA, 258 bp, Citrobacter koseri
atgaaaaacgtaaaaaccctcattgctgccgctgtactgagttcactctctttcgcaagtttcgctgctgttgaagttcaggcgacgccagtagatcaacagaaagtgggcaccatttccgcaaccgccgggactaacctgggatctctggaagatcaactggcgcaaaaagcggatgaaatgggcgcgaaatctttccgcattacttcggtaaccggtcctaacaccctccacgggactgcggttatctacaaataa

SEQ ID NO: 73377 - DNA, 636 bp, Citrobacter koseri
atgacaactgactcgacaggttgcgtaaaaaaaagccgtggccgaccaaaagtgttcgacagggaagccgcgcttgacaaggccatgacactcttctggcagcacggctatgaagcaacatcgctcgccgacctcgtggaagcgaccggcgcaaaagcgcccacgctgtacgcagaatttacgaacaaggaagggttgttccgcgcagtgctggatcgctatatcagccgctttgcggcaaagcatgaggcccaactcttttgtgaagaaaaaagcgttgagtctgcgctggaagactatttcaccgccgtcgcgacatgcttcaccagtaaagacacccctgccgggtgctttatgatcaacacgtccgccacactggccgcctcctcccgtgaaatcgcccatacggtgaaatcccgccacgcgatgcaggagcagacgctgacccagtttttgcgccagcggcaggagcgcggggaaattccggcgcactgcaatccacaaacgctggcggaatatctgaactgtattttacaaggaatgtcgatcagcgcgcgtgaaggtgcgacgtttgacaaactgatgcagataacccgcaccaccctacggctgtggccggagatgctgaaggcttag

SEQ ID NO: 73378 - DNA, 540 bp, Citrobacter koseri
gtgaataaatcaatgttggcgggtatagggattggcgtagctgctgcgctgggtgtggcggcggtggccagtctgaacgtttttgaccgtagcccgaaatatgcgcaagtcgtatcagccacacccataaaagaaaccgtcaaaacaccgcgtcaggaatgccgcaacgtgacggtcacgcaccgcaaacctgttcaggacgaaaatcgcattgccggttcggtgcttggcgcggttgctggcggcgtgattggtcatcagttcggcggtggtcgtggtaaagatgtggcgaccgtcgtcggggcgctgggcggagggtacgccggtaaccaaatccagggatcaatgcaggaaaatgacacctacacctctacgcagcagcgctgtaaaacggtgtatgacaagtcagagaaaatgctgggctatgacgtcacttacaagattggcgatcagcaggggaaaatccgcatggataaagatcccggaacgcaaatcccgctggataataacggtcaattgattctaaataacgacgcgtaa

SEQ ID NO: 73379 - DNA, 1305 bp, Citrobacter koseri
ttgactacaccattgaaaaagatcgtgattgtcggcggcggtgctggcgggcttgaaatggcgactcagttgggtaaaaaactgggtcgtaagaaaaaggcaaaaatcacgctggtggacagaaaccacagccatctgtggaagccgttgctgcatgaagtggcgaccggttcactggacgaaggcgtggacgctctgagctacctggcgcatgcgcgtaatcatggtttccagttccagttgggttcggttatggatatcgatcgtgaagcgaaaacgatcaccattgcggaactgcgtgacgagaaaggggaactgctggttcctgagcgtaaaatcgcgtacgacaccctggtgatggcgctgggcagtacctctaacgacttcaacacccctggcgttaaagaacactgtattttcctggacaacccgcatcaggcgcgtcgcttccatcaggaaatgctgaacctgttcctgaaatactcttccagcatgggtgttagcggtaaggtcaacattgcgattgtcggtggcggcgcaacgggcgtggagctttctgcggaactgcataacgctgtgaaacagctgcacagctacggctacaaaggcctgactaacgaagcgctgaacgtgacgctggttgaagccggtgagcgtattctgcctgcgctgccgccgcgtatttccgctgcggcgcatagcgaactgaccaaactgggcgtacgcgtactgactcagacgatggtgaccagcgcagacgaaggcggcctgcacacgaaagatggcgaacacatcaaagctgacctgatggtgtgggcggcagggattaaagcgcctgatttcctgaaagacattggcgggttggaaactaaccgcatcaaccagttagtggttgaaccaacgctgcaaaccactcgtgacccggatgtttatgccatcggcgactgtgcttcctgcgcacgtcctgaagggggctttgtgccgccgcgcgcacaggccgcgcatcagatggcaagctgcgcactgaataatattctggcgcagatgaaaggcaaaccgatgaaagactatgtttataaagatcacggttcgctggtatcgctctctaatttctcgactgtcggcagcctgatggggaacctgatgcgcggttcaatgatggtggaagggcgtatcgcgcgttttgtttacatttcgctttaccgtatgcaccagattgcgctgcacggttactttaaaaccgggttaatgatgttagtaggcagcattaaccgtgtgattcgcccgcgtctgaaactgcattaa

SEQ ID NO: 73380 - DNA, 543 bp, Citrobacter koseri
atgattatctatttacacggttttgactccaacagtccgggtaaccacgagaaagtgttgcagctacagtttattgattcggatgtcagactgatcagctatagcacacggcatcccaaacatgacatgcagcatctgctgaaagaagtagacaaaatgttgcaactgaatgtggacgatcggccattaatttgtggcgtaggactgggtgggtattgggcggagcggattggcttcctgtgcgacatacgccaggtggtattcaaccctaatctgttcccctatgagaatatggaaggcaaaatcgaccgcccggaagagtatgccgatatcgcaacgaaatgcgtcaccaatttccgcgaaaaaaaccgcgatcgctgcctggtgatcctgtcccggcatgatgaagcgctggacagccatcgttcggcaaaagagctgcatcatttctatgaaattgtctgggacgaagagcagacccataaatttaagaatatctctcctcatttacagcggataaaagcgtttaaaacgttaggttaa

SEQ ID NO: 73381 - DNA, 1026 bp, Citrobacter koseri
gtgggtccagtaatgttggatgtcgaaggggttgagctggacgcagaagagcgcgagattctggcccatccgctggtgggggggctgatcctctttacgcgtaattatcatgacccggagcagctgcgcgagttagtccgccagattcgggcggcttcgcgcaatcatctggtggtggcggttgaccaggaaggcggacgcgtacagcgttttcgtgaaggttttacccgcctgccagccgcacaatcttttgctgcgctgcaagggctggaagaagggggcaaactggcgcaggacgccgggtggctaatggccagcgagatgatcgcgatggacattgatatcagtttcgcgccggtgctggatgtcgggcatatcagcgcagcaattggcgagcgttcttaccatgccgatccgcttaaagctctggcaatggcgacgcgttttatcgacgggatgcatgctgccggaatgaaaaccaccggtaagcacttccccggacatggggcagtcactgccgattcgcacaaagaaacgccgaccgatccgcgtcctgaggcggaaattcgcgccagggatatgtcggtgttccgttcgctaatcaccgggaacaaacttgatgcgattatgccggcgcacgtcatatacagcgatgtcgatccgcgtccggcgagtggttcaccgcactggctgaaaacggtgctgcgtgaggaacttggttttgatggcgtgattttctccgatgacctgtcgatggaaggggcggcgattatggggagctacgcagagcgcgggcaggcgtcgctggatgcgggttgcgatatgatcctggtctgtaataatcgtaaaggagcggtcagcgtgttagataatctgtcgccgatcaatgcagaacgtgttacgcgtttgtatcataaaggttcattttcgcgtcaggagttgatggactccgcacgctggaaaacggtcagcgcccagcttaaccagttgcatgaacgctggcaggaagaaaaagcaggtcattaa

SEQ ID NO: 73382 - DNA, 825 bp, Citrobacter koseri
gtgcagtccagcaacaataatctactgacgcgcgacgacgttttgtcgcgctacttcccgcaatatcatcccgtcgccgcctgccacaacggattaagcggcgggagttgcatcattgaacatgacgcccgccgtctggtgctccgttgccatcatgatcccttcgcgcctgaatctgattttttgcgtcagtatcacgcgttgtcacgtttaccggaaacccttgctcccagaccgcgtttttatattcccggctggatggcggtggactatttgcagggagaggtaaaatctggattaccggataccgacgaactggcgggcttactgtatcatctgcatcaacaaccgcgttttggctggcgtatttcgctgttaccgctgcttgtgcgctactggcaggggagcgatccggcacgcaggacgccgtactggctacggatgctaaaacggctgcgagcggcgcgggaacctcgtccgctgcgtctggcgcctttgcatatggatgtccacggcgataacctggtacagacggcatcggggctacggttgattgactgggaatacgccggggacggcgatatcgctctggaactggccgccgtatgggtagaggatgagcggcagcatcaacggctggtgagatcctatgccgccgttgcgcatatctgtccgcaaacgctatggcggcaggtcaggttatggcgcccctgggtaatgatgctgaaagccggatggtttgaataccgctggcagcaaaccggcgaacaacaatttatcaggctggccgacgacgcctggcggcagctgaaaaagaaaggataa

SEQ ID NO: 73383 - DNA, 642 bp, Citrobacter koseri
atgatgaaaatgaatcgctacgcactggtggccgcgctggcgatatttctctccggttgtgtggggcaacgtgaacccgcaccggttgatgaagtcaaaccggcgccggaacagccagccgaaccgcagcagcctgtgccggtcgtgccatcggtgccgacgatcccgcaacagccgggcccgattgaacacgaagaccagaccgcacagcctgcgccgcgcgtgcgccattatgactggaacagcgcgatgcagccgatggtcggaaaaatgcttcaggctgatggcgtaacggcggggaacgtactgctggtcgatagcgtaaataatcgcaccaacggttcgctcaacgcgggcgaggccacagaaactttacgtaatgcgctggcgaataacggtaaatttacgctggtttccgcgcagcaactggcgatggcgaagcagcaactgggtttatcaccgcaggacagcctcggtacgcgcagtaaagcgattggcatcgcccgtaacgtaggggcgcaatatgtgctctattccagcgcggcgggtaacgtcaatgcgccatcgctgcaaatgcagttaatgctggtacaaactggcgagataatctggtcaggtaaaggtgcagtccagcaacaataa

SEQ ID NO: 73384 - DNA, 354 bp, Citrobacter koseri
atgtcactggccttactgttgcttgcgggttgtcgctcacaccctgaaattccggtcagtgatgaacagacactggtgatggagtcaacgctgctggcggccggtatcacggcggaagcgcctgcgttgacgacgttcgatattcagccttctgcatcctcacgcctctataacgaaaggcaagaacccgttaccgtgcattatcggttttactggtatgacgccagagggctggaaatgcatcctctggaagcgccacgcagtgtgactatcccggcgcgttcgtcggtcacgctgtatggcagcgccaattatctgggggcgcataaggttagactttatctttatttgtaa

SEQ ID NO: 73385 - DNA, 360 bp, Citrobacter koseri
gtggcagaagaaactatattcagcaaaattatccgtcgtgaaatcccctcggatatcgtttaccaggatgaactggttaccgcatttcgcgatatttcgccgcaggcgcccacgcacattctgatcatcccgaataccctgatcccaacggttaatgatgtcacggcggagcacgaacaggcgctgggccgtatgatcaccgtcgcggcaaaaattgccgggcaggaaggcattgccgaagacggctaccgcctgatcatgaatactaaccgtcatggcgggcaggaggtttatcacattcatatgcacctgctgggcgggcgtgcgctggggccgatgctggcgcataaaggcttctga

SEQ ID NO: 73386 - DNA, 2199 bp, Citrobacter koseri
atgtctttcacaacacacacccaggatgagcagcgtcagcctgccgcagttcccacactgctggcagcctgcatcgctatggcattgatgccttccaccagcttcgccgctaccacaacagaagaaacaatcgttgttgatagcgcatcacaagccgacacgtccagcgatgaagaacaggactacaacgttaaaacgacaaccgctggcactaaaatgcagatggcgcagcgcgatattcctcagtctgtcagtatcatcagccagcaacgcatggctgatcagcaattacaaacccttggcgatgtgatggacagcacgctgggtatcagcagaagccagtcagactccgaccgcaacctctactactcacgcggtttcctcatcgacaactacatggtcgatggcatccccacctattttgaatcacgctggaatcttggcgatgccctttctgacacagccctgtttgaacgtgtggaagtcgtacgcggcgcaaatggattaatgaccgggaccggcaacccttccgcgtctatcaatatgatccgcaaacatgccaccagccgtgaattcaaaggtaatgtgtctgcggaatatggaagctggaacaaacagcgttacgtaaccgatttacaaagcccgctaacagaagacggtaacgtacgtgcgcggattgttgcgggttatcagaacaatgactcatggctggatcgttataacagcgagaaaacattcttctccggcattatcgatgccgatctggggagcacaaccagcctttccgccgggtatgaatatcaacgcatcgacgttaacagcccgacctggggcggtttacctcgctggaatacggatggcagcaccaacaaatatgaccgctcgcgcagtaccgctccagactgggcttacaacgataaagagtttaataaggtctttgtcacgctgaagcagcgttttgcggatacctggcaggcaacgctcaacgccacgcattctgaaatcaaattcgacagcaaaatgatgtacctggatgcctatgtcaataaagacaccggtatgctggttggcccttacgccaactacgggccagagtacggttacattggcggtacgggctggaacagcggcaaacgtaaagtcgatgctgtcgatcttttcaccgatgggggctacgacctgtttggccgtcagcataacctgatgatcggcggaagttacagcaaacaaaataaccgctatatgaatacctgggcgaacgtattcccggatgaactgggcaatttctacaactacgacggtaacttcccggaaacaaactggggtcaacaaaccgttgcccaggatgataccacgcacatgaaatcgctctatgcagcgacccgcatttcgctggccgatccgctgcatctgatcatcggcgctcgctacaccaactggagtatcgacacgctgacctaccggatggagaaaaaccataccacgccatatgccggactggtatatgacattgatgataactggtctgcctacgccagctatacttccatcttccagccacaaaactatcgtgatagctcgggtaaatacctcgcccctattacgggtaacaactatgaagtgggcttgaaatccgactggatgaacagccgcctgaccaccacattgtcggtcttccgtattgagcaggataacgtcggccagtcgaccggtagaccgatttcaggtagtaacggcgacacagcgtataaagcggtagatggaactgtcagcaaaggcgttgagttcgaaattaacggcgctatcaccgacaactggcagatgaccttcggggcaacgcgctttatcgcggaagataacgagggaaatgcggtgaatccgaacttgccacgtacaaccgtgaagttgtttaccagctaccgtctgccagtcatgcctgagttgaccgtcggcggtggcgttaactggcagaaccgtgttcacggcagcgacacggtcacaccatacggcacatggcgcgcggaacaaggcagctatgcgttagtggatctgttcactcgctaccaggtaaccaaaaacttcgccgtacagggcaacatcaacaacctgttagacaaaacctacgacaccaatatcgatggttctattgtctacggcgaaccacgtaacgtcagcattactgcaagctatcagttctga

SEQ ID NO: 73387 - DNA, 1434 bp, Citrobacter koseri
atgtttaagaatgcatttgctaacctgcaaaaggtcggtaaatcgctgatgctaccggtatccgtactgcctatcgcaggtatcctgctgggcgtcggttccgctaacttcagctggctgccagccgttgtgtcgcacgttatggcagaagcaggcggttctgtttttgcaaatatgccgctgattttcgccattggtgtcgcactgggcttcaccaacaacgacggcgtttcggctctggcctcggttgtcgcttacggcatcatggtcaaaaccatggccgtggttgcaccgctggttctgcatttacctgctgaagaaatcgcagcaaaacacctggcggataccggtgttctcggggggattatctccggtgcgattgcagcgtacatgtttaaccgcttctaccgtatcaaattgcctgagtatctgggcttctttgcgggtaaacgctttgtgccgatcatttctggtctggctgccatcttcaccggcgtgatcctgtccttcatttggccgccgatcgggacggctatccagacgttctctcagtgggctgcttaccagaacccggttgtggcgttcggtatctatggcttcattgagcgctgcctggtgccgtttggtctgcaccatatctggaacgttcctttccagatgcagatcggtgaatacaccaacgcagcaggtcaggtgttccacggcgacattcctcgctatatggcgggcgacccgactgcgggcaaactgtccggcggcttcctgttcaaaatgtacggtctgcctgctgcggctatcgcgatctggcactctgctaaaccggaaaaccgcgcgaaagtgggcggtatcatgatctccgcagcgctgacttcgttcctgaccggtatcaccgagccgatcgagttctccttcatgttcgttgcgccgatcctgtacgttatccacgcgattctggcaggtctggcattcccgatctgtatcctgctgggtatgcgtgacggtacatcgttctcgcacggtctgatcgacttcatcgttctgtctggcaacagcagcaaactgtggctgttcccgattgttggtgcaggttatgcgattatttactacaccgtcttccgtgtgctgattaaagcgctggatctgaaaacgccgggtcgtgaagacgcgagcgaagacagcaaagtgggcgcaaccagtgaaatggctccggccctgatcgccgcgtttggtggtaaagagaacatcactaacctcgacgcatgtatcacccgtctgcgcgttagcgtcgctgacgttgctaaagtggatcaggctggcctgaagacgcttggcgcagctggtgtcgtcgtcgcaggttccggcgttcaggctattttcggtacgaaatccgataacctgaaaacggaaatggatgaatacatccgcaatagctaa

SEQ ID NO: 73388 - DNA, 798 bp, Citrobacter koseri
atgtttttagtcgactcacactgccatcttgatggcctggattatcaatctctgcataaggacgtggatgacgtgctggcaaaagccgccgcgcgcgaggtgaagttctgcctggcggtggcgacaaccctgcccggataccggaatatgcgcgaactggttggcgagcgggataacgttgtgttttcctgcggcgtacacccgttaaaccaggatgaaacatacgatgcggaagacctgcgtcgctttgccgctgaagaaggcgtggtggccatgggggagaccgggctggattatttttatacgccggaaacaaaagttcgccagcaagaatccttcattaaccatattcagattggccgtgaattaaataaacccgtgattgtgcatacccgtgacgcacgcgccgatacgctggcgattttgcgcgaagaaaaagtgacggattgcggtggcgtactacactgttttacagaggacagggagacggcgggtaaattattggatcttgggttttatatctctttttccgggatcgtgaccttccgcaacgccgagcagttacgtgatgccgcccgctatgttcctctggatcgtctgctggttgagacggactctccttatcttgctccggtgccgcatcgtggtaaagagaaccagcctgcaatggttcgcgatgtcgcagagtatatggccgtattgaagggtgttgccgttgaagaactggcgcaggcaaccactgaaaactttgcccgcctgttccacatcgacgcttctcgcctgcaatcaacccgttaa

SEQ ID NO: 73389 - DNA, 1005 bp, Citrobacter koseri
atgaaatggtatccgtggttacggccagactttgaaaaactggtagcaagctatcaggcgggtcgaggccaccatgcgttactgattcaggcgttgcccggaatgggggatgatgcgctgatttatgccctcagtcgttatttgctgtgccagcaaccggaagggcataaaagctgcgggcgctgtcgtggctgccagttaatgcaggcgggtacgcatcctgactattattcgctgttgccggaaaagggaaaaagcactcttggcgtggacgcggtacgcgatgtgggcgagaagctgtacgaacattctcgacttggcggcgcgaaagtcgtgttgatcccggatgcggccctgctgactgatgccgcggcgaatgccttattaaagacgctggaagagccgccggagcaaacctggttcttccttgccagccgtgaaccggcacgcctgctggcgactttacgcagccgctgccgtctgcatcatcttgcgccgccatccgaacaatacgctgtttcctggctttctcgtgaagtgacaatgtcacaagagacgttgctggcggcgctgcgcctgagcgcaggggctcccggcgccgctctggcgttgttgcaggccgacagctgggcgcatcgtaacgcgctttgcgaagcgctggcgaatacgctgcaatccggcgactggtatatccttctgtcggtgttgaatcacgaacaggccgccgtacgtttacactggctggcgacgctgcttatggatgcccttaaataccagtatggcgcttccagcctgacaaatcaggatgccggaacgcaggtggcgtcgatagctgaacggttatccgtcgcacgcatccaggccatactcagtgatgtctgccattgtcgcgaacagctgattaacgtgaccggattaaaccgcgaactggtattaaccgatcttattctccgcatagagcattacctgcaaccaggcgccatgttgcctgtttcccatctttga

SEQ ID NO: 73390 - DNA, 642 bp, Citrobacter koseri
atgggcagtaactatatcgtcatcgaaggcctggaaggcgccggaaaaaccaccgcgcgtaacgtggtggtggagacacttgagcaactgggtattcacgacatgatttttacgcgtgagccgggcggcacccagcttgcagagaaattaagaagtctggtgctggacatcaaatcggtgggtgatgaaacgatcacggataaagctgaagtgctgatgttttatgccgcgcgagtgcaactggtggaaaccgttatcaagcctgcgctggcgaaaggaacatgggtcattggcgatcgccatgacctgtccacccaggcctaccagggtggcggccgtgggatcgatcagacaatgctggcgacgctgcgtgatgctgtattgggcgacttccgtcctgacctgaccctgtatctggatgtgacgccggaggttggcttaaaacgcgcgcgcgcgcgcggcgaacttgaccgcattgagcaggagtctctggatttcttcaatcgcacgcgtgcccgctaccttgagctggccgccagcgatgccagcattcgcaccattgatgcgactcagccgctggaggctgtgatgaacgatattcgcacaaccgtaacggcctggatcaaggagcagggtgcatga

SEQ ID NO: 73391 - DNA, 1023 bp, Citrobacter koseri
atgaaaagaatgttacgctttttccttctgctggtcgttgtgttgggcattgccgctggcgcaggaatgtggaaagtgcgccaactggccgatagtcccttgttaataaaagaagagacgatctttaccctgaaggccggaaccgggcgtctggcattaggcgagcaactctacgccgacaagattatcaatcggccgcgcgtgtttcagtggttgttgcgcgttgaacctgaattatcaaactttaaagcgggcacctatcgtttaacgcctgatatgaccgtacgggagatgctgaaactgctggaaagcggtaaagaagcacagttcccgctacgtctggtcgaagggatgcgcctgagcgattacctgaatcagttgcggaatgcgccttatattcagcatacgcttagcgatgaccgttacgaaaccgtcgcgcaggcgctgaagctggagaacccggagtggcttgaaggttggttctggccggacacctggatgtataccgccaacaccaccgacgtcgcgcttctgaagcgtgcgcatcaaaagatggttaaagcggtagatgacgtctgggaagggcgcgcggaagggttgccttataaagataagaatcaactggtgacgatggcgtctattatcgagaaagagacggccgtcgccagcgaacgcgatcaggtggcatcagtctttattaaccgtctgcgtattggtatgcgtttgcagaccgatccgaccgtgatttacggcatgggggcgagttataatggtaagctgtcgcgcgcggcgctggaaacgccgacggcgtataacacctataccatcaccgggttgccgccaggtcctatcgccatgcctggcgaagcctctttgaaagccgccgcgcatccggcgaaaacgccgtacctctattttgtggctgacggaaagggcggtcacacgtttaacaccaatcttgccagccataaccggtcagtgcaggactacctgaaagtgcttaaggaaaaaaatgggcagtaa

SEQ ID NO: 73392 - DNA, 810 bp, Citrobacter koseri
atgttcttaattaatggccgtgaacaggattctcttgccgcaagcgatcgcgcgacgcagtttggtgatggctgtttcactactgcgcgaatccgtgacggtaaaatttgcctcctgcccgcacaccttcgccgtttgcaggatgcctgcgaaaaactgctgcttcccttcagtcaatggacggagctgcaacacgaaatgacggcgatggcagcaggccagaacagtggcgtactgaaagttatcctgagtcgtggcagcggcggcaggggctacagcccgtcaaactgccgtgaggccacgcgaattttatccgtttctccttatcccacccattatgaacgctggcgtacggaaggtattacgctggcgctaagccccgtaaggctggggcgtaaccctatgcttgcgggtataaaacaccttaaccggctggaacaggtactgatccggtctcatcttgagcagacaaacgccgatgaagcgctggttcttgacagcgagggatgggttacggaatgctgtgcggctaatttgttctggcgtaaagagaatgtggtgtacacgccgcgcctggatcaggcgggggtaaacggcattatgcgacaattttgtttacagtcgctggcacaatcacctttccaggttgtcgaagtgtatgccggggaggatgcgcttatgcaggccgatgagatggttatctgcaatgcgttgatgcccgtgattcccgtgcgcgcctgtggcgataaactgatgtttgcacgttcattgttcgattttttagccccactttgtgagcacccgaattag

SEQ ID NO: 73393 - DNA, 1242 bp, Citrobacter koseri
gtgtctaagcgtcgtgtagttgtgaccggactgggcatgttgtctcctgtcggcaataccgtagagtctacctggaaagctctccttgccggtcagagtggcatcagcctgatcgaccatttcgatactagcgcctatgcaacgaaatttgctggcttagtaaaggattttaactgtgacgacatcatctcgcgcaaagaacagcgcaagatggatgccttcattcaatatggaattgtcgctggcgttcaggccatgcaggattctggccttgaagtaacggaagagaacgcagcccgtattggcgccgctatcggctctggtatcggcggtctcggactgatcgaagaaaaccacagttccctggtgaacggtgggccgcgtaagatcagcccgttctttgttccgtcaacgattgttaacatggtggcaggtcacctgaccatcatgtacggcctgcgtgggccaagcatctctatcgctaccgcctgcacctcaggcgtacataacatcggtcatgccgcgcgtatcattgcatacggcgatgcggacgcgatggtagcgggtggtgcggaaaaagccagtacgccgctgggtgtcggtggctttggcgcagcgcgtgcgctgtctacacgtaatgataacccgcaagcggccagccgcccgtgggataaagagcgtgacggttttgttctcggcgatggcgcgggcatggtggtactggaagagtacgaacatgcaaaagcgcgcggcgcgaaaatttatgccgaaatcgttggcttcgggatgagcagcgatgcttatcacatgacgtcaccgccggaaaatggcgcgggcgccgcgctggcgatggtcaatgcactgcgtgatgcggccattgagccgggtcagattggttacgtcaacgcccacggtacgtctacgccggcaggcgataaagcggaaactcaggcggtaaaatctgtctttggcgatgcggcaagccgtgtgctggtcagctcgacgaaatccatgacgggtcacctgctgggtgctgcgggcgcggtagagtccattttctctatcctggcgctgcgcgaccaggctgttccgccaaccatcaacctggataacccggatgaaggttgcgacctggactttgtgcctcacgaagctcgtcaggttaacggaatggagtatacgctgtgtaactccttcggctttggcggtactaacggctcgttgatcttcaaaaaggtctaa

SEQ ID NO: 73394 - DNA, 237 bp, Citrobacter koseri
atgagcactatcgaagaacgcgttaagaaaattatcggcgagcagctgggcgttaagcaggaagaagttaccaacaatgcttctttcgttgaagacctgggcgcagattctcttgacaccgttgagctggtaatggctctggaagaagagtttgatactgagattccggacgaagaagctgagaaaatcaccaccgttcaggctgccattgattatatcaacggccaccaggcgtaa

SEQ ID NO: 73395 - DNA, 735 bp, Citrobacter koseri
atgagttttgaaggaaaagtcgcgctggttaccggtgcaagccgtggcattggccgcgcaattgctgagacgctcgttgcccgtggcgcgaaagtcatcggtactgctaccagcgaaaatggcgctcaggccattagcgaatacttaggtgcgaacggtaaaggtctgatgttgaatgtgaccgatccggcatctattgaatctgttctggaaaatattcgcgcagaatttggtgaagttgatatcctggtcaataatgccggtatcactcgcgataatctgctgatgcgaatgaaagatgatgagtggaacgatattctcgaaaccaatctgtcatctgttttccgtctgtcaaaagcggtaatgcgcgctatgatgaaaaaacgtcatggacgtattatcactatcggttctgtggttggtaccatgggaaatgcgggtcaggccaactacgctgcggcgaaagcgggtctgattggcttcagtaaatcactggcgcgtgaagttgcgtcgcgtgggattactgtcaatgttgtggctccgggctttattgaaacggacatgacgcgtgcgctgtctgatgatcagcgtgcgggtattctggcgcaggttcctgcgggtcgcctcggcggcgctcaggaaatcgccagtgcggttgcatttttagcctctgacgaagcaagttacatcactggtgaaactctgcacgtcaacggcggaatgtatatggtttaa

SEQ ID NO: 73396 - DNA, 930 bp, Citrobacter koseri
atgacgcaatttgcttttgtgttcccggggcagggttcccagacggttgggatgttgtctgaaatggcagccagctacccgatcgtagaagaaacctttgctgaagcttctgcggcgctgggttatgatctgtgggcgctgacgcagcaagggcctgcggaagaactgaataagacctggcagactcagccagcattgctggctgcttccgttgcgctgtatcgcgtatggcagcagcagggcggtaaagcgcctgcgctgatggcgggacacagcctgggggaatactccgcgctggtatgtgctggcgtcatcgatttcgctgacgcggttcgtctggttgaactgcgcggcaaattcatgcaggaagctgtgccggaaggcaccggcgcaatggcggcgatcatcggtctggatgatgcgtccatcgccaaagcgtgtgaagaggcggctgaaggccaggtggtttctccggtgaactttaactctccgggccaggtggttatcgccgggcataaagacgcggttgaacgtgcgggcgcagcctgtaaagccgctggcgcaaaacgtgcgctgccgctgccggtaagcgtgccgtcacactgtgcgctgatgaaacctgcggctgataagctggcggttgaattagcgaaaatcaccttcaatgccccgaccgtaccggttgtgaataacgttgacgtgaagtgtgaaaccgacgctaacgctatccgtgatgcgctggtacgccagctgtacaacccggtgcagtggacgaagagtgtagaatttatcgcagcacaaggtgttgaacacctttatgaagtgggtccaggtaaagtcctcactggtctgactaaacgtattgttgacaccctgacggcctcggcgctaaacgaaccggcggcactgtcagcggcgcttgagcaataa

SEQ ID NO: 73397 - DNA, 954 bp, Citrobacter koseri
atgtatacaaagattattggtactggcagctatctgcctgaacaagtgcgtactaacgccgatttggaaaagatggtagagacgtctgacgagtggattgtcacgcgtacaggcatccgtgaacgccatattgcagcgccaaacgaaacagtcgcgacgatgggctatacagccgcaaaccgcgcgcttgaaatggcgggcatcgataaagaccagattggcttgattgtggtggcgaccacgtcagcaacacatgctttcccaagcgcagcatgccagattcagagcatgttgggcattaaaggctgcccggcgtttgacgttgcagcggcctgcgccggttttacctacgcgttaagcgttgccgatcagtatgtaaaatcaggcgccgttaaatatgcgctggtcatcggttccgatgtcctggcgcgcacctgcgatcccaccgatcgcgggacgatcattatctttggtgacggcgcgggcgcagcggttctgagcgcatccgaagaaccaggcattatttcgacgcatcttcatgcagacggcagctacggtgagttgctgacgctgccaaacgccgatcgcgtcaatccagaaaatccgatttatctgacgatggcgggcaacgaggtgtttaaagtggcggtaactgaactggcacacatcgttgacgagacgctggcggcgaataatctggatcgttccgctctggactggctggttccgcaccaggctaacctgcgcatcatcagcgcgacagcgaaaaagctgggtatgtcgatggataatgtggtggttacgctggacagacacggcaacacctctgcggcctctgtgccgtgcgcgctggatgaagccgtgcgcgacgggcggattaaagccgggcagttggtattgcttgaggccttcgggggtggattcacctggggctccgcgctggttcgtttctag

SEQ ID NO: 73398 - DNA, 1134 bp, Citrobacter koseri
gtgaggatttccccgcgtaagcggggaaacaccaaaccaggcagcgacgataccttgacacgtctaaccctggcgttagatgtcatggggggagattttggcccttccgtgacagtgcctgcagcattgcaggcactgaattctaattcgcaactcacacttcttttagtcggggatcccgataccatcacgccattacttgccaaagctgactttgaacagcgttcgcgtctgcagattatccctgcacagtcagttattgccagtgatgcccggccttcgcaggctatccgcgccagtcgcggcagctcaatgcgtgtggccctggagctcgtgaaagaaggtcgagccgaagcctgtgtgagcgccggtaatacgggcgcgctcatgggacttgcgaagttattgctcaaaccccttgagggcattgagcgtcctgcgttgatgacggttttaccgcatcagcagaaaggaaaaacggtggtgctggatttaggcgccaacgtcgattgtgacagtaccatgttggtgcagtttgccgtgatggggtccgtgatggcggaagaggtgattgggataaccaatccccgcgtggcgttgctcaatattggtgaagaagaaaccaaaggtctcgacagtattcgtgatgcctctgcgttgctcaaaacagtcccttccatcaattacattggttatcttgaagccaatgaattattgacgggaaaaactgatgtgctggtatgtgacggatttacaggtaatgtcacattaaagacaatggaaggggttgtcaggatgttcctttcactgctgaaatctcagggtgagagtaaaaaacggtcgtggtggctgctgttattaaaacgttggttacaaaaaagcctgacgaggcgattcagtcacctcaaccccgaccagtataatggcgcctgtctgttaggattgcgtggcacggtgattaaaagtcatggtgcggccaatcagcgagcatttgccgtcgcgattgaacaggcagtgcaggcggtgcagcgacaagttcctcagcgaattgccgctcgcctggaatctgtatacccagccggattcgaactgttggaaggtggcaaaaacggacactcacgggtgcacaattaa

SEQ ID NO: 73399 - DNA, 174 bp, Citrobacter koseri
atggccgtacaacagaataaaccaacccgttccaaacgtggcatgcgtcgttctcatgacgctctgaccgcagtcaccagcctgtctgtagacaaaacttctggtgaaaaacacctgcgtcaccacatcactgccgacggttactaccgcggccgtaaggtcatcgctaagtaa

SEQ ID NO: 73400 - DNA, 522 bp, Citrobacter koseri
atgcaaaaggtaaaattacccctgactcttgatccggttcgtacggctcaaaaacgcctcgattatgaaggtatctatacttctgatctggtagagcgcgtcgccgattctgtagtcagtgtggacagtgatgtggaatgctccatgtcgttcgctatcgataaccaacgtctcgccgttattacgggtgatgcgaaggtgacggtatcgctcgaatgccagcgttgcgggaagccgtttacccatcaggttcacacaacgtattgttttagtccggttcgttctgacgaacaggctgaagcactcccggaagcgtatgagccgattgaggttaacgaattcggtgaaatcgatctgcttgcaatggttgaagatgaaatcatcctctccttgccggtagttccggtgcatgattctgaacactgtgaagtgtccgaggcggacatggtctttggtgaactgcctgatgaagcgcaaaaaccaaacccatttgccgtattagccagcttaaagcgtaagtaa

SEQ ID NO: 73401 - DNA, 585 bp, Citrobacter koseri
atgccccgtctcatccttgcttctacctctccctggcgtcgcgcgctgctcgaaaaactggcgatccctttcgagtgcgcggctcccgaggttgacgaaacgcccatgtctggcgaagcgccgcgccatttggtctctcgcctcgcacaggcgaaagcgcaatcgctcgcccaccgtttccccgatcatctgattattggctccgatcaaatttgcgttctggatggcgaaattaccggcaaaccgttaaccgaagaaaaagcgcgccagcaattaaccaaagccagcggtaatattgtgacgttttataccggactggcgctttataattctgcaaccggacatttacaaacggaagtcgaaccgtttgatgtgcatttccgccatttaagcgaaacggaaatagaggactatgtccgcaaagagcgtccattgcattgtgccggaagttttaaaagcgaaggtcttggcattgcccttttcgaacgcctggaggggcgagatcccaatacgcttattgggctaccgctgattgcgctgtgccagatgctgcgccgggaggagatgaacccgctgatggcatag

SEQ ID NO: 73402 - DNA, 996 bp, Citrobacter koseri
atgagtggcgctaatccttatggctatttagaatcggcccccatgaaaactgagactccatccgtaaaaatagttgccattactgccgacgaagcggggcaacgcatcgataactttttgcgcacgcaactcaaaggcgtaccgaaaagcatgatttaccgcattttgcgtaaaggtgaagtgcgggtgaacaaaaaacgcatcaaaccggaatataagctcgaagccggggatgaagtgcgtattccgccggtgcgcgtcgccgaacgcgaagaagaggccgtttcgccgcatctgcaaaaagtggcggcgctggccgatgtcattttgtatgaagatgaccatatcctggtgctgaacaaaccttccggcacggcggtacatggcggaagcgggttgagcttcggcgttatcgaagggctgcgcgcgttgcggccagaagcgcgtttcctggaactggtgcatcgtcttgaccgcgatacctctggcgtactgctggttgcgaaaaaacgctcagcgctgcgttctttgcatgagcaactgcgtgagaaggggatgcagaaagattatctggcgctggttcgcggccagtggcagtcgcatgttaaatcggtacaggcgcctttattaaagaatattctgcaaagcggcgaacgtattgttcgtgtgagtcaggaaggaaaaccctccgaaacgcgctttaaggttgaagagcgctatgcgtttgcgacgctggtgcgctgtagcccggtgacgggacgtacgcatcagattcgtgtgcatacgctgcatgcgggccatccgatcgcgtttgacgatcgttacggcgatcgcgaatttgataagcagcttgcgggaacggggctgtcacggctttttctgcacgcggcagcgctgaagtttacccatccggggactggcgaggtgatgcgtatcgaagcgccgatggataaccaactcaagcattgccttcaggtgttacgtaacaaagcctga

SEQ ID NO: 73403 - DNA, 3198 bp, Citrobacter koseri
atgaaaagaatgttaatcaacgcaactcagcaggaagagttgcgtgttgcccttgtagatgggcagcgcctgtacgacctggacattgagagtccaggacacgagcagaaaaaagcgaacatctataaaggcaaaattacccgtatcgaaccgagtctggaagcggcttttgttgattacggcgctgaacgtcacggtttcctcccgttaaaagaaattgcccgcgaatatttccccgccaactacaacgcccacggccgtccaaacattaaagatgtgttgcgcgaaggtcaggaagtgattgttcagattgataaagaagaacgcggcaacaaaggcgctgcgctgacgacgtttatcagtctggcagggagctatctggttttaatgccgaacaacccgcgcgcgggcggcatctcccgtcgcattgaaggcgacgatcgcaccgaattaaaagaagcgctggcaagcctcgaactgcctgaaggcatggggcttatcgtgcgtaccgcaggcgtcggcaaatccgccgaagcgttgcagtgggacctgagcttccgcctgaaacactgggaagcgattcagaaagccgctgaaagccgccctgctccattcctgatccatcaggaaagcaacgttatcgtccgcgcattccgtgactacttacgtcaggatatcggcgaaattcttatcgataatccgaaagtgcttgagctggcgcgccagcacatcgcggcgttgggtcgcccggatttcagcagcaagattaagctttacaccggcgaaattccgctgttcagccactaccagatcgagtcgcaaattgaatccgccttccagcgtgaagtgcgtctgccttccggcggctctatcgttatcgacacaaccgaagcgttaaccgcgattgatattaactccgcgcgtgccacacgcggcggcgatatcgaagaaaccgcgtttaacacaaacctggaagcggccgatgaaattgctcgccagttgcgcttgcgcgacctcggcggcctgatcgttatcgacttcatcgacatgacgccagtacgccaccagcgcgcggtggaaaaccgtctgcgcgaagcggtacgtcaggatcgtgcgcgtatccagattagccatatttctcgttttggcctgctggagatgtcccgccagcgtctcagcccgtctctgggcgagtccagccatcacgtctgcccacgctgtagcggcaccggcaccgtccgcgacaacgaatcgctctccctgtctattctgcgtctgattgaagaagaagcgctgaaagagaatacccaggaagttcacgccattgttccggttccgatcgcctcttacctgcttaacgaaaagcgcaccgcggttaatgctattgagactcgccaggatggcgtgcgctgcgtgatcgtaccaaacgatcagatggaaacgccgcactactccgttttgcgcgtacgtaaaggggaagaaacgccaaccctgagctacatgctgccgaaactgcatgaagaagcgatggcgttgccttctgaagaagagtacgccgagcgtaaacgccctgaacaaccagcactggcgaccttcgcgatgccggaagtgccgcctgcgccgacgccagcagaacctgcggtgaaaacagcgacggcagcaccgaaagccgttgccactgcgcctgcacagccaggtctgcttacccgcttcttcggcgcgctgaaaaacatgttcagcggcagcgaagtcgccaagccgattgaacaacctgcaccgaaagcagaagaaaaaccggagcgtcagcaggatcgtcgtaagtctcgccagaataatcgccgcgaccgtaacgatcgccgtgacaaccgtgataatcgcgacaaccgcgctgaaggcggtgaaaaccgtgatgacaaccgtcgtaaccgtcgtcaggcgcagcagcagaacgcagaagcgcgtgacaaccgccagcagtctaacgacgttgccgataaggcgaagtccggtgacgagcagcagacgccgcgtcgtgaacgcaaccgtcgtcgcaacgatgaaaaacgtcaggcacagcaagaagtcaaggcgctgaatctggatgagcaaccggctcaggagacggaacaggaagaacgcgttcgtcaggcgcagcctcgccgcaaacagcgtcagctgagccagaaagttcgttacacagactctgcaacctctgaagcagaagctgtcgcaacgccagtcgtcgaagacgctgtcgccgcccagcctgctacgcaaagcgcgcctgctcagcgtactgaactggcgaaagtcgacctgccagcgatcgcagacgttgcgccagcagagcaggaagaaaacggcgaagcgcgtgataacgcaggaatgccgcgtcgctcccgtcgttctcctcgccacctgcgcgtcagcggccagcgtcgtcgtcgctaccgcgatgagcgttacccgcttcaatcgccaatgccgttaaccgtcgcttgcgcttcaccggaaatggcgtctggcaaagtgtggattcgctaccctgtcgcccgtcctcaggatacgcaggttgaagcacagcacgaagaagagaccgtacaagctcagccggttgcagtagagccgcaggtcgtcgctgccgcagctgaacaggttgtagacgcaccggttcaaactaaaaccgttgtcgctgaacctcagcccgctactgtggaaacaacgcatcctgaagtgattgccaccccggttgaagaacaacctcaggtgattgcagaggctgacgtccctgttgcgcaggaagtcgctgcacaagcggaacctgtcgctgacgttcaggaaaccacgacggctgaagaatccgctgacgttgtcatcgccgaaccggaagagatcgttaaagaaacggttgaacctgtcgttgttgccgctgaaccggaagagattatcgctgcgccagtcgccgttgcagttgctgaaaccgtgtcagaaagcgcggtaactaccggggagaaacctgtcagccacgccagtgcgccgatgacccgcgcgcctgcgccggaatatgtcccggaagcgccacatcacagcgactggcagcgccctgccttcatctttgaaggtaaaggtgcggcaggtggtcatagcgcaacgcatcaggccgccgcgccagccacgcgcccgcagcctgtagaataa

SEQ ID NO: 73404 - DNA, 954 bp, Citrobacter koseri
atgcgtatcagtacccagatgatgtaccagcagaatatgcgtggtatcaccaattcccaggctgaatggatgaagtacggtgagcagatgtccaccggtaagcgcgtgattaatccgtctgacgatcctattgccgcttctcaggctatcgtactcgctcaggcccaggctcagaacagtcagtatgcgctggcacgtacctttgccactcagaaagtgtcgctggaagaaaacgtgctaagtcaggtgacagctgcaattcaaactgcgcaggaaaaaatcgtttacgccgctaacggcaccttaagcgatgatgaccgcgcctcgctggcgagcgatctacagggggttcgcgatcagttaatgaacctggccaacagcaccgacggcaacggtcgttacattttcgcaggctataaaactgaaaaagcgccgtttgatcaggcaaatggcgactatagcggtggcactgaaaacatcacccagcaggttgatgcttcgcgtacgatggtgattggtcatacgggcgatcagatttttaatcgtattaccagtaatgccgtaccggaacccgacaacagcgcttcagaaaccagcctgtttgcgatgctggatacggccattgcagcgctgaaaacgccggttgctgacgatgatgtgaagaaggcggaagctgctgcggcgattgataaaacaaaccgtggcctgaaaaactcccttaataacgtcctgaccgttcgtgcggaactgggaacgcaattgagtgagctggattctctggattcattgggaagcgagcgcgcgctgggtcaggcacagcagatgagtaatctggtcgatgtggactggaacgcggccatctcgtcgtatgtaatgcaacaggctgcgttacaggcgtcctataaagcatttagcgatatgcaaggaatgtctctgtttcagttgaacaaatag

SEQ ID NO: 73405 - DNA, 1635 bp, Citrobacter koseri
atgtccagcttaattaacaacgccatgagcggacttagcgcagcccaggctgcgttaaatactgccagtaataacatctccagctataacgttgccggatacacccgacagacgacgattatggcgcaagccaacagtacgctgggagcgggcggttgggtcggtaatggcgtctacgtttctggcgtacagcgtgagtatgattcttttattaccaatcagttacgcgcggcgcagaatcagagcagcggtttgactacgcgttatgagcaaatgtcgaaaattgataacctgctctccagtaccaccagctcgatttcgacctctctgcaaggtttcttcaccagcctgcaaacgctggtcagcaacgcggaagacccggcagcgcgtcaggcgcttatcggtaaagccgacggcctggtaaaccagtttaaaacgaccgatcagtacctgcgcgatcaggataagcaggtcaatatcgccattggctccagcgttgagcagatcaacaattacgcgaagcaaatcgccagcctgaacgatcagatttcccgtctgaccggggtgggcgcgggcgcttcaccgaacgatcttctcgaccagcgcgaccaactggtgagtgagctgaaccagattgtcggtgtggaagttagcgtccaggacggcggcacctataacctgacgatggcgaatggctataccctcgtacagggcagcagcgcccgtcaactggcagcggtgccgtccagcgccgatccgtcacgcaccacggtcgcctatgttgatgcgactgccggaaacattgaaatcccggaaaaattgctcaatagcggctcgcttggcgggttgctgacgttccgctctcaggatctggatcagactcgcaataccctcaaccagctggcgctggcctttgccgaagcgtttaatgcccagcataaacagggatatgatgccaatggcgatcagggcgaggacttcttttccatcggtaaaccgtccgtattgagtaatgcgaaaaatacgggtagcggaaccttgtctgcggaagtcaccgacagttccgcggtacaggctaccaattataaactggtatttgatggtcaggactggcaggtcacccgcttgtcagacaacaccagctttaaggcggttgaaaccaacgggaaactgacgtttgacggactggaagtgacggtcggggcaggggcaaatgcgaatgacagctttaccctgaaaccggtcagcgatgccattgtgaacatgaacgtgctggtgaccgatgaatccaaaattgcgatggcttccgatcccgatgcgggtgggagcgataaccgtaacggtcaggcgctgctggatttgcaaacccagaaaacggtaggcaataagtcctttaatgatgcttatgcgacgatggtcagcgatgtggggaacaaaaccgccacgttgaaaaccagcagcacggcgcagggcaatgtcgtgacgcagttgtacaaccagcagcaatcgatttcaggcgttaaccttgatgaagaatacggcaacctgcaacgctaccaacagtattacctggcgaacgcccaggtgctgcaaaccgcgaatacgctgtttgatgcgctgttgggcattcgctaa

SEQ ID NO: 73406 - DNA, 951 bp, Citrobacter koseri
atgattggtgacagcaaactgttggccagcgcggcctgggatgcgcaatcgctcaatgagctgaaagccaaagcggggcaagatccggcggcgaatatccgcccggtcgctcgtcaggttgaagggatgtttgtgcagatgatgctgaaaagcatgcgtgaagcgctgccgaaagacggcatattcagcagcgatcaaacgcgactgtacaccagcatgtatgaccagcagattgcgcagcagatgaccgccggtaaagggttgggactggcggagatgatggtcaggcagatgaccgaggggcagacgcagcctgcggaagaagcgccgcaggtgccaatgaagttccctctggaaacggtgaccagctatcaaaatcaggcgctgacgcagctggtgcgtaaggcgatgccaaaagtgccggaaaataatgatgagccgctgtccggcgacagcaaagacttcctggcccagctttcgcttccggcacgcctggcaagtgaacaaagcggcgtgccgcatcatctgattctggcgcaggcggcgctggagtcgggatggggtcagcgacagatccgccgtgaaaatggcgagccgagctttaacctgtttggtattaaggcctcgtccaactggaaggggccggtaacagagatcaccaccaccgaatatgagaacggcgaagcgaagaaggtaaaagcgaaattccgcgtttacagctcctatctggaggcgctatcggattatgtggggctgctgacccgtaacccgcgctatgccgcggtgaccgccgcgtctaccgctgaacagggcgcacaggcgttacaaaatgccggttatgcaaccgatcctgactatgcgcgtaaattaaccagcatgattcaacagctgaaatccatgagcgacaaggtgagcaaaacgtacagcgcgaatctcgacaatctcttttaa

SEQ ID NO: 73407 - DNA, 1098 bp, Citrobacter koseri
gtgtttaaatctcttgttggaattgtactgatactggcaaccaccctggcgcatgccgatcgtattcgggatctgaccagcgtgcagggggtgcgggaaaactcgctgattggttacgggctggtggtcggcctggacgggacgggcgaccagacgacccagacgccctttaccacccagacgctgaataacatgctgtctcagttggggatcaccgtcccgacgggcaccaatatgcagttgaaaaacgttgcggcggtaatggtcactgcgcaatttccggcattcggtcgccaggggcaaacgatcgacgtggtggtgtcctcaatggggaacgcgaaaagtctgcgcggcggtacattgctgatgacgccgctgaaaggggtcgatagccaggtgtatgccctggcgcagggaaatattttagtcggcggcgcaggggcgtctgcgggcggcagcagcgtacaggttaaccagctcaatggcgggcgtatcaccaatggcgcaattattgaacgcgagctgcccagccagtttggcggcggaaataccctcaatctgcaactgaacaacgaagacttcgcaatggcgcagcagatcactgacaccatcaaccgcgcccgtggctatggcagtgcgaccgcgctggatgcgcgcacgattcaggttcgcgtacccagcggcaacagctcgcaggtccgtttcctcgcggatatccagaatctggaggtgaacgtcacaccacaggacgcgaaggtggtgattaactcccgtaccggttccgtggtgatgaaccgtgaagtgacgctggacagctgcgccgtcgcgcaaggcaatttgtccgtaacggtgaatcgccaggcgaacgtcagccagccggacacgccgtttggcggggggcagacggtcgtcacgccacaaacgcagattgatttacgtcagagcggcggttcgctgcaaagcgtccgttccagcgccaacctgaacaacgtcgtccgcgcgctgaatgcgctgggcgccacgccgatggatctgatgtccatcctgcaatccatgcagagcgcgggttgtctgcgcgccaaactggaaattatctga

SEQ ID NO: 73408 - DNA, 753 bp, Citrobacter koseri
gtgtcgtccggtgagggaaacctcaccggcacactgattttgaagatgaaggcaatgcaaaaatacgctgcgcaccattacccgattatggccctgctggtggtttcactgacaggatgtgcctggataccttccacaccgctcgtgcagggcgcgaccactgcacagcccataccgggcccgactccggtggcgaatggttccatttttcagtctgcgcagccgatcaactatggctatcagccgctgtttgaagaccgacgtccacgcaatatcggcgatacgctgacgattgtattgcaggaaaacgtcagcgccagtaagagctcctccgccaatgccagccgtgacggtaaaaccaacttcggctttgatacggttcctcgttatttgcagggattgttcggcaacgcgcgtgcagatatggaagcctctggcgggaactccttcaacggtaaaggcggcgcgaacgccagcaatacctttagcggcacgctgaccgtgaccgtcgatcaggtactggcaaatggcaatttacacgtcgtgggtgaaaaacagatcgccattaatcagggcactgagttcatccgcttctccggggtcgtgaacccacgcaccatcagcggcagcaactccgttccgtcaacacaggttgcggatgcgcgcattgaatatgtcggcaacggctatatcaacgaggcgcaaaatatgggttggctgcaacgtttcttccttaacttgtcgccgatgtaa

SEQ ID NO: 73409 - DNA, 783 bp, Citrobacter koseri
atgatcagttcattatggatcgccaaaaccggcctggacgcgcagcaaaccaacatggatgtgattgccaacaacctggcaaacgtcagcaccaatggttttaagcgtcaacgtgcggtgtttgaagacctgctgtaccagacgattcgtcagcctggcgcgcagtcgtcagaacagacgaccttaccttctggtctgcaaatcggtacgggcgttcgcccggtcgccaccgagcgtctgcatagtcagggcaacctgtctcagaccaacaacagtaaagatgtcgccatcaaagggcagggcttcttccaggtgatgttgccggatggcacttctgcttatacccgtgacggttctttccaggtggatcagaacggccaactggtcacggcgggcggcttccaggtacagccagcgatcaccattccggcgaactcgctgagcatcaccgtgggtcgcgatggcgtggtaagcgtaactcagcaggggcaggccgcaccggtacaggtggggcagcttaacctgactacgttcatgaacgatacgggtctggaaagcattggtgaaaacctgtacaccgaaacgcaatcctcgggtgcgccgaatgagagtacgccagggcttaacggtgcgggtctgctgtatcagggctatgtcgaaacctctaacgtaaacgtggcggaagaactggtgaatatgatccaggttcagcgcgcttacgaaattaacagcaaagcggtatcgactaccgatcagatgctgcaaaaactgacgcaactctaa

SEQ ID NO: 73410 - DNA, 756 bp, Citrobacter koseri
atggatcacgcaatatataccgccatgggcgcggccagtcagacgcttaatcaacaagcggtgacggccagcaacctggcgaacgcctccacgccgggttttcgtgcgcaactcaatgcgttgcgcgcggtgccggtggaaggtctctctttaccgacgcgtacgctggtggctgcgtccacgccgggagccgatatgacgcccgggcagatggattacacctcgcgcccgctggatgtggcgctgcaacaggatggctggctggttgttcagaccgctgatggtaacgagggatacacccgtaacggcagcattcaggtggacccgaccgggcaactgacaattcaggggcatccggttatcggtgaagccgggccgattgccgttcctgaaggttcagaaatcactatcgcggcagacgggactatctctgcgcttaaccctggcgatccggccaataccgtcgcaccggtaggacgtctgaagctggtgaaggcgcttggcagcgaagtgcaacgcggcgatgacggtatgttccgtttaagcgcggcgacacaggctgcgcgtggcccggtgttgcaggctgacccgtccattcgcgtgatgtctggcgtactggagggtagtaacgtgaatgcggtgtccgccatgagcgatatgatcgctaacgcccgccgttttgaaatgcagatgaaggttatcagcagcgtggatgacaatgccgggcgcgctaaccaactgctgtcgatgagttaa

SEQ ID NO: 73411 - DNA, 1206 bp, Citrobacter koseri
atggccttttctcaagcggtcagcggtctgaacgcagcagcgaccaacctcgatgttattggtaataacatcgccaactccgccacctacgggtttaaatccggtacggcgtcttttgctgatatgttcgcgggctccaaagtgggcctgggcgttaaagtcgccgggattacccaggactttaccgacggcactaccaccaacaccgggcgtggtctggatgttgcgattagccagaacggtttcttccgtctggttgacagcaacggctccgttttctacagccgtaacggccagttcaaactggatgagaaccgcaatctggttaacatgcaggggctgcaactgaccggctatccggcaaccggaacgccgccgacgatccagcagggggcgaacccaggcccgatcaccatcccgaacaccctgatggccgcgaaggcaaccaccacggcgtctatgcagatcaaccttaactccagcgatgaactgccgtcgaaaacgccgtttgatccgagcgatgcggattcctacaacaaaaagggtaccgttaccgtttttgacagtcagggtaacgcccatgatgtgaatgtgttctttgttaagacgcaggacaacacctgggaagttcacaccatggacagcagcgatccaaccgcgacgccgacgttgtctaccacgatggaattcaatgaaaacgggatgctggtttctggcggttccgccaatatcgtcactggcgcaattaatggtgcggatccagcctctttctccctgagcttcctgaattccatgcagcagaacaccggtgcgaacaacatcgtcgcgaccaaccagaacggctataagccgggcgatctggtgagctatcagatcaacgatgacggcaccgtagtgggtaactattccaacgaacaaacgcaggttctggggcagatcgtgctggctaacttcgccaacaatgaaggtctggcttctcagggcgataacgtctgggcggcgacgcaggcttcaggcgttgcgctgcttggtacggcgggtacgggtaacttcggtaagttgaccaacggcgcgctggaatcctcaaacgtggatttgagtaaagagctggtgaatatgatcgtcgcgcagcgtaactatcagtcaaacgcgcagaccatcaaaacccaggatcagatcctcaacaccctggttaacctgcgctaa

SEQ ID NO: 73412 - DNA, 699 bp, Citrobacter koseri
atgtctattgccgtaaatatgaatgactcgaccaactcgggagtcgcatccaccagcagtggcagttcgctgacgggaagcagtgcgagtgatttgcaaagcagcttcctgacattgctggtcgcgcagttgaagaatcaggacccgaccaacccactgcaaaacaacgagctgaccacgcaactggcgcagatcagcaccgttagcggaattgaaaaactgaacaccacgctgggcgcgatttccgggcagatcgacaacagccagtcgctacaggccagcaccctgattggtcatggcgtcatgatccccggcaccaccattctggccggtacgggcaccgaagagggcgcgaccatcaccacgacgccgtttggcgtggagttgcagcaggcagcggataaagtcaccgccaccattaccgacaaagacggcaaggtggtgcgcacgatcaatatcggcgagctgaaggctggcgttcatacctttacctgggacggtacgttggaggatggcacaagcgcgccaaacggttcctataacgtcgcgatcgccgccagcaacggcagtacgcagcttgtggcgcaaccgcttcagtttgcgctggttcagggggttatccgcaacagtagcggtaataccctggatttagggacctacggaaccaccacactcgacgaagtacggcagatcatttaa

SEQ ID NO: 73413 - DNA, 405 bp, Citrobacter koseri
gtggcgctgttaaacatttttgatattgccgggtcggcgctcaccgcgcagtccaaacgtcttaacgtggcggccagtaacctggcgaacgccgatagcgtcaccgggccggacggtcaaccgtatcgcgctaaacaggtggtctttcaggtagacgcggcgccaggggcggcaaccggtggggtaaaagtggcggacgttattgaaagtcaggcgccggacaaactggtgtatgagcctggcaacccgctggcggacgccaacgggtacgtaaaaatgcctaatgtggacgtggtcggtgaaatggtcaacaccatgtcagcctcgcgcagctatcaggcaaacgtcgaagttcttaataccgtgaaaagcatgatgcttaaaacgctgacattaggccagtaa

SEQ ID NO: 73414 - DNA, 417 bp, Citrobacter koseri
atgctcgataagctcgatgccgccttacgttttcaacaggaagcgctgaatctgcgcgctcaacgccaggaggtgttggccgccaatatcgctaacgccgacacccctgggtatcaggcgcgtgatatggatttcgccagcgaactcaaaaaagtcatggtgcgtggccgggaagaaaccggtgggatcgcgttgaagctcacctctgcacaacacattccggcccagaccgtcgcgtctccttcggtggatctgctctaccgtattcctgaccagccgtcccttgatggcaataccgtcgatatggaccgcgagcgtacgcagtttgcggataacagtctgaaataccagacgggcctcaccgtgttgggtggacaaatcaaaggcatgatgaatgtgctacagggaggaaactaa

SEQ ID NO: 73415 - DNA, 660 bp, Citrobacter koseri
atgcaaacgttaaaacgtggaatagcgctgctggcgctgctgttcagccccctgacgatggctcaggatctgaatgcccagttaacggactggttttctcagcgtctggcagggttcagcgatgacgtcgtcgtcacgatccgcacgtcgcccaatctgttgccgaattgcgaacagcccgcgctgagcgtaaccggaagcgcgaggttatgggggcatgtgaacgtactggcgcgctgcgcgaacgaaaagcgctacctacaggtaaatgtacaggcaacggggaattacgttgttgccgcggcccccgtcgcccgtggcggtgcgcttggcccggctaacatcacgctaaaacgcggacggctggatcagcttcccccgcgaaccgtcctggacatcaaccagattcaggacgccgtcagcttgcgcgacctcgttcccgggcagccaatacagctcagtatgttgcgccaggcatggcggataaaagctggtcagcgcgttctggtggtggcgagcggcgacggatttagcgtcaatgcggaaggccaggcattgaacaatgccgccgtcgcgcaaaacgcgcgcgtacgcatgttgtcaggccaggtcgtgagtggaaccgtcgatcctgatgggaatattcttattaatctataa

SEQ ID NO: 73416 - DNA, 294 bp, Citrobacter koseri
atgagcattgaccgtacctcacctttgaagcccgttagcactgtccaaccgcgcgaaaccagcgatgcgccggtacaaaaagcgcgtcaggaaaaagcgtcaaccacgaccagtaccagtgtgaagttaagcgatgctcaggcgaaactgatgcaacccggcaccagcgacatcaatatggagcgcgtggaagccctgaaaacggcgattcgtaacggtgagttgaagatggacaccggtaaaattgcagactcgctgatccgcgaggcgcagagctacttacagagtaaataa

SEQ ID NO: 73417 - DNA, 423 bp, Citrobacter koseri
atgactcgtctgtcagaaattctggatcatatgacggctgtcctcaatgacctgaaaaaggtgatggatgccgagcagcagcagctctccgtaggtcacattaacggtagccagttacagcgtattacagaagaaaaaagctctttactggcgacgctggattatctggagcagcagcgccgtcttgaacaagatgcgcagcgtaacgttaatgatgatgtcgccaggcgctggcaggcgattacggaaaaaacgcagcatttacgcgatctcaaccaacataatggttggctgctggaagggcagattgaacggaatcatcaggcgctcgacatgctgaaaccgcatcaggaaccgacgctatatggcgcgaacggtcaaaccgcctctccccaccgtggcgggaaaaaaatctctatctga

SEQ ID NO: 73418 - DNA, 1536 bp, Citrobacter koseri
atgaatttattaaaatcgctggctgccgtcagctcgatgaccatgttttcgcgcgtgcttggttttgcgcgtgacgcgattgtcgccagaatttttggcgcagggatggcgaccgacgcctttttcgtggcattcaagttaccgaatctgttgcggcgcatttttgccgaaggggcattttcccaggcgtttgtgccgatccttgcagaatacaagagcaagcagggcgaagaggcgacccgggtttttgtcgcctatgtctccggcctgctgaccctggcgttagccgtggtgacggtggccggtatgctcgccgcgccgtgggtgatcatggtaaccgcgccgggttttgctgataccgctgataaattcgccctgaccaccaaactgctgcaaatcacctttccgtatattctgctgatttcgctggcctcgctggtgggcgcgatcctcaacacctggaaccgtttctcgattcctgcgtttgcgcccacatttctgaacatcagtatgatcggctttgcgctgtttgccgcgccgtattttaatcctcccgtactggcgctggcctgggcggtgacggtgggcggcgtgctgcaactggtttaccagcttcctcatctgaagaaaattgggatgctggtattgccgcgcatcaattttcgtgacgcaggcgcgatgcgcgttgtgaagcaaatgggcccggcgatcctcggcgtttcggtaagccagatatctctgatcatcaacaccattttcgcctcgtttctggcttccggttcggtctcctggatgtattatgctgaccgactgatggagttcccgtcaggggttctgggcgtggcgctgggcaccattttgctgccttcactgtctaaaagttttgccagcggcaatcatgatgagtattgccgtctgatggactgggggctgcgtctgtgttttctgctggcgttgccgagcgccgtcgcgctgggcattctggccaaaccgctgacggtatcgctgttccagtacggcaaattcaccgcctttgatgcgtcgatgacccagcgcgcgctggtggcctattccgttggtctgatcggcttaattgtggtgaaagttttggctccgggattttactcgcgccaggatatcaaaacgccggtcagaatcgccattgtgacgctgatcatgactcagttgatgaacctggcgtttatcgggccgttgaagcatgccggtctgtcgctgtctattggtctggcggcgtgtctgaatgcgtcgctgctgtactggcaactgcgcaaacagaaaatctttactccgcagccgggctggacgtggttcctgacccgcctggtgatttccgtgctggtgatgtccgccgcgctggttggcatgttgcatattatgcctgagtggtcagaagggacgatgctgtggcgtctggcccgactgatggcggttgtggttgtggggattgccgcctatttcgccgcgctggcggtgttgggttttaaagtgaaggaatttactcgccggacggcatag

SEQ ID NO: 73419 - DNA, 924 bp, Citrobacter koseri
gtgaaaaaattacgtatcggtgttgttgggttaggggggatcgcccaaaaagcctggttgcccgtgctgggcgcatccggcgactggacgctacagggagcctggtctccttcgcgggataaggcgctgcgcatttgtgaaagctggcggatgccgtacgttgagtcgttgccagcgctggcgtcaacctgcgacgccattttcgtccactccagcacggcgacgcattatgaggtggtgagcgaactgctcaatgccggggttcatgtctgcgtcgataaaccgctggcggaaaacctgcgcgatgcggaacggctggtggcgttggccgcacgcaaaaatttgacgctaatggtggggtttaaccgacgcttcgctccgctctaccgcgatctgaaagcgcaactgggcgctgccgcttctgtccgtatggataaacaccggacggacagcgtcgggccgcatgatttgcgtttcacgctgctggatgactacctgcacgttgtggacaccgcgctgtggctgacggacggcaaggcgcaactgaacggcggcacgttgcagaccaacgatcttggtgagatgctgtatgccgagcaccatttttcggcggatcagttgcaaatcaccaccagtatgcaccgtcgcgccgggagtcagcgtgaatgtgtgcaggcggtgacggacggcggcctgtttgatgtgacggacatgcgcgaatggcgtgaggaacgcggtcagggcgtggtgcataaacccattccgggctggcagacaacccaggaacaacggggatttgccggatgcgcccgtcattttattgaatgcgtgcaaaatcagacggttcctgaaacggcgggcgaacaggcgattctggcgcagcgcgtcgtagagaaactctggcgcgaggcaatgagcgaataa

SEQ ID NO: 73420 - DNA, 648 bp, Citrobacter koseri
atgaaatacgaactaaccgccactgaagcgcgagtgattggctgcctgctggaaaaacaggtgacaacgccggagcagtacccgctctcggttaacggcgtggttaccgcctgcaatcaaaaaaccaaccgtgaaccggtaatgaacttatcggaacatgaggtgcaggaacagcttgataatctggtgaaacgccattttctgcgaacggtgagcggcttcggcaatcgcgtcaccaaatatgaacagcgcttctgcaactccgagtttggcaatcttaaactgagtccggcggaggtggcgctgattgccacgctgctgctacgtggcgcccagacgccaggtgaactgcgcagccgtgcatcccgcatgtatgaatttagtgatatggcagaagtggaatcgacgctggaacagcttgccgcccgtgacgacggcccttacgtagtgcgcctggcgcgcgaagcgggtaagcgtgaaagccggtatatgcacctgttttgcggcgaagtcgatgagccggtgagttcagatgacgcgccgcaggcggcgtcgggcgatctgcatgcgcgcgttgaggctctggaaggcgaagtcgcggaactgaaacagcgccttgattcgctcctggcgcacctgggagactaa

SEQ ID NO: 73421 - DNA, 585 bp, Citrobacter koseri
atgtttggctatcgcagtaacgtgccaaaagtacgcttaacaaccgaccgtctggttgtgcgtttagtacatgagcgtgatgcctggcgtctggccgattattacgcggaaaatcgtcattttttaaaaccctgggaacccgttcgtgatgaaagccactgctatccttcgggctggcaggcgcgtctgagcatgatcgccgagtttcataaacagggttcagcgttctatttcgcgctgctcgacccggaagagaaagagatcatcggcgtggccaatttttctaacgtagtgcgtggctcattccacgcctgttatctgggatactccatcgcacaaaagtggcaggggcaggggctgatgtatgaggccttaacctcggcgattcgctatatgcagcgcacgcaacatattcaccgtattatggcgaactatatgccgcataataagcgcagcggcgacttgctggcgcgactcggctttgaaaaagaagggtatgcgaaagattacctgttgattgacggacagtggcgcgatcatgtgctgacggcgttgacgacgactgaatggacccccggtcgctaa

SEQ ID NO: 73422 - DNA, 1209 bp, Citrobacter koseri
atgtcgcgtgtctcgcaggccaggaacctgggtaaatatttcctgctcatcgataatatgctggtcgtattaggctttttcgtggtgtttccactgatctccattcgctttgtcgaccagatgggctgggcggcattgatggtcggcattgcgctcggactgcgccagttcatccagcaagggctgggcatttttggcggcgcgattgccgaccgttttggcgcgaagccaatgattgttaccgggatgcttatgcgcgcagccggattcgcgacgatggggatcgcccatgagccctggctgctctggttttcctgctttctttccgggcttggcggcacccttttcgatccgccgcgctctgcgctggtcgtcaagctgattcgccctgaacaacgcggtcgtttcttttcgctgttgatgatgcaggacagcgcgggcgccgtgactggcgcgctattgggtagctggttgttgcagtacgattttcgtctggtatgcgcgacgggggcggtactgttcgttttgtgcgccgcgtttaacgcctggctgcttccggcgtggaagctgtcaacggtgaaaatcccggtacgcgagggcatggggcgcgtcatggcggacaaacggttcgtgacttacgtactgaccctggcgggatactacatgctggccgtacaggtgatgctgatgctgcccatcatggtcaatgacatcgcgggctcaccggccgccgtcaagtggatgtatgcgatcgaagcctgcctctcgctgacgctgctctacccgatcgcccgctggagcgagaaacgttttcgcctggagcaccgcctgatggccggactgctgctgatgtcgctcagtatgttgcctgtcgggctggtcggtaatttacagcagctcttcacgctcatttgcacgttctatatcggttctgtcattgcggaaccggcgcgtgaaacgctcagcgcctcgctggccgatgcgcgggcgcgcggcagctatatgggcttcagtcgactgggtttagccattggcggcgcgatagggtatatcggcggaggatggttgttcgatatggggaaagcgctgcaacagcctgaactgccctggatgatgcttggggtaatcggaatcatgacctttcttgcgctcggctggcaattcagccacaaacggacgccacgcggcatgctggagccaggcgcctga

SEQ ID NO: 73423 - DNA, 648 bp, Citrobacter koseri
gtgaagctttatatttacgatcactgccctttctgcatcaaagcccgcatgatcttcggcctgaaaaatattcccgttgagctaaacgtcctggcaaacgacgacgacgcaacgcccacccgcatgatcggcaaaaaaatggcgcccattctgcaaaaggacgacagccgttatctgcccgaaagtatggatatcgtccattatgtggacaaccttgacggcaaacccttgctgatcggaaaacagaaccccgcgattgatgagtggctacgcaaagttaacggttacgccaatcgcctgctccttccgcgtttcgcaaaatcggcatttgatgagttctccacgccgtcggcgcggaaatacttcaccgagaaaaaagaggccatgattggcgactttggcgaaaatctggcgcattccagtgggctcatcaaaaacatcagcgacgatctgcgcgcgctggataaattgattgtgcagcccaatgccgtgaacggtgaactgtctgaagacgatattcatttgttcccgttattacgtaacctgacgctggtcgcaggcataaactggccaacccgggtcgctgattaccgtgataacatggcaaaacagacgcaaatcaacctgttatcgtctatggccctctaa

SEQ ID NO: 73424 - DNA, 561 bp, Citrobacter koseri
atgaaaaagattgtctttgccgctgcattgttggttagcggcctgttggttggctgcaaccaactcacgcagtacacggtaagcgagcaagaaattaatcaggcgcttgaaaaacggaataatttttccaaagacattggcttaccgggcatcgcggatgcgcatattgttctgacgaatctcagcagccagattggccgggaagagcccaacaaagtcacgctaaccggtgatgcgaacctggatatgagctccctgtttggcagccagaaagccaccatgaaactgaagctgaaagcgctaccggtctttaacaaagaaaaaggcgcgatttatctgcaagaaatggaagtggtggatgcaaccgtaacgccggaaaaaatgcaatcggtgctgcaaacgctgatgccttacctgaatcagtcgttgcgtaattattttaatcagcaaccggcctacgttttgcgtgaagacagcagcaaaggcgaagcgctggcgaaaaaatatgccaaaggcatagaggttaaaccgggcgaaatcatcatcccgttcaccgactaa

SEQ ID NO: 73425 - DNA, 1044 bp, Citrobacter koseri
atgactgcaccatcccaggttttaaagatccgccgcccagacgactggcacgttcaccttcgcgatggcgacatgttaaaaactgtcgtgccttacaccagtgaaatttatggccgcgcgatagtgatgccgaacctggcgccgcctgttacgacggtcgatgcggccatcgcataccgccagcgcattcttgatgccgttcctgccgggcatgactttaccccactgatgacctgctacttaacggatacgcttgatcctgatgagcttgagcgcggattccgcgaaagcgtctttaccgcagcaaaactctatccggccaacgcgaccaccaactccagccacggcgtcacctctgtcgatacgatcatgccggtactggagcgcatggaaaaactcggcatgccgttgctggtacacggcgaagttacccatgctgatatcgatatttttgaccgcgaagcacggtttattgaaacggtgatggagccgctgcgccagcgtctgacggcgttgaaggttgtatttgagcacattaccaccaaagatgccgcagagtacgttcgcgacggcaacgagctgttagccgccaccatcacgccacagcatctgatgtttaatcgcaaccatatgctggtcggcggcattcgcccgcatctgtattgcctgccgatcctcaaacgtaacgtccaccagcaggccttgcgtgaactggtcgccagcggatttagccgcgccttcctcggtaccgactccgcgccgcacgcccgtcatcggaaagaaaccagctgtggctgcgcaggctgctttaatgccccgacggcgcttggcagctacgctacggtctttgaagagatgaacgccctcgcgcattttgaagcgttctgctcactcaatgggccacggttctacggcctgccgatcaatgaaacctacgttgaactggtacgcgaagaacagctcgttccggaaagcatcacgcttgccgatgactcactggtgcccttcctcggcggcgagcgcgtacgctggtcagtaaaataa

SEQ ID NO: 73426 - DNA, 246 bp, Citrobacter koseri
atgcgtattgaagtcactatagcgaaaacgtcacctttgcctgctggcgcgattgacgcgctggccggtgaactctcccgccgtatccatcactcttttccagataacgcgggcaatgttgtcgtccgttatgccgcagccaacaatctgtcggtcattggcgcgacaaaagaggataaagaacgcatcagcgaaatcctacaggaaacctgggaaagcgcggatgactggttcgtcaatgaataa

SEQ ID NO: 73427 - DNA, 255 bp, Citrobacter koseri
atggaaaagaataatgaagtcattcagactcatccgcttgtaggatgggacatcagcaccgttgacagctatgatgcgctgatgttgcgtttgcactaccagaccccgaatcgccctgaccctgatgggactgaagttggtcagacgctctggttaaccaccgatgttgccagacaatttatttcgatattagaagcaggcatcgccaaaattgaatctggcgattaccaggaaaatgagtatcgccgtcattaa

SEQ ID NO: 73428 - DNA, 1119 bp, Citrobacter koseri
atgaaatacgacttaatcattattggcagcggttccgtcggcgccgcagccggatattatgccactcgcgccggactgaaggttctgatgacagatgcccatatgccgccacatcaacagggcagccatcacggcgatacccggttaatccgtcacgcttatggcgagggtgagaaatacgttcctctggtgctgcgtgcgcaaacgttatgggaagagctttcaacgcataatgaagatcccatcttcgtccgctccggcgtcataaacctcggcccggcggactcgccatttctggcgaacgtggcgcatagcgcacagcaatggcagttaaacgttgagcaactggatgccgccgccatcatggcgcgctggcctgaaattcgcgtccctgacaactacattggcctgttcgaaacggactccggttttctgcgcagtgaactggcgatcaaaacctgggttcgccttgccgaagaggccggctgcgcgcagctctttaactgccccgtcaccgcccttcatcacgatagcgacggcgttaccgttgaaaccgctgacggcgaataccgcgcgaagaaagtgttgatcagtgccggtacatgggtacaggcgctggtgccggaactccccatccaacccgttcgtaaagtttttgcctggtatcaggctgacgggcgctacagcatgaaaaataacttcccggcgttcactggagaactcccgaacggcgatcagtattacggttttcccgccgaaaacgacgcattaaaaataggaaaacacaacggtggtcagttgattcactcaccggaagagcgcaagccgtttgccgccgtcgccagcgatggttccgaagcgttccccttcctgcgcactatcctgcccggcattggctgctgcctgaacggcgccgcctgtacctatgataattccccggatgaagattttattatcgatacattaccgggacatgataatacgctgatcgtcaccggtctgagcggccacggctttaagttcgcctcggtattaggtgagattgccgccgatttcgcgcagggtaaatcgccggcttttgacctgacgccattcaaactgaagcgctttacgcaataa

SEQ ID NO: 73429 - DNA, 165 bp, Citrobacter koseri
atgacccaatggcctcgcaaacggggccgtttctttttgaggagtcaggctgtgcgtcgtatttttcactatctgatcaataatattcgtgagcattttattctctacgttattttatggtcgctgctggccatcatggacattatttatatcatgttcttttaa

SEQ ID NO: 73430 - DNA, 573 bp, Citrobacter koseri
atgcaattcaaaaatactcctcagcgctatggcgccatttctgtattgcttcactggctggtcgccattgttgtatacggcatgtttgccctgggtttatggatggtgacgctcagctattacgatggctggtatcaccaggcgccggaattgcataaaagtatcggcatcctgctaatgatggggctggttatacgtgttttctggcgtttcgtctcaccaccgccaaaggcgctgaaaagctattcacgcctgacccgtctgggtgcggcggtgggccaccttgcgctgtatcttctgctcttcgccattgtgatcagcggctatctgatctcaaccgccgacggcaaaccgatcagcgtgtttgggtggtttgacgtgcccgccacgctggccgacgcgggcgctcaggccgatcttgccggtagtctgcacctgtggctggcctggagcgttgtgattttgtccgttctgcatgggctaatggccctgaagcaccatttcatcgataaagacgacaccctgaagcgtatgctggggagatcgtcgcctgactatggagttgaaaaatga

SEQ ID NO: 73431 - DNA, 576 bp, Citrobacter koseri
atgaaaaaaagcctgctgggactgacttttgcttccctgttattcaccactggttctgcaatcgcggcagactataaaattgataaagagggacaacacgccttcgttaacttccgtatccagcacctgggttacagctggctgtacgggacgttcaaagatttcgacgggacatttaccttcgatgaaaaaaatccggcagcggataaagtgaacgtcaccattaacaccaacagcgttgataccaaccatgcggagcgtgataagcacctgcgtagcgctgatttcctgaacgtggcgaaattcccgcaggcgacgtttacctcgaccagcgtgaaaaaagatggcgacgagctggatatcaccggcgacctgacgctcaacggcgtcaccaaaccagtcacgctggaagcgaagctgatcggccagggtgacgatccgtggggcgggaagcgcgcgggctttgaagcggaaggtaaaattaagctgaaagacttcaacatcaccaccgacctcggccctgcatcgcaggaagtcgatctgattatctcggtggaaggcgtacagcagaagtaa

SEQ ID NO: 73432 - DNA, 1053 bp, Citrobacter koseri
atgccagtgttacacaaccgcatttcgaacgatgcgcttaaagcccggatgttagctgaaacggagccgcgcacgaccatctctttttataaatacttcacgatcgtcgatccgcagagcacgcgcgacgcgttgtaccagatgtttacctcgctgaatgtttttggtcgcgtttatctggcgcgtgaaggtattaacgcgcagatcagcgtgccgcaaagtcaggtcgcggcgtttcgtgagcagctgtatgcgtttgatcccgcattaaacggcttgcgtctgaatattgcgctggacgatgacggtaagtccttctgggtgctgcgtatgaaagtacgcgagcggattgtggccgatggtatcgacgatccgaattttgatgccagcgacgttggcgagtacctgaaagcggcggaagtgaacgccatgctggacgatcctgatgccgtgtttatcgacatgcgtaaccactacgaatatgaagtggggcatttcgaaaatgcgctggaaattccggctgacacgttccgcgagcagttgccgaaagctgttgaaatgatgcaggagcatagagacaagaaaatcgtcatgtattgtacgggcggtattcgttgtgaaaaagccagcgcctggatgaagcataacggttttaacaaagtgtggcacattgagggcggcatcattgagtacgcgcgtaaggcgcgcgagcagggactgccggtgcgtttcattggtaagaactttgtgtttgatgagcgcatgggagagcggatctctgatgaggttatcgcgcattgtcaccagtgcggcgctccgtgcgacagccataccaactgtaaaaatgatggttgccatctgctgtttattcagtgcccggcttgcgccgagaagtttaaaggctgctgtagcgagctgtgctgtgaagagagcagtttgccggaagaggaacagcgccgtcgccgcgctggccgtgagaatggcaataaaatcttcaataaatcgcgtggccgtctgaatacccaactgggcattcccgacccggcggaataa

SEQ ID NO: 73433 - DNA, 921 bp, Citrobacter koseri
atgacgaatttacctaagttctccgttgcgctactgcatccacgttattggttaacctggctgggtattggtgctctttggttggtcgtgcaattgccctacccggtgatttacaaactgggttgtgcaatgggacgtctggcgttgcgttttatgaagcgccgcgcccgcatcgcctatcgtaatcttgaattgtgctttccgcagatgagcgagcaagaacgccaccagatggtggtgaagaacttcgagtctgtcgggatgggcgtgatggaaaccggcatggcctggttctggtccgaccgccgtatttcacgctggacagatgtcagcggcgttgagcatatccgcgacgttcaggcccgggagcgaggaattctgctggttggcctgcactttctgacgctggagctgggcgcgcgccagtttggtttgcaacagcctggcattggcgtttatcgtccgaatgacaatccgttgctcgactggctacagacctggggacgtatgcgctccaacaagtcgatgctcgatcgcaaagacctgaaaggcatgatcaaagcgctgaaaaaaggtgaagtggtctggtatgcgccggatcatgactatggcccgcgcgccagcgtgtttgtcccgctgtttgccgtggaacaggccgccaccacgtcaggaacctggatgctctcccggatgtccaacgcctgtctggtgccgtttgttccgcgtcgtaaacccgatggcaaaggctatgagctgattcttctgccgccggaatgctcaccaccgctggatgacgccgaaaccaccgcggcctggatgaacacgatcgtagagaaatgcatcatgatggcgcccgagcaatacatgtggttgcatcgccgtttcaaaacgcgccctgaaggtatgccctcccgttactga

SEQ ID NO: 73434 - DNA, 1221 bp, Citrobacter koseri
atgtcaccctctgatgtccccataaactggaaacgcaatctcaccgtagcctggctgggctgttttttgaccggcgcggcgtttagcctggtgatgccatttttacccctctacgttgagcagctcggcgtaacgggccacagcgcgctgaatatgtggtcggggctggttttcagtatcaccttcctgttttccgctattgcctcgcctttttggggcgggctggccgatcgcaaagggcgaaagatcatgctgctgcgctcagccctcggcatggcgatggttatgctgctgatggggctggcgcagaacatctggcagtttctgatcctgcgcgcattgctaggtctgctcggcggatttgtgccaaacgcaaatgcgcttatcgccactcaggtgccgcgtaataagagcggctgggcgttaggaacgctttctactggcggcgtcagcggcgcgttgctcggccctctggcgggcggattgcttgccgaccagtacggattacgccctgtctttttcatcaccgccagcgtgctgttggtctgtttcttactgacgctcttttttattcgcgagcgttttcagcctgtcagcaaaaaggagatgttgcacgtccgggaggtcgttggctcactaaaaaacccaaagctggttttgagtctgttcgtcaccacgctgatcattcaggttgcaaccggatcgatcgcgcccattctgacgttatatgtgcgagagttagccggtaacgtcagcaatatcgcatttatcagcggaatgatcgcctcggtgcccggcgtggcggcgttgctcagcgcgccccggctcggcaaactgggcgatcgcattggccccgaaaagatcctgattaccgccctgattatctctgtcctgctgctgatcccgatgtcattcgtacaaacgccctggcagcttggcgtgctgcgctttttacttggtgcggcggacggcgccctgctccctgccgtacagactctgctggtctataacgccagcaatcagatcgccgggcgcatcttcagttacaaccagtcatttcgcgatattggcaacgtcacaggcccgttaatgggggcggctatttctgccagctacggttttcgcgccgtgttttgcgtcaccgcaggcgtcgtgttgttcaacgcaatttattcgtggaacagcctgcggcggcgcagagagcccctcgcggcaaaatga

SEQ ID NO: 73435 - DNA, 375 bp, Citrobacter koseri
atgactatgtacgccacgctggaagaagccattgatgcagcccgtgaagagtttctggctgacaacccggaactcgaacaagatgaagccaatgttcaacaactcaatatccagaaatacgtgctacaggatggcgacatcatgtggcaggccgagttttttgccgatgagggcgaagaaggcgaatgtctgccaatgctgagtggcgaagcggcgcaaagcgtctttgacggcgattatgatgagatagagattcgtcaggagtggctggaagagaacactctgcatgagtgggatgacggtgaatttcagctcgagccgcctctggataccgaagaaggccagactgcggcggatgagtgggatgagcgttaa

SEQ ID NO: 73436 - DNA, 228 bp, Citrobacter koseri
gtgcgaataatcgtggttggcgtaatggcgctacttctgagtgggtgcggcagcatcattagcaggacgatccccggacaagggcacggtaatcaatactatcccggcgtgcagtgggatgtccgggattccgcgtggcgctatgtcacggttctcgatctgccgttttcactggtttttgatacgctgctgctgccgctggatatacaccacggcccttatgagtag

SEQ ID NO: 73437 - DNA, 2499 bp, Citrobacter koseri
atgccgctttcagacattgagaaagcggcgctgccgaaaacggacatccgcgccgtccatgaggcgctggatgttgagcatcgagcttactcgcgagaagacgattcaccgcagggatctgttaaagcgcgccttgagcaggcctggccggattcgctggccgaagggcaactgattaaggatgatgagggacgcgatcagttgcaggcaatgccgaaagcgacgcgttcttctatgttccccgatccctggcgcaccaacccgctgggtcgtttctgggaccgcttgcgcggccgggacgtgacgccgcgttatctctcccgcctgacgaaagaagagcaggagaacgagcaaaaatggcgtaccgtcgggacaatccgccgttacatcctgttgctgctgacgctggcgcagacggtggttgcgacctggtatatgaagaccattcttccttaccagggctgggcgcttatcaatcccgccgacatgatcgggcaggatctgtgggtctcctttatgcaactgctgccgtatgtgctgcaaaccggcatcctgatcctgttcgccgtgctgttctgctgggtgtctgcggggttctggaccgcgcttatgggcttcctgcaactgctgattggccgcgataaatacagtatttcggcgtcaacggtgggaaatgagccgctgaatccagagcaccgtaccgcgttgattatgcctatctgcaacgaggacgttgaccgcgtgttcgcggggctacgtgctacgtgggaatcggttaaagccaccggcaacgcagcgcatttcgacgtctatatcctgagcgatagctacaaccccgatatctgcgtggcggaacaaaaagcgtggatggagctgattgctgaagtgcagggcgaaggacagattttctatcgccgtcgccgccgtcgtgtgaagcgcaaaagcggcaatatcgatgacttctgccgtcgctggggcaaccagtacagctacatggtggtgctggacgctgactcggtgatgaccggcgagtgtctgagcggcctggtgcgtctgatggaagcgaacccgaatgccgggatcatccagtcgtcgccgaaagcgtccggtatggatacgctgtatgcgcgttgccagcagtttgctacccgcgtgtacggcccgctgtttaccgccgggctgcacttctggcagttaggcgaatcgcattactggggccacaacgcgattattcgcgtgaagccattcatcgaacactgtgcgcttgcgccgctgccgggcgaaggatcgttcgcgggttccatcctctcgcatgacttcgtggaagcggcgttaatgcgtcgtgcagggtggggcgtctggattgcctacgacctgccgggttcgtatgaagaactgccgccgaacctgctggatgaacttaagcgtgaccgccgctggtgtcatggcaacctgatgaacttccgcctgttcctggtgaaagggatgcacccggttcaccgtgcggtgttcctgacgggggtcatgtcttacctgtcggcgccgctgtggttcatgttcctggcgctttccaccgccttgcaggtggttcatgcgttgaccgaaccgcaatacttcctgcaaccgcgccagctgttcccggtctggccgcagtggcgcctcgaactggcaattgcgctgtttgcatccacgatggtgctgctgttcctgccgaagctgctgagtattatgctcatctggtgtaagggtacaaaagagtatggcggatttgtgcgcgtaacgctgtcgctgctgctggaagtgctgttctctgtgctgctggcgccggtacgcatgttgttccacacggtgtttgtggtgagcgcattcctcggctgggaagtggtctggaattcaccgcagcgtgacgatgactctaccccgtggggtgaagccttcatgcgtcacggttcccagctgctgctcggcctggtatgggcggttggcatggcctggctggatttacgtttcctgttctggctggcgccgattgtcttctcgctgatcctgtcgccgtttgtgtccgtggtttccagccgttcaacggtaggcttgcgcaccaaacgctggaaactgttcctcatcccggaagagtattccccgccgcaggtgctggtggatactgacaaatacctggcgatgaaccgcaatcgcacgctggatgacggctttatgcacgcggtgtttaatccgtcgtttaacgcgctggctacggcgatggctacggcccgtcaccgcgccagtaaggtgctggagattgcgcgcgaccgccatgtggagcaggcgctgaatgaaacgccggaaaaactgaatcgcgaccgccgtctggtgttgttgagcgatccggtgacgatggcgcgtttacactatcgcgtctggaattcaccggaaagatactcatcgtgggttaactactatcagggtatcaatctgaacccactggcgttgcagaagaagtaa

SEQ ID NO: 73438 - DNA, 1554 bp, Citrobacter koseri
atgaaacataaacgacaaatgatgaaaatgcgttggttgggcgcggcggtaatgttaacgctgtacacatcgtcgagttgggcgttcaccatcgatgatgttgcaaaacaagctcaatccttagccggtaaaggctatgaggcgccgaaaagtaacttgccctccgttttccgcgacatgaaatatgcggactatcagcagatccagtttaaccgtgataaagcgtactggagcaatatcaagaccccattcaagctcgagttctaccaccagggtatgtacttcgacacgccggtcaggatcaacgaagttaccgcgacgacggtaaaaagaatcaaatacaacccggactatttcaattttggcgatgttcagcatgataaagacaccgtcaaagacctcggcttcgccgggttcaaagtgctgtacccgatcaacagcaaagacaaaaacgatgaaatcgtcagcatgctcggtgccagctatttccgcgtcattggcgcaggccaggtctatggcctttccgcgcgtggtctggcgattgataccgcgctgccttccggtgaggaatttccccgctttcgcgagttctggattgagcgtccaaaaccgactgacaaacgtttgaccatctatgcgttgctcgattccccgcgtgcgaccggggcataccgcttcgtcatcatccctgggcgtgacactgtggtggacgttcagtcgaaagtctacctgcgtgataaagtcggtaaactgggcgttgcgccgttaaccagcatgttcctgtttgggccgaaccagccgtctccggcaaccaactatcgcccggaattgcacgactctaacgggttgtctatccatgcgggcaacggtgaatggatctggcgcccgctgaataacccgaaacatctcgcggtgagcagctatgcgatggaaaacccgcaagggttcggcttgctgcaacgcggccgccagttctcgcgctttgaagatttagacgatcgctatgacctgcgcccaagcgcctggatcacgccgaaaggcgagtggggcaaagggaaaatcgaactggtggaaattccgaccaacgatgaaactaacgataacatcgtggcctactggacgccggatcaactgcctgaagcaggcaaagagatgaacttcaagtacaccatgacgtttacccgcgatgaagagaaacttcatgcgccggagaatgcctgggttcagcagacgcgtcgctctacgggcgatgtcaaacagtctaacctgattcgccagcctgacggcaccatcgccttcgtcgtggattttgtcggcacagatatgaaaaagctgccgcaggatacccctgtcacggcgcaaaccagtattggcgataacggcgaaatcgttgagaactcagtgcgttataacccggtgacgaaaggctggcgtttgacgctgcgcgtaaaagtgaaagacgcgaagaaaaccactgaaatgcgtgctgcgttggtgaatgccgatcagccgttgagtgaaacctggagctaccagttacctgccaatgaataa

SEQ ID NO: 73439 - DNA, 1161 bp, Citrobacter koseri
atgaatccagtacctccacagcgtgaatattttcttgactccatccgcgcctggctgatgttgttggggatcccctttcatatctcgttgatctattcaagccatacctggcatatcaacagcgcagagccctcatggtggctgaccctgtttaacgattttgtccacgcatttcgcatgcaggtcttttttgttatttccggttatttttcgtacatgttattcctgcgttatccattaaaacgctggtggaaagtgcgtgttgaacgcgtaggtattcctatgctgacggccattcctttactcaccttgccgcaatttatcatgctgcaatttgtcaaaggaaaaaccgagaactggcacacgctttctttgtatgagaaatacaatacgctggcctgggaattaatttctcatctgtggtttttattagtgcttgttgtattaacaaccctgagcatgtgggcattcagccaaatcaaaaaaagcgcggaacgcacaacgaagccgttattcgccgccgtttcgatgaccaaattgacgcttatcttctttatccttggcgtcggttacgccgcgctgagacgcgccatttttatcatttatccctctattcttagcgatggcatgttcaatttcgtcgtcatgcaaacgctgttttatctccctttctttatcctgggcgcgctggcattcatcaacccggcgctgaaagcgctgtttaccgtaccgtcacgcggatgcacgctggctgcggcgctcgccttcgttgcctacctgctgaaccagcgttatggcagcggcgatgcctggatgtatgagacagaatacgtcattaccatgctgatgggattgtggatggttaacgtggtcttttcgctgggccaccgtttacttaatttccagtccgctcgcgtcacctattttgtgaatgcatcgcttttcatctatctggtgcatcatccactaacgctgtttttcggcgcgtatattacgccgcatattacgtcgaatctgctgggctttttatgcgggctggtctttgttatcggtattgcgctggtcctgtatgaactgcatttacgggttcccgtactgaaatttttattttctggcaaacccgcggttaaacgtgataacagcaaggctgtcgccagttaa

SEQ ID NO: 73440 - DNA, 1431 bp, Citrobacter koseri
atgagtgagttgacccgacttgagcgcgctgttaccccgctgtgtgaacgtcatcccggcgaatgcggcattctcgccctggatgacagcctggatgcctttgccgcacgctatcgattaacagaaatggctgaacgcaccctggatgtgcagtattacatctgggaggacgacatgtccgggcgtctgctgttttcgatattattggcggcggcaaagcgcggcgttcatgttcgcctgctgctggatgataacaacacgccggggcttgatgatacgctgcaactgctggatagccaccccaatatcgaagtgcgcctgtttaatcctttctcttttcgtatgctgcgtgcgctggggtatttaaccgactttgcccggcttaatcggcgtatgcataataaaagctatacggcagatggcgcagtcaccattgtcggcgggcggaatattggcgatgcctattttggcgcaggtgaagagccgctgttttccgatctcgacgtgatggcgattggccctgtcgtaaaagacgtggcggatgattttgaacgttactggcactgcaaatcggtttcaacgctgcaaaaagtgttgtcgctgtctgagcaggaaatcacccgacgcattgacttaccggattcctggtacaacgacgacattacgcgccgctatttgcataagctgaaaaccagccactttatgtcccatcttgatcgcggcgctttaccgctgatatgggcgaaaacccgtctgctcagcgacgatcctttaaaaggcgaggggaaagcgcagcgtcattcgcttctgccgcaacgtctgttcgatgtgatggggtcgccaacggaacgtatcgacattatttccgcctattttgtccccacccgggcgggcgtcgcgcaactgctgcaactggtgagaaaaggggtcaggatcgcgattcttaccaattcactggcggcgaacgatgtggcggtcgtccatgcgggctatgcgcggtggcgtaaaaaacttctgcgctacggcattgagctctatgagcttaaacccactaacgggcatgcggctgaacttcacgatcgtggtttaaccggtaactcaggctccagcctgcatgcgaagaccttcagcattgacgggaataaggtttttatcggttcgctcaatttcgatccccgatcgacgttactcaataccgaaatggggtttgtgattgaaagcgaaacgctggcaacgctgattcataaccgttttatgcagagccagcgtgatgacgcctggcaactgcggctggatcgttggggaagaattaactgggttgatcgccacctgcgtgacgaggtggtactgaaaaaagaacccgccacaggattctggaagcgggttctggtgcgactggcgtctgtcttgcccgtcgaatggctgctttaa

SEQ ID NO: 73441 - DNA, 534 bp, Citrobacter koseri
atgaaatcgcgtattcatgtacaacatggcgacataacccaactcacggtagatgtgattgttaatgccgccaacgcttcattactggggggcggtggcgttgacggcgcgattcatcgtgcagcgggtccggcgctactggaagcctgcaaaaaagtcaggcagcagcagggcgagtgcccggcaggacacgcggtcatcactctggctggcaatctgccggcgaaagcagtgattcatacggtggggcccgtctggcgtggcggcgatcacaacgaatcccagctcctggaagatgcctatttcaacagcttgcaactggtgctggccaatggctaccggtctgtcgcgtttccggcgatcagcaccggcgcttacggctacccacgccccgccgccgcagagatcgcggtcaatacggttgcggattttcttgcccgccacgcgctacctgagcaggtatactttgtctgttatgatgaagaaactgcccgactttacgagcgattactgacccaacaaggtgatgagtga

SEQ ID NO: 73442 - DNA, 324 bp, Citrobacter koseri
atgtttgcgttgtgttcgaaaaatatcctcggagcaggccttggcgtctgcattctcttttcttcctctgttacagctcaacaaatcactaccggcggcgttattcattttcgtggtcagattgtcgaacctccctgtgaggtcagtgcccggcagcaaaatattgacatgacatgcgtgaataatggccagatgaaaactaaccgttttaccctgcaacaggttacaaccgccccgcaaagccttcgacaaattgcatccgtgagagtcaactatctcgatccgcaacaacgtctggcgattatgagtattgaataccaatag

SEQ ID NO: 73443 - DNA, 333 bp, Citrobacter koseri
atgaatacgctattactccttgccgcgctctccagtcagattacatttaataccacacaacaaggtgaaatttacaccattgtcccccaggttacgctcagtaaaccctgcgtgtgcgaagtccaaatttttgccgttcgtgatgggaaaggagggcaaagccgtacacagcagaaaacaaccctttctttgcccgctaatcaacccattgatttaacgaaactcagtttaaatatttccccggaggactcggtaaaaattatcgttaccgtttccgacgggcagtcgttgcatttgtcgcagcaatggccatctcctgagaaatcatcttaa

SEQ ID NO: 73444 - DNA, 456 bp, Citrobacter koseri
atgaaacttttaaaagtggcagcattcgcagcaatcgtagtttctggcagtgctctggcaggtgttgttccgcagtggggcggtggcggcggtcataataatggcggtaataattccggccctgaatctaccctgagtattttccagtacggtagcgcaaactctgctcttgctctgcaaagcgatgctcgtaaatcagatctgtccatcaaacaatatggtcatggtaacggcgcagacgtaggccagggcgctgacaacagcggcattgacctgacccagaatgggtacagaaacagcgcgactatcgatcagtggaatgccaaaaactctgatatcgttgtgagccagtttggtggccgcaacggcgcgctggttaaccagactgcgtccgactcccaggtatcggttactcaggtcggcttcggcaacaacgccacggctaaccagtactga

SEQ ID NO: 73445 - DNA, 483 bp, Citrobacter koseri
atgtacgaccaggtccagggtgacaacatgaaaaacaaattgttatttatgatgttaacaatactgggtgcgcctgggattgcagccgcgacaagttatgatctggcaaatgcagaatataattttgcggtaaatgaattaagcaagtcttcatttaatcaggcagccattattggtcaaaagggcacttataatagtgcaaaaacacgccaggacggctcaaaacttttatctgttatttcacaagaaggcggaaataaccgagcgaagattgaccagtcaggagcttataaccttgcatatattgatcaggcgggttacgccaatgatgcaagtatatcgcaaggctcttatggtaatactgcaatgattattcagaaaggttctggtaataaagcagatattacgcagtacggtacgcaaaaaacagcagttgtagtgcagagacagtcgcgcatggctattcgcgttacgcaacgttaa

SEQ ID NO: 73446 - DNA, 573 bp, Citrobacter koseri
ttgcagcatttaaagcaatcactggctgttaccggaaaactacataatattcaacgttctctggatgatatatccgccagctgcattgttttactggatatgatggaagcggataaaaaaattatccattactggcaagacaatttgagtcggaaaaacaacaatatcaagacgttattgttgaatactcccgacgactatcccttccgtgatattgaaaactggccacatatcaatggcgtgttttacgcaacggaggatgaagaacgtgtcgttaacggcttgcaggggatcctgcgaggcgaatgctatttttcgcaaaagctggccagttacctgatcactcattcaggaaactaccgttacaacagcacggaatcagcgcttctcactcatcgtgaaaaagagatcctcaataaactgcgaatcggcgcctcaaacattgaaatcgcccgctcgctttttatcagcgagaatacggtaaaaacacatctttataatcttttcaaaaagatagctgttaaaaaccgtactcaggcggtctcgtgggcaaacgataacctcaggcgataa

SEQ ID NO: 73447 - DNA, 396 bp, Citrobacter koseri
atgaaacgctatctgacctggattgtggcagcagaattactgcttgccgcagggaatcttcacgctgcggaagttgaagtggaagttcccggactcttaactgaccataccgtctcatcagtcggccacaatttttatcgcgccttcagcgacaaatgggaaagtgagtacacaggcaatttgaccatcaatgaaagacccagtgcgcgttggggaagttggatcacgataacggtaaatcaggacgttatattccagacttttttattcccaacgaaaagagacttcgagcgaaccgttgacttcgcgctggcgcaaactgaagaagcattaaatcgtcggcaaatagatcaaacgctattaagcacgagtgatttagcgcgcgatgaattctaa

SEQ ID NO: 73448 - DNA, 417 bp, Citrobacter koseri
atgcgtgtcaaacatgcagtagttatgctcatgcttatttcaccattaagttgggccggaaatatgacattccagttccgaaatcctaattttggtggaaacccaaataacggcgcatttttattaaatagcgctcaggcacaaaactcttataaggacccaagttattacgacgacttcgggattgaaaccccgtctgcactggataactttacgcaagctattcaatcgcaaatccttggcggattgctgacgaatattaacaccggcaaaccaggcagaatggtgaccaatgattttatcattgatatcgccaaccgggatgggcaactgcgacttaatgtcacggacaggaaaaccgggaaaacctcgacgattgaagtgtcaggtttgcaaacacagtcaaccgatttctaa

SEQ ID NO: 73449 - DNA, 834 bp, Citrobacter koseri
atgcagcgcttacttattttggttgcagtatgtttactgagcggatgcttaaccgccccgcctaaagaagccgcgaaaccgacattaatgcctcgtgcgcaaagctataaagatttgacgcacctgccgatgccaacgggtaagatttttgtctcggtttataatattcaggatgaaacgggccagtttaaaccttatccggcgagtaacttctcgactgccgttccgcagagcgccaccgcgatgctggtgactgcgctgaaagactcccgctggtttatcccgctggagcgtcagggactgcaaaacctgctgaacgaacgcaaaattattcgtgcagcgcaggaaaacggcacggtagctatcaataaccgaatcccgcttcagtccctcaccgccgcgaatatcatggtggaagggtcgattatcggttacgaaagcaacgtgaagtcaggcggggtcggcgcgcggtacttcggtatcggtgcggatacgcagtatcagcttgaccagattgcggtaaacctgcgcgtggttaacgtcagcaccggcgagatcctctcttcggtcaataccagcaagaccatcctttcctatgaagtgcaggccggggtgttccgctttattgattaccagcgactgctggaaggtgaaatcggctacacctctaatgaaccggtgatgctgtgtctgatgtcagcgattgaaacgggcgttatcttcctgattaacgacgggatcgatcgcggcctgtgggatttgcagaacaaagcggagcgtcagaacgacattctggtgaaataccgccacatgtccgtaccgccggaatcctga

SEQ ID NO: 73450 - DNA, 495 bp, Citrobacter koseri
atgatgcgcggcatgaatatacttatctccattgcaatcacaacgggcattctctccggtatctggggatgggtggccgtttcctttggcctgctcagctgggcgggttttctgggctgtacggcctattttgcctgcccgcagggcggcctgaaagggttattgatttctgcatgtacgctcctgagcggcgtggtgtgggcgctggtgattattcacggcagcgcgctggctccgcatctggagatcgtcagttacgtcatgacgggaatcgtcgcgtttttgatgtgcgttcaggcgaagcagctgttgctttcttttgtgcctggcacctttatcggcgcatgcgcgacgtttgcagggcagggggactggcgactggttctgccttcgctggcgctgggactcgtgtttggctatgcgatgaaaaatagcgggctgtggctggcgtctcgtcgggtaagagagtcttcgccgacggcggtcagcaaataa

SEQ ID NO: 73451 - DNA, 555 bp, Citrobacter koseri
atgaatgagttttctatcctgtgtcgtgtgctgggatcgctgtattaccgccaaccgcaggaccctctgctggttcctctgtttacgctgatccgcgagggtaaattgtcggcaagctggccgctggagcaggatgagcttctggcgcggttgcagaaaagttgcgacatgacccaactggcggcggactacaatgcgctgtttgtcggcgacgagtgcgccgtgtcgccttatcgcagcgcctgggtggaaggggcgaaggagtccgatgttcgcgcgtttctttccgctcgcggtatgccgttggcggatacccctgccgaccatatcggtacgctgctgctggccgcctcctggctggaggatcagtctgctgaagatgagagcgaagcgctggaaacgctgtttattgaatacctgcttccctggtgcggtactttccttggcaaagtggaagcccatgccgcgacgtccttctggcgtacgatggcgccgttgacgcgcgatgcgatcggcgcaatgtgggatgagttacaggaaggcgctgaagagtaa

SEQ ID NO: 73452 - DNA, 738 bp, Citrobacter koseri
atgtatcccgttgacttgcatatgcataccgtcgccagcacccacgcatacagtaccttgcacgattatattgccgaagcgaaacgcaaaggtattaagctctttgccattaccgatcacggcccggatatggccgatgctccgcatcactggcactttatcaacatgcgtatctggccgcgtctggttgacggggtgggcattcttcgcggtattgaagccaacatcaagaatattgatggcgagattgactgcacgggcccgatgctgaactcgctggatgtgattatcgccggtttccatgaaccggttttcgcgccgcacgataaagagaccaatacccaggcgatgattgccgcaatggccagcggaaatgtgcatattattagccatccgggcaacccaaagtatcctgtcgatatcaccgcgattgcgcaggcggcggctaaataccaggtggcgctggaaatcaataactcgtcattcctgcattcgcgcaaaggcagtgaagataattgccgcgcggtggccgcagccgtgcgtgacgctggcggatgggtagcgttagggtcagattcccatactgcgtttacactcggtgaatttgccgaatgccggaagatcctggatgaagtggatttcccggaagaacgcgttttaaacgtttcgccaggacgcttactgagatttctggaatcgcgcggtatggcgccgatcccggagtttgctgaactttaa

SEQ ID NO: 73453 - DNA, 939 bp, Citrobacter koseri
atggagataatgttctatcacccgaccttcgatacggcctggtggcttaacgctttggcaaaggcgattcccggcgcgaatattcgtgaatggaaacccggtgataacaaacctgcggattatgcgctcgtgtggcatccgccggtggagatgctcgaaggacggaagctaaaagccgtatttgcgcttggcgcaggtgtggattccattctgagtaagctcaaagcgcacccggaaatgctggatgcctctatcccgctgttccgcctggaagataccggcatgggcctgcaaatgcaggagtatgctgtgagccaggtgctgcattggttccgccgtttcgatgattatcaggcgctgaaaaaccagtcaacatggcagccgctgccggaatatgatcgcgatgagttcaccgtcggtattatgggggcaggggtgctgggcgccaaagtcgctgaagcgctccaggcatgggggttcccgcttcgctgctggagccgtagccgtaaatcctggcctggcgtagagagttttgcgggagctgaggagttaggcgcattcctgaatcaaacaagggtgctgatcaacctgctgccaaatacggcggagacggtgggcattattaattccggcttgctcaatcagttacgggatggcgcttacctgcttaacctggcgcgcggcgtgcatgttaatgaggacgatctgcttgccgcgttgaatagcgaaaaactcaaaggggcgatgctggatgttttcagccgcgagccgttgccaaaagagagtccgctctggcaacatcctcgcgtggcgatgacgccgcacattgctgccgtcacccgcccggcggaagccgtggactatatttcgcgcaccattacgcatctggagcgcggcgaatccgtgacgggtcaggtcgatcgcgttcgcggctactga

SEQ ID NO: 73454 - DNA, 2436 bp, Citrobacter koseri
atgaaaatcaccacgcctgaggcgctcatgacggccactatcagccgtcgtagtctggtgaaaacatccgccattagtggtctcgcgctcgccagtagcgccttcacgcttcctttctcccgaatcgcccgcgccgctgacggcctttcgcctgcgccagtggaagaaaaagcggtctggagttcctgtaccgtcaactgcgggagtcgctgtctgctacggctgcatgtgaaagatgatgcggtgtactgggtcgagtccgacaccaccggcgatgacgtctacggcaatcatcaggtgcgggcctgcctgcgcggacgctcaatccgtcgccgtatgaatcacccggatcgccttaaatacccgatgaaacgcgtcggtaaacgcggcgaaggcaaatttgaacgtatcagctgggatgaagcgctggataccattggcgacaacctgaagcgtattctgaaagactacggcaacgaagccgtacatgtgctgtatggcaccggcgtggatggcgggaacatcacgaactccaacgtgccttatcgtctgatgaactcatgcggcggttatctcagccgttacggcagctacagtaccgcacaaatcagcgccgcaatgagttatatgttcggcacgaatgacggcaacagcccggatgacatcgccaacagtaaactggtggtaatgttcggcaacaacccggcagaaacgcgcatgagcggcggcggcgtgacctactatgtggaacaggctcgcgaacgctccaacgccagaatgatcgtcatcgatccgcgttataacgatacggcagcgggtcgcgaagatgaatggctccctattcgtcccggtactgatgccgcgctggcggcggggatcgcctgggtactcatcaccgaaaatctgatcgacaagcctttcctcgataaatactgcgtcggttacgacgaaacgaccttacccgccagcgcgccgcgtaatgcgcactataaagcctatattctgggcgatggcccggacggtattgccaaaacaccggaatgggccgcgcatatcaccagtatcccggcggaaaaaatcatccagctggcacgggaaatcggctcggcaaaaccggcatatatctgtcagggctgggggccgcagcgtcactccaatggcgaacaaactgcgcgcgcgatcgccatgctctcgatcctgaccggcaacgtcgggatcaacggcggcaactccggcgtgcgtgaaggcacctgggacctcggcgtagagtggttttctatgctggataacccggtaaaaacgcagatctccgtttttacctggacagacgccatcgatcatggcgcggaaatgaccgccacacgcgacggcgtgcgcggtaaagataagcttgatgtcccgatcaaatttatgtggtgctacgccagcaatacgctgattaaccagcatggcaacatcgcccacacccatgacgtattacaggacgacagcaagtgcgaaatgatcgtcgggattgagcacttcatgacggcgtccgcaaaatactgcgacattctgctgccggacctgatgccaacggaacaggaagatcttatttcgcacgaatccgcaggcaacatgggttatgtcatcctggggcaaccggccacctcaccaaaatttgaaagaaagccgatctactggacgctgagcgaaatcgccagacgcctcggcccggatgtctaccagacatttacggaaggccgtacccagcatgagtgggtgaaatacctgcatgccaaaaccaaagcgcgtaacccggaaatgccggactacgaagagatgaaaactaccggcatcttcaagaaaaaatgcccggaggaacactatgtcgccttccgtgcattccgcgaagatcctgcctccagtccgctgaaaacgccatcagggaagattgaaatctactccgagcggctggcgaccatcgccgacacctgggagctggaaaacgatgagatcgttcatccgctgcccgcctatgcgccagggtttgatggctgggacgatcccatccgaataacctatccgctgcaattgaccggcttccactataaagcccgcacccactccagctacggcaatattgacgtgttgcagcaagcgtgcccgcaagagatctggattaaccccattgacgcgaaagcgcgcaacatccaacagggtgacacggtgcgcgtatttaacaataacgggcagatgctgatcccggcaaaagtcacgccgcgcattttgccgggcgttaccgccatcgggcaaggcgcctggctcaaggcggatatgtttggcgaccaggtcgatcacggcggttccatcaacattctgacatcacatcgtccttctccgctggcgaaggggaacccgtctcacagcaatctcgttcaggttgagaaggtataa

SEQ ID NO: 73455 - DNA, 1251 bp, Citrobacter koseri
atgctgccgattctgacaggcaatgtcggtattcacggcggaaacagcggcgcgcgcgaatccacctacaccatcaccattgaacgcatgccgttaccggaaaacccggtaaaaacgcagatctccgtgtttacctggacggacgccattgcccgcggcccggaaatgaccgccctgcgcgacggcgtgcgcggtaaagaaaagctggatgtgccgattaagttcatctggaattacgcgggcaataccatcaccaaccagcattcggatatcaataaaacacacgcgatcctgcaagacgaatcgaagtgcgaaatgatcgtggtcatcgacaactttatgacctcttccgcgaaatacgccgatattctgttgccggacctgatgacggtagaacaggaagatatcattcctaacgactatgcgggcaatatgggttatttaatcttcatccagcccgcgaccgcccctaaattcgagcgtaagcccatttactggataatgagcgaagtcgcgaagcggctgggcccggacgtgcaccagaggtttaccgaggggcgaacccaggaacagtggctgcaatatctgtacgccaaaatgctggctaaagacccggagttaccgggctatgacgagctgaaaaaaatggggatctacaagcgtaaagatcccaacggccatttcgtagcctataaaaaattccgtgaagacccacaggcaaacccgctgaaaacgccgtccggcaagatagaaatttactccagccgcctggctaaaatcgcccaaacctgggagctggaaaaagacgacgtcatcagcccgcttcccatttatgcctcaacgttcgaaggatgggacgatcctaagcgcagcgtattcccactgcaactctttggttttcattataaatcacgcacacactcctcttacggcaacattgatgttctcaaatccgcctgccgtcaggaagtctggattaaccccgtggatgcgcaaaaacgcggtatcgccaacggggatatggtgcgggtatttaacgatcgcggcgaagtacgcattccggcgaaagttacgccacgcattctccccggcgtgagcgcgatgggccagggcgcctggcatgatgccgatatgtcaggcgatcgcatcgatcatggcgcctgcgtgaatacgttaacgacgcagcgcccctctccgctggcgaaaggaaatccgcagcacaccaatctggtcgaaatcgagaaagtgtaa

SEQ ID NO: 73456 - DNA, 1206 bp, Citrobacter koseri
atgtccgatgttgaacaacagggaggcatcagccgcaggacgttagtgaaatccaccgcgataggatcgctggcgctcgctgccggagggctctctttgcctttcgggatgcgtaccgcggcggctgccgtgcagcaggcaatccagcccgctaaagacaaagtggtctggggagcatgttcggtcaactgcggtagccgctgcgccctgcgtctccacgtcaaagatgatgaagtctggtgggtggaaaccgacaacaccggcgaagatgtctatggcaatcaccaggtgcgcgcctgcctgcgcggacgttcaatccgtcggcgaattaaccatcctgatcgcctcaactacccgatgaaacgcacaggcaaacgcggcgaaggaaaatttgagcgcatcagttgggaagaagcgctggataccatcagcaacagcctgaaaaacacggtcgataaatacggtaacgaggcggtgtacattaactacacctccggtatcgtcggcggcaacatcacccgctcctcgccttatgcctctctggtggcccgcctgatgaactgttacggcggttttcttagccactatggcacctacagcaccgcgcaaatcgcggcggccatgccctacacctatggttcgaacgagggtaacagcacctccgatatcgaaaacaccaaactggtggtgatgttcggtaataacccggcagaaacccgtatgagcggcggcggaattacctggttcctggaacaggccagggaacgttcaaatgcgcgcatgatcgttatcgatccacgctataccgataccgcggctggacgtgaagacgaatggatacctattcgtcccggcaccgatgccgcgctggtcgccggactggcctgggtgctcatcaccgaagatcttgtcgaccagcctttcctcgacaactactgcgtgggttacgacgaaaaaacgctaccggccgatgcgccagcgaatggtcactataaagcctatattctgggccagggcgaagacggcacggccaaaacgcctgagtgggcgtctcgcgcattaccggtattccggcggatcgcatcattaagctcgccagagagattggcgccgctaaaccggcctgtatttgtcagggatggggcccacagcgtcaggcgaatggtgaactcaccgcacgcgcgattgcgatgctgccgattctga

SEQ ID NO: 73457 - DNA, 306 bp, Citrobacter koseri
atgaaaatctcagcaggaattgcagcgtgtctgctcatcgtcgcctccccgcaggtactggcggcgccggagtcatgtgaaagagtcaaaagcgacatcgaacagcgcatcattaacaatggtgtggcggagtccagttttacgttaactattgttcctaatgaccaggcggatcagcccgattcccaggtcgtaggccactgtgcaaacgatacccataaaattttgtatgcccgcaccagcagcggaaacgctcctgccagtaccagtccttctcaggacgggcatgctgtcgaacctcagtaa

SEQ ID NO: 73458 - DNA, 771 bp, Citrobacter koseri
atgattgagaatcatctccttattctggtgaataacgtgaagaaacagaccctggtgagctttctgtgtgtgctgcttgttggatgtgataacgccactgttctggtctcctttaccccggaaatggccagcttttccaatgagttcgattttgatccgttgcgcggcccggttaaagatttcagccagacgttgatgaacgacaaaggggaagtgacgaagcgcatcagcggaacgctttcgcaggaaggctgctttgatacgctggaactgcacgatctggaaaacaataccgggctggcgttggtactggatgcaaactactaccgcgatgccgagacgatggagaaaagagtgcgcttgcaggggaaatgtcagttggcggagttgccctcggcaggcgtggtctgggatacggacgataacggttttgttgtttccgcaacgggaagagagacgaaggtacaataccgctatgatgcggaagggtatccgttgggtaagaccaccatcagtaaagacaaaacgttatctattgatgcaaaaccgtcggcggacccgcttaaaaagctcgactatacggcggtcagcctgctgaacgatcgcccgttaggcaatgtgaagcagacgtgtgaatatgataattacgccaatccgatcaactgccagcttgtgatcgttgatgaaagcgtcgaacccgccgttgcgcggagctataccattaaaaatacgattgattattacccggctgcgtctgacacagccgggtag

SEQ ID NO: 73459 - DNA, 561 bp, Citrobacter koseri
atgacccacgccaacagtgttaagttgcgcccgctggagcgcgaagatttacgattcgtccaccagcttgataacaacgccagcgtaatgcgttactggtttgaagagccgtacgaagcgtttgtcgagctgtctgacctgtatgataagcacattcatgaccagagcgaacggcgctttgtcgtggagtgcaacggcgaaaaagccggtctggtcgaactggtagaaattaatcacgttcaccgccgggctgagtttcaaatcatcatctcgccggaataccagggaaaagggctggcttcgcgcgcagcgaagctggcgatggactacggattcaccgtactcaacctttataagctgtatctgatcgttgataaagaaaacgaaaaagccattcacatttaccgtaagttaggttttatggttgaaggtgaactgattcatgagttctttatcaatggccaataccgcaacaccattcgtatgtgcattttccagcagcaatatctggacgatcacaaaacgccaggctcaagcctgctgaagcctaccgcacagtaa

SEQ ID NO: 73460 - DNA, 342 bp, Citrobacter koseri
atgaacaatacacttagcaaacgcctgtgcctgacggcaatgcttgcgctgggtgctgtcgtgtataccacctccgcattcgcgaataccagcaaactgatcattgaatctggagacagcgcgcaaagccgccaacacgcagccatggaaaaggaacaatggaatgatacccgcagcctgcgccagaaagtgaacacgcgcacggagaaagagtgggacaaagccgacgccgcgtttgataaccgcgacaagtgtgagcagagcgccaaccttaacgcgtactgggaaccgaatacgctgcgttgcctggatcgtcgtactggccgtaccgttgcgccataa

SEQ ID NO: 73461 - DNA, 336 bp, Citrobacter koseri
atgatgatgatgctaaaaacaacacttctttttttcatgaccgcactgtgcgaaatcgtgggctgttttctgccctggctatggttgaagcggggcgcaacggcctggctgctggttccggcgggagtctcactggcattatttgtctggctgctgacgttgcatccggccgccagcggccgcgtctatgcggcttatggcggggtctatgtctgtactgcgctgttatggttacgctttgttgacggcgtcagactcagtctttatgactggtcaggcgcactgatcgcactctgtggaatgctgattatcgttgccgggtgggggcgcgcttaa

SEQ ID NO: 73462 - DNA, 1215 bp, Citrobacter koseri
atgaagattgtaggggctgaagtttttgtcacatgtccgggacgtaactttgtcacgctgaaaatcaccaccgaggacggtatcaccggcctgggcgacgctaccctgaatggccgtgagctgtcggtggcatcctatctgaaagatcacctttgtccgcagcttattggccgcgatgcgcaccgtatcgaagatatctggcagttcttttataaaggcgcctactggcgtcgcgggccggtcacgatgtctgctatttctgccgttgacatggcactgtgggatatcaaagcgaaagccgccaacatgccgctgtatcagttgctgggcggcgcatcccgcgaaggcgtgatggtctattgccacacgacgggtcacaccattgatgatgtgctggaagattatgcgcgtcacaaagagatggggtttaaagcgattcgcgtgcagtgcggcgtgccgggtatgaaaaccacctacggcatgtctaaaggcaaaggtctggcctacgaacccgctacgaaaggtcagtggccggaagagcaactctggtcaaccgagaaatacctcgatttcacgccgaaactgtttgacgccgtacgtgctgaatttggttttgaagagcatttgcttcacgacatgcaccaccgcctgacgccgattgaagccgctcgttttggtaagcgcgttgaggattatcgtctgttctggatggaagacccgacgcctgcggaaaaccaggaatgcttccgtctgattcgtcagcatacggtgacgccgattgccgtcggggaagtgttcaacagcatctgggactgcaagcagctcattgaagagcaactgattgactatatccgcaccaccattacccatgccggcggcattacggggatgcgccgcattgcggattttgcctcgctttaccaggtgcgcacagggtctcatgggccttctgatttgtcgccggtttgcatggccgcagcgcttcactttgatctgtgggtgcctaactttggcgtccaggaatacatggggtactccgaacaaatgcttgatgtattcccgcatagctggacgttcgataacggctatatgcacccaggcgacaagccgggtcttggtattgagtttgatgaaaaactggcggcgaaatatccgtatgaccctgcgtatttgccggtcgcccgtctggaagatggcacgttgtggaactggtaa

SEQ ID NO: 73463 - DNA, 1020 bp, Citrobacter koseri
atgaaaagtatagtgattgaaaaacctgacacgctggttttagcggagcgtcctatccctgagcctgcggctggggacgttcgggttaaagtgaaactggcggggatctgcggttctgatagccatatctatcgtgggcataatccttttgcaaagtatccgcgtgttatcgggcatgaattttttggtgtgattgacgccgtgggcgaaggtgttagccatgccagagtgggggaacgcgtatcggtcgatcccgtcatcagttgcgggcattgctatccctgttcaataggcaagcccaatgtatgtacctcgctggttgttctgggcgtacaccgtgacggcggatttagtgaatatgcggtcgttccggcgaaaaacgcgtttacgatcccggatgccattgctgataagcacgcggtgatggttgaacctttcaccattgcggcgaacgtcaccgggcaggttaatccgacagagaacgatattgcgctgatttatggcgcagggccgatgggactgacgacggttcaggcgctgaagggcgtttataacgttaaagaggtgattgttgccgatcgtattgatgaacgactggagatggcgaaagaaagcggcgccgactgggttatcaataatggacagcaatctctgcaagatttcctggatgaaaaagggttaaaaccgacgctgatcgtcgatgcggcgtgtcatccgtctattttacaagaagccatctcgctggcgtcgcccgccgcgcgcattgtactgatggggttctccagcgatccttgccagattgtgcagcaggggattaccggcaaagagctgtcaatttattcgtcccgtttgaatgcgaataaattcccggtcgttattggctggctggaaaaaggtctgatcgatcccgataagctcgtcacgcatacgtttaattatcaccatgtcactgacgcgattgaattgtttgagaaagaccaacggcactgctgcaaggttttactcacattctctgaataa

SEQ ID NO: 73464 - DNA, 1380 bp, Citrobacter koseri
atgactcaacaaaaacatgaacggtcaacaaaagatttaatcagagccgccgtatccggttggctgggaaccgcccttgaatttatggatttccagttatattctctgggcgctgcattagttttccatgaaatatttttcccggaacagtccgccgcaatggcgcttattctggcgatgggaacctatggcgcaggatatatcgcacgtattgtcggcgcgtttattttcggaaaaatgggcgacagtattggacgtaaaaaagtcttgtttatcactatcaccatgatggggatttgtacaaccctcattggggttctgccgacctatgcgcaaattggtatatttgcgcctgttttactggtgacgttacgtattgttcaggggttaggcgccggggcggagatctccggggcgggaacgatgctggctgagtatgcacctaaagggaaacgcggcattatttcctcgcttgtcgcaatgggaacaaactgcggtacgctgagcgcaacggcaatctgggcggtgatgttctttgcgcttgacagagaacagcttctggcctggggatggcgtatcccattcctggcgagcgttgttgtcatgatcttcgctatctggctgcgtatgaacctcaaagaaagcccggtatttgaaaaggtcaatgaaggcgaaaatgcgccagcgttaaataacgcatcagaaaacacattgggcgccatgtttagcagtaaatccttctggctggcaaccggtttacgtttcggtcaggcgggcaattctgggttaattcagacattccttgcaggatatttagtgcagacgttattattcaataaggcgattcctaccgacgcgttaatgattagctctgtcattggttttattactattccacttttggggtggttatctgataaatatggtcgccgcctgccttatattttattgaatatatctgcgattattcttgcgtacccgatgttgtctatcatcgtggataaaacctatagccccggcgtgattatgaccgcgcttattgttattcataactttgccgtgttgggtctctttgcgctggaaaacattacgatggccgagatgtttggttcgcgtaatcgctttacccggatggcgatttcaaaagaagccggtggcttagtcgccgttggatttggtcctgtactggcaggtattttctgtaatatgaccgattcctggttgcctatattagcgatgatcattgcctattctcttatcggcttaatttcagcgattttgatgccggaagtgagagatcgcgatctgagcgtgctggaggatgcagcggacctaaaggcggcaagtagcgttcagggttcggcaacgcaggtagggtaa

SEQ ID NO: 73465 - DNA, 1473 bp, Citrobacter koseri
atgcaaaacaagctcttaacggctaaggcttcgcttcctcattacgatcgcgccagactggttcctcgcattgtgcatttgggctttggcgcattccatcgcgcgcatcagggtgtctacgcggatatcctcgcggcggaacacaacagcgactggggatattgtgaagtcaacctgattggcggcgagcagcagattgccgacctgaaacagcaagacaacctgtataccgtggcggaaatgtcagcagatgcctggaccgcaagggttgttggggtggtaaaaaacgcgctgcacgcgcaggttgacggtctggaaaccgtcctggccgccatgtgcgagccgcaggtggcgattgtttccctgacgattacagaaaaagggtactgccactctccggcgaccggtcagttgatgctggatcacccgatgatcgccgccgatctgcaaaacccgcagcagccgaaatccgcgcctggcgtggtggtggaagcgctggcgcgtcgtaaagcggctggcctggcgtcatttaccgtgatgtcctgcgataacatgcctgaaaatggacacgtcatgcgcaatgtagttaccgcctatgcccgtgcggtagatgcagagctggccgcgtggattgagcaacatgtgacgttcccgtccacgatggttgatcgtattgtacctgcggtgacggctgacacgctggataagatcgaacagttaaccggcgtacgcgatcctgcgggtgtggcgtgtgaaccgttccgtcagtgggtgattgaggataactttgtcgcgggtcgccctgaatgggaaaaagcgggcgctgaactggtggcagatgttatcccgttcgaagagatgaaactgcgtatgcttaatggcagtcactcattcctggcgtacctcgggtatctggcgggctatcagcacattaatgactgcatggaagatgagaattaccgcctggccgcgcatgcgttgatgttgcaggaacaggcgccgacgctgaaagtgaagggggtggatctgaagcgttatgccgatttgctgatcgcgcgctatagcaacccggcgttgcgtcaccgtacctggcaaattgcgatggacggtagccagaaactgccgcagcgtatgctggactccgttcgctggcatatcgcgcataacagccgtttcgacctgctggccttaggcgtggcgggctggatgcgttacgttggcggcgttgatgagcaggggaatccgattgaaattagcgatccgctgctgccggttattcagcaagcggttcagggcagtgaagaaggggaacgtcgcgttcaggcgctgctggccattgatgcgattttcggtaacgaattgccgcacgttgagctgtttacgaataaggtgaaagaagcgtatctgtcgctgcttgccaacggtgcgaaagcaaccgttgcaaaatatgcggcgaatatcgcatcagcataa

SEQ ID NO: 73466 - DNA, 687 bp, Citrobacter koseri
atgaccgttgaaacccaactcaatcctacgcagcctgtaaatcagcaaatttaccgcattctccgacgtgacatcgtgcactgtctgattgcgccaggcacaccgctttccgagaaagaggtttccgtgcgctttaacgtgtcgcgccagcctgtacgtgaagcgtttattaagctggcggaaaacggtttgattcaaatccgccctcagcgcggcagctatgtgaataagatttcattatcgcaggtgcagaatgggtgttttgtccgacaggccatcgaatgtgcggtcgttcgtcgcgcggcgttgatgatcaccgacagccagtgctatcagctggagcagaaccttcaccagcagcggatcgccattgaccgcaagcagctcaacgatttcttccagcttgatgatgaatttcaccagaaactggcattaattgccgattgccagctggcgtgggatacggttgaaaatattaaagccaccatcgaccgcgtgcgttatatgagtctggatcatgtgtcgccgcctgaaatgttgctgcgccagcatcatgatatttttgccgccctggaaaagcatgacgccgacgcggtggaacgcgcaatgactgtgcatctacaggagattggcgagtccgttcagcttatccgccaggaaaacagcgactggttcagcgaagagtga

SEQ ID NO: 73467 - DNA, 747 bp, Citrobacter koseri
atgatcgttttagtcaccggtgcgaccgcaggtttcggcgaatgcattacacgtcgttttattgagaatggacacaaagtgattgccactggccgtcgccaggaacgcctgcaagaactgaaagatgagctgggcgacaatctgtttatcgctcgtttagatgtgcgtaaccgtgcatccattgaagatatgctggcgtcattacccgcagagtggcgcaacattgatgtgctggtcaacaacgccgggctggcgctggggcttgagcccgcgcataaagccagcgtggaagactgggaaaccatgatcgacacgaacaacaaaggtcttatttacatgacccgcgcggttctgcctggcatggtggagcgcaatcgcggccacatcatcaatattggctctaccgcaggtagctggccatacgcgggtggcaacgtatatggcgcaaccaaagcgtttgtgcgccagttcagtctgaatctgcgcacggatttacacggtacggcagtacgcgttaccgatattgaacccggtctggtcggcggcacggagttttctaacgtccgctttaaaggcgatgacgacaaagcgggtaaaacctacgagaacacaaccgcgctcacgccggatgatgtcacagaagcggtatggtgggtcgctaatctgcctgcgcatgtgaacattaatacgctggaaatgatgccggttacgcagtcttttgccggactgagcgttcatcggggttaa

SEQ ID NO: 73468 - DNA, 2046 bp, Citrobacter koseri
atgtcgttaacgaatccattctttagccagagcgtattgccttaccaggccccgcgttttgatctgattgaagatagccattaccgcccggcgtttgacgaagggatgcggcaaaagcgcgctgaaattgatgcgattgtccaaaacccgcaggcgcctgattttgagaacacgtatctggcgctggagcaaagcggcgcgttgctcacccgtgtgacaagcgtgtttttcgccatgacagcggcgcataccaatgacgaattacagcgccttgatgaagccttttccgccgaactggcggcgctggcaaatgatatttatctcaacagtacgctctttgcgcgtgtggatgcggtctggcgacagcgggagacgctggcgctggatgccgagtcgttgcgtcttgtggaggttatccaccagcgctttgtactttccggcgcgcagcttggcgatgacgataaagcgcagctcaggagcctgaataccgaatccgccacgctgaccagccagtttaatcagcggctgttggcggcgaataaatccggtgggatggtggttgattatcgccatcaactggacggattgagtcaggaggaggtcgctcttgccgctgatgccgccagggaaaaagggctggcggatcgctggcttattccgcttctcaataccacacaacaaccgacactggccgttttacgcgatcgccagacccgtgaaaatctgttcaacgccgcatggactcgtgcggaaaagaacgacgccaacgacacgcgtgcgattgttcagcgtctggtggacatccgtacacggcaggcaacattactcgggtttgccagttatgccgcctggaaaaccgccgatcagatggcgaaaacgcctgacgcggcgctcgcttttatgcgcgccattgtcccggccgcgcgtcagcgcgcgctggatgagcaggctgagatccagaaagtgatcgatgatgagcagggaggattcacgacccaggcgtgggactgggcgtactatgctgagcaggtacgccgtggaaaatacgcgctggatgaaacgcagctcaaaccttactttgcgttagatacggtactgaacgacggtgtgttctggacggcaaaccagctgttcggcattaaatttatcgagcgctttgatatcccggtttaccatcctgatgtgcgcgtctgggaaattttcgatcatgatggcgtcggcctggcgttgttttatggtgatttctttgcccgtgagtcaaaaagcggcggcgcatggatgggcaattttattgaacaatccacgcttaacgaaaccagaccggttatctacaacgtctgtaattaccagaagccagcggcagggcagcccgcattgctgctttgggatgatgtgatcaccttgttccatgaatttggtcatacgctgcacggcctgtttgcgacacagcgctatgcgacgctgtcggggacgaacaccccgcgcgattttgtcgaatttccttcgcagattaatgagcactgggcgagtcatccgcaggtgttcgaacgctatgcgcgccacgtcgggacgggtgaaaaaatgcctgaagcgttgcaggaaaaaatgcggcgggcaagcctgtttaacaaaggctatgacatgacggaactgctcagcgccgcattgctggatatgcgctggcacagtcttgaaaccttttcggcatcacagtcggtcgatctctttgaacagcaggcgctggcggcggaagaactcgatcttccggcagtgccaccgcgctaccggagcagctatttcgcccatattttcggtggcgggtatgcggcaggctattacgcctatttgtggacgcaaatgctggcggacgacggctaccagtggtttgttgaacagggagggttaacgcgtgagaacggacagcgtttccgtgatgccatcttgtcacgcggcaacagtacggacctggaacgtctttacccggcgtggcggggtcatgaaccgcgtatcgaacccatgttaaaacatcggggtttagaccgctaa

SEQ ID NO: 73469 - DNA, 1179 bp, Citrobacter koseri
atgaaaattaaacaccagatgctctgcgtatccttatttgcgctcatcgggtgtggcaacagtacgctttcacagctggatatgcctgcgcaaaaaagcgcgcaagttgtggtgggatactacgggcgcggtattgatccgatgattcggcaatatatgcgggaaaaagaggtgactggcgtcgttgttgctgttattcagagtaatggcccggcagaatttcacagttacgggataaccgatgataaaaatcgttatcccatcacgccagatacgctgttcgctttaggctcgctgagtaaaggcgtgacggcagaagtgacgacgatgctggtggatgaaggggtgtttaactggacggatacactggaaacgttgcttccacagaatacgcctttaagccctgacgccaaaaatattacgctcctccagttggtgactcacacttccggtttaccccggcagcctatggatttgctgacgctggaaaacttaatgcgctatttcagtaacggcgagaacttttatacgcaactggacagcgacgccgtgctgggttatctcagtgattttactgcgccggacgcgcacgttccgcagtattccaacatcggctacgccatcctggggtatattttgcagcgcagaacgggagagccgatccaggcgctggcgcaacgcatgatatttgaaccactggcgatgacaaacagcagttatacgcccaccttattgaaggcatacccgcgaagagcgctgggccatgctggcgatcagcctaagctcattacccgtggccatctgacgccagactgggtttttaacaaaaatatgatgggggcggccagtttatacagtagcgcccgcgatctggctaattatgcccgcgcgcattttacatccacaaccgtttcggccatcgatcaggcttttgctgaagccacacagacttattattatcgacagaaagaagcagcgaatattgcgtgggtgagtgatgagttttctgcgcaaaagatcacctatcaggtcggatatattggtgggtattccagctatattgggtttgataaaagaaatcgcaacgcggtagtggttttgcaaaatagtttcaactggagtaattatatcggtcagacgatcctgactcgcctggcgcagcaggggaagggcgattaa

SEQ ID NO: 73470 - DNA, 891 bp, Citrobacter koseri
atgattaaaaaaacgatagaaatcgataccatcttgttagatctgaaccagtctattgatgcccactatcagtggctggtgaaaatgtttcgttgcacagtgtctggcgatgtcaatcaacccgatattttcgatatcaattctcactgtctgtgtcagttcagccaatggctaaataatcatccggtacacgaacctgaagaaaagggctttgttatcaagattattattgctcatgaacatatgcacacacgaggtcgggaattactgcgggcgatcgcggaaaaacgttcggaagatcaccattttgaccgttttcaggaagcgttattagcatttacctcggcggtgatggactacaaaatatatcttctcaatattcgcagtaatatggatatattaaccggattacccgggcgcagagtccttgatgaatctttcgatcgtcagcttattgatgcacaaccgcttaatttatatttgctgctttttgatattgaccgctttaaattggtcaatgacaactatggtcatctggtcggtgatagcgtgttgcgcaccctggcgtcgaatttatccgtctggacgcgctacgatgaaacgccttaccgctatggtggggaggagtttgtgattatcatccgtacaaaaacggatgaacaggcctgtcgggcagggttacgtatctgccagctagtggcggataatccgattaactaccctgatggagaactttcgataacggtaactgcgggcattacccaggcgcagcagggagaaccgctggatgtcgtcatcggacgcgcagacagggcaatgtaccggggtaaacaaaccggaaggaatcgctgcatgtttatgggcaaagatcagcaaatcacgcgtgtgtaa

SEQ ID NO: 73471 - DNA, 1104 bp, Citrobacter koseri
atgcaaaaacaacaggccccgtttcgcgcagacatcgtcggcagttttttacgcccggacacgatcaaacaagctcgtttgcaatttgcacgcggtgaaataacggcgcaacaattgcgtgcggtggaagatgacgctatccgcaccgttgtggaacagcagtgtgcctgcgggctgcatgttgtcacggatggcgagtttcgccgcgcctggtggcattttgatttcttcgatggactgcaaggcgttgaacgctatgacgctgagaaggggatccagtttaatggcgtgcagacaaaagcgcacggcgtgcgcgttaccggaaaactggggtttggcgatcaccctatgctggaagacttccgctatctgaaaagcattagcggtgcagccgagcccaaaatgaccattccatcccccagcgtgctgcatttccgtggcgggcgcaaagatatcgatgctaccgtttatccgcatctggacgcttattttgatgatttggctaccacctggcgcgatgcgattcatgctttttatgaagctggctgtcgttatctgcaattggatgacaccgtctgggcttacttgtgctccgaccagcaacgtcagcagattcgtgagcggggtgacgatcctgacgagctggcgcagatttatgcccgcgtgattaaccgtgcgctggaggataaaccagccgatctgacggtcgggctgcatgtttgcaggggaaatttccgttcgacgtggatctctgaagggggctatgaaccggtggcggaagtgttgttcggcacggtgaacgttgatgcgtttttcctggaatatgataacgatcgctccggtgatttcgcgccgctgcgctttgttcggcccggacgtcagcaggtggttctgggactggtgaccacgaaaaacggcgagctggaaaacccggaaggggtgaaagcccgcttgcaggaggcagagcgctatgtcgcaaaagagcagatctgccttagcccacagtgcggatttgcctccacggaagaggggaatacgctgacggaagcccaacaatggggcaaagtacgcctcatcaccgaaatcgccagtcaggtctggtaa

SEQ ID NO: 73472 - DNA, 1272 bp, Citrobacter koseri
atgcagcgtcgtacattattaaaagcctttgcactgtccgcctcggtggttgcgatggggctgagctttagcgttcaggcggccgatacgattaaggtcggcatcatgcattcgctatccggcacgatggccatttcagaaaccccgcttaaagatatggcgttgatgacgattgatgagatcaatgctaaaggcggcgtgctgggcaaaaagctggaaccggtggtggttgacccggcctcaaactggccgctgtttgcagagaaatcgcgtcagctgctgagccaggataaagtcgcggtcgtgtttggctgctggacgtcggtatcgcgtaaatcggtgttgccggtatttgaagagttaaatgggctgttgttttaccctgtgcaatacgaaggggaagagttatcgccgaatgttttctataccggcgcagcgccaaatcagcaggctattccggctgtcgagtatctgatgagtgaagacggcggcagcgcgaaacgctttttcctgctgggaaccgattatgtctatcctcgtaccaccaataagatccttcgcgcctggctgcatgccaaaggcgtcgaggataaagatattgaagaggtgtataccccgttcggacacagcgattaccagactatcgtcgccaatatcaaaaaattctctgcgggcggcaaaacggcggtggtctccaccattaacggcgactcaaatgttccgttctacaaagagctggcgaatcaggggataaaagcgacagacgtgccggtcgtggcattctcggtcggtgaagaggagttgcgcggtatcgataccagaccgctggtgggcaacctggcggcgtggaactattttgaatctgtcgacaaccccactaaccagaaattcgttgcggattaccgggcatacgccaaagcgcataagctgccgaatgccgacaccgtcgtgaccaacgatccgatggaagcgacctatgtgggtctgcatatgtgggcgcaggcagtagaaaaagccggtacgaccgacgtcgataaagtccgcgaggcgatggcggggcaatccttcgctgcgccgtctggctttaccctgacgatggacgccaccaaccaccatctgcataaacccgtcatgattggcgaaattgaagataacggccagttcaatgtggtatggcaaaccgacgaaccggttcgcgcccagccctggagcccgtttatcgccggtaacgataaaaaatcagaccagcctgttaaaaccgccagcaactga

SEQ ID NO: 73473 - DNA, 1575 bp, Citrobacter koseri
atgaaagccatgcgctttattcggggtgtgttgctaatgacgtggttggtgccgtggatcgtgcaggcaaccgatgccgatgtgtttgttggcgccagccgggcgcaacaggcgacgttattagaacaatgggccatcacgcctgaggtgcagcgtttgcctttgttgaacgcattagcgcgtgagaatgtgctgactgatagcgcaaagcacgctttcattcggcagggtacgcaggttctgccgcttggcgctgtcgccgcgcccgatggcgaactgaaaaaggttcgtctgactaaccgtctgcgaaacctggtcagcggggcgttagccacgcatcaactattaagtgacaatgtcacggaaagagccgctgccgccagcctgttacagcgggaggccacgcccgcgatgctgccgcttttacagcagcggctggcgcaggaaacggaaagcgaagtgacatcacgtctggagattgcgctggctaacctgcaactggtgagtccttctgctgacgtccggcgtcaggcgattgtcctactggggcagtcgggcgacccggaaacgcaatcacgcctgcaaccctttacggatgctgaacatgaaccggatgcgcatgttcgcgaggccgcgacagaaagcctgaacgcaatcgcgcagcggatggtgattggcgatctcctggggcaggcgtttatggggctgtcgctgggatcgattctgctgctggcggccctggggctggcgatcacctatggattactgggcgtaatcaatatggcgcacggtgaaatgctgatgcttggcgcgtacagcacatggatggttcagcagtttatggggcagttcatgccacagtggctggcgttttatcccgttgtggcgttgccggttgccttcctgatcgctgccggaactggaatggcgctggagcgcggcattattcgccatctttatggtcgtcctctcgaaacgctgctggcgacctgggggattagcctgatgctgatccaactggtacgcatgacctttggcgcgcaaaatctggaggttgccaaccctgcgtggctttctggcggggtgcaggtctatgccaacctgacgttgccctggaaccgtatcgtggtgctggggttcgccatgctggtgctgtttttcacctggctattgctgaataaaactcgcctcgggatgcgcgttcgcgcggtaacgcagaaccgcagtatggcggcgtgttgcggcgtgccgacggggcgcgtggacatgctggcgtttggcctcgggtcggggatcgctggattgggcggcgtggccttgtcgcaactgggcaacgtcgggccggaactgggtcagggatacattattgattcatttttagtggtggtgctcggtggcgtcggacaactggcgggaagcgtggccgccgcatttgggttgggtatcttcaataagattctggaaccgcaaatgggcgcggtgctgggcaaaatcgtcattctgattgcgatcgttctgtttatccagaaacggcctcagggattgtttgcgctgaaagggagggttattgattaa

SEQ ID NO: 73474 - DNA, 1074 bp, Citrobacter koseri
atgaccatgccaatgacattaacactggcgcgtagagcgccgcgtactgtccaggtttttggcctttgcctgctggcggcgctgctgattctgccttttctggcgctgctgcctgcggatcacccgctggctgtcccggtctgggtgttaacgctggccgggaagatcctctgttacgccattgtcgctgtggcgctggatctggtgtgggggtatgccggaatgctgtcgctggggcacggtattttcttcgcgctgggcgggtatgcgatgggaatgtatctgatgcgtcaggcctctggcgacggacttcccgcgtttatgtctttcctctcctggagtgaattaccgtggttctggtggggaacgcagcacttcgcttgggcgatgctgctggtcgtgctggttccgggactgctggcgctggtgttcggctattttgcctttcgctcaaaaatcaaaggcgtctatttttccattatgacccaggcgctgacgttcgcaggcatgctgctgtttttccgtaacgaaaccgggtttggcggcaataacgggtttacggggtttaccacgttgctgggctttcctgttgcggcgacctccacgcgcgttgcgctgtttctcgcgaccgtcatattactggtgctggcgctgtggctggggtatctccttgcgcgcagtaagtttggccgcgttctgaccgccgtgcgcgatgcggaaaatcgcctgatgttttgtgggtacgatccgcgtggctttaaactgctggtatggacgctctccgctgttctgtgcggtctggcgggcgccctgtacgttcctcaggtcggcatcattaaccccagcgaaatgtcgccgaccaactctattgaagcggctatctgggtcgcgctgggtgggcgcggcaccttaattggcccggtgtttggcgcagtgctggtgaacggcgctaaaagtctgtttacggtgattatgccggagtactggcagctgtttctcggcctgatctttattggcgttacgctgtttttaccgcgcggcgtcattggtctgtttcgcaaaggagaaaaatga

SEQ ID NO: 73475 - DNA, 798 bp, Citrobacter koseri
atgcaaccggatgacggactttttacccgccagttgccgggggatcgttttcgcgatcaaacagacccggttctgcaactggaagggatcaacgtcaatttcgacggcttccaggcgctgacggatttaaccctgaacattggcgtaggggaattgcgctgcgttattggccctaatggcgccggaaaaaccaccttaatggatgtgattaccggtaaaacccggccgcaaagcggacgcgcgatttacgatcagtccacggacttaacttcgctcgatcctattgcgattgcccgccagggcattgggcgtaaatttcagaaaccgaccgtgtttgaggccctgacggtggaggagaatctggaactggcgatgaaagaggataaatccgtctgggccacgttaagagcgcgcctctcgggcgaacagcgggatcgcattgacgagatgctcgggttattgcgtctgggcgcggagcgtgggcgtcgcgccgggctgctttcgcacggacaaaagcagtttctggaaatcggtatgctgctggtacaggagccgcacctgctgttgctggatgaacctgcggcggggatgacggacgcggaaacggagtataccgctgagctgtttcgcactctggcggggaaacactcgctgatggtggtggagcatgacatggggtttgtcgaaaccattgccgaccatgttaccgttttgcatcaggggcgcgtgctggcggaagggagcctgcgcgacgtccaggccaatgaacaggttattgaagtttacctcgggcgatag

SEQ ID NO: 73476 - DNA, 699 bp, Citrobacter koseri
atgttacaggtgaatgaactgaatcaatattacggcggcagtcatatcctgcgcggggtaagttttgaggcccgcattggcgaagtaacctgtttgcttgggcgtaacggcgtgggaaaaaccaccttactgaagtgtctgatggggttaatcccggcacgcaccggcaatgtggtctggcaggggaagaacatcacccagcgtaaaccgcatcagcgcgtgcgggccggtgtcgcctatgtgccgcaagggcgggatatttttcctcgcctgacggtagaggaaaacctgctgttggggttgtcgcgtttttccgcccgcgatgcaaaacaggtgccggatgatatttacgcgctttttccggtgcttaaagagatgaagctccggcgagggggcgatctctccggggggcaacagcagcagctggcaattggccgggcgctggcctgccgtcctcagctgttaattctggatgaaccgaccgaagggatacagccgtcagtgatcaaagagattgggcaggtgatttcacatctggcgcgtcagggggatatggcgattttgctggtggagcagttctatgattttgccgcccaactggcggatcactacttattgatgtcgcggggaagcattattcagagcggcaggggcgagaatatggaagcggagggcgtccgcggtctggtcgcgatctga

SEQ ID NO: 73477 - DNA, 1188 bp, Citrobacter koseri
atgaacacaacgctgagacgctccaccctcgctttactcgcctcatcactgttattgaccattgggcgcggcgccacgcttccgttcatgacgatctatcttaaccgccagtacgatctgagcgtcgatctgatcggctatgccatgacggtagcgttaaccatcggcgtgattttcagcctgggtttcggcatcctcgcggataagttcgataaaaagcgctatatgcttctggcaatttcggcgttcttgctgggctttatcgccatccccctggtgcacagcgtcacactggtggtgctgcttttcgccctgataaactgcgcctactccgtctttgccaccgtgttgaaagcctggtttgccgacaatctttccgccacaaccaggagcaaaatattttccctcaactataccgtgctcaatattggctggaccgtcgggccgccgcttggcaccctgctggtcatgcaaagcatcaacctgccgttctggcttgcggccatttgctctgctttcccgctggtgtttatccagacctgggtgaagcgcgcagagacgcccgttgaaggaacaacggcgtcagtctggtcgccatcggtgctgttacgcgataaagccctgctctggtttaccctgtcggccttcctggcgtcatttgtcagcggcgcgttcgcctcatgtatttcccagtatgtcatggtcgtcgcgaacggtaattttgccgaaaaagtggtggctgtcgtactccccgtcaacgcggcgattgttgtcagcctgcaatatgccgtaggccgtcggttaacgaccgcaaatatcagaccctcgatggcggccggcacaatctgtttcgtggctgggctggttggttttatgatttcaggaaacagcctgctgctctgggggctctccgccgccgtatttaccattggcgaggttatttatgccccgggcgaatatatgctgatcgataacattgctccggcggggatgaaagcaagctacttctcagcgcagtcgcttggctggctcggcgcggcggccaacccgctggtcagcggcgtgatcctcaccaccttgcccgcctggtccctgtttgcggtgctgatcgtcgcgattattcttgcctgggcgctgatgctaaaagggatgcgggccagaccctgggggcagcccgcaatgtgctga

SEQ ID NO: 73478 - DNA, 900 bp, Citrobacter koseri
atgtcacgtaaagacgggttattggcgttactggtcgtggtggtgtgggggcttaactttgtcgtcatcaaagtcgggctgcacaatatgccgccgctgatgctggcgggattacgttttttgctggtcgcgtttccggccatcttcttcgttgcgcgcccgaaaatcccgctgtcgctgttactcggctacggcctgaccatcagttttggtcaattcgcgtttctcttttgtgcgattaaattcggaatgcctgccgggctggcgtcactggtgctacaggcgcaggcgttttttaccatcgtgctgggcgcgtttgcgttcggcgagcgcttgcagggcaaacaggtggccggtatcgcgctggcggtgtttggcgttctgctgctgatagaagccagcctcaatgggcaacatattgcgatgctcgggtttatgttaacgctggcggcggcgttctgctgggcgtgcgggaatattttcaataagaagatcatgcaacatgccactcgcccggcggtgatgtcgctggtggtctggagtgcgctgatcccgattattcccttctttctggcctctttgattctggacggttctgcgcagatggttcagagcctgatcgcgattgatatgacgacgattttatcgctggtgtatctggcgtttgtcgccacgattgtcggttacgggatctggggaacgttgctcggacgctatgaaacctggcgtgtggcgccgctgtctttgctggtgccggttgtggggttggccagcgcggccgtgttgcttaatgagacgcttaccgggttacagtttcttggcgcggtgctgattatggcgggtttgtacatcaacgtgtttggttttcggctgcgcaaagcggcgcaggtaaggggataa

SEQ ID NO: 73479 - DNA, 219 bp, Citrobacter koseri
atgaaatctctgtcttccgcaatgctggctgtgctgcttgtcgtctctggcccaagcattgcggagcaaaccgcacaacctggaacacaaaatgatcgcgatgcgatggtcataccgtctgcgcatgaccagtcaccattcgatttcaatcatatgggtgcgggaagcgataaatccgacgaattaggcgtaccgtattacaacggacacagcctgtaa

SEQ ID NO: 73480 - DNA, 384 bp, Citrobacter koseri
atgtccagacgcaatactgacgctattaccattcatagcattttggactggatcgaagataacctggaatcgccgctctcactggaaaaagtgtcagagcgttcaggttactccaaatggcacctgcaacggatgtttaaaaaagagaccggtcactcattaggccagtacatccgcagtcgcaaaatgactgaaatagcccagaaattaaaagaaagtaacgaaccgatcctgtacctggcggaacgttatggctttgagtcacagcagacgctgacccggacatttaaaaactatttcgacgttccaccgcataagtaccgtattaccaatatgcatggcgaatcccggtatttgcatccactcaaccattgtaattgctaa

SEQ ID NO: 73481 - DNA, 435 bp, Citrobacter koseri
gtgaaaagcaccagtgacctattcaacgaaatcatcccgctgggtcgcttgatctacatggtcaatcagaaaaaagatcgtctgttgaacgactatctgtcgccgctggatatcaccgcatcgcagtttaaggtgctctgttctatccgttgcgcggtatgcattaccccggtcgagctgaagaaagtgctgtctgtcgatctcggcgcattgacgcgcatgcttgatcggctggtctgtaaaggctggatcgaaagactgccaaatccacatgacaaacgcggcgtgctggtgaaactcaccgaacacggcgcggcaatttgtgagcaatgtcatcagttagtaggacaagacctgcaccaggaactaacaaaaaacttaacggcggatgaagtggcaacacttgagcttttgcttaagaaaatcctgccgtaa

SEQ ID NO: 73482 - DNA, 666 bp, Citrobacter koseri
atgatggatttgtttaaagcgatagggcttgggctggttgtcctgctgcctttggcgaacccgctaaccacggtggcgttgtttttaggcctggccggtaatatgaacagcgcggagcgtaaccgtcagtcgctgatggcctccgtgtatgtgttcgccatcatgatggttgcgtattacgccggtcaactggtgatgaacacctttggaatttccatccccggtttgcgcattgcgggtgggctgattgtcgcctttatcggctttcggatgttgttcccgcagcagaaggcgcacgaatcgccggaggcgaaaagcaagtcagaagagctggaggatgagccttctgccaatatcgcttttgttccgctggcgatgccgagcaccgcagggccggggacgatcgcgatgatcatcagttcggcctctaccgtacgtcacggcgtcgattttcccggctgggttattctggtggcaccaccgcttatttttctggcggtgtcagtgattctgtggggttctctgcgcagctcaggggcgattatgcgcctggtcggcaaggggggaattgaagctatttcccggctgatgggcttcttactggtctgtatgggcgtgcagtttatcattaacggcgtgctggaaattattaagacttaccattaa

SEQ ID NO: 73483 - DNA, 1062 bp, Citrobacter koseri
atgccgaccgcgcaggtcgggattatgctgacgatctatgcctgggttgtggcgctgatgtcgttgccctttatgttgctgaccagtcaggttgagcggcgtaaactgctaatctgcctgtttgttctcttcattgccagccatgtgctctccttcctggcatggaattttaccgtgctggtaatcagccgcatcgggatcgcgtttgcacacgctgtcttctggtctattaccgcttcgctggccattcgccttgcgccgccaggcaaacgcgcgcaggcactgagtctgatcgccaccggaaccgcgctggcgatggtactggggctgcctatcgggcgtatcgttggtcaatacttcggctggcgaacaacgttcttcgccattggtataggggcgttaatcacgctggtatgcctgatcaaactgctgccgaaattgcccagcgaacattctgggtcactaaaaagtctgccgctgctgttccgtcgcccggcgctaatgagtatttatttactgacggtcgtggtggtcaccgcacactatacggcatacagctatattgaaccgtttgtacaaacggtggcgggtctgagcgcaaactttgccacggtattactgctgatcctcggcggcgccgggattatcggcagcgtggtattcggcaaactgggtaatcagtacgcctcgccgcttatcagcattgccattatgctgctggtgatttgcctgatgctcctgctgcccgcagcagacagcgaaagccatcttgccgtgctgagtattttctggggtatcgccattatggtgataggcctggggatgcaggtgaaagtcctggcactggcgccggacgccaccgatgtggcaatggcgctgttctcaggcatttttaatattggcattggcgctggcgcattggtggggaatcaggtgagtttacactggtcgatgtccactattggctacgtcggcacagtgccagccctggcggcgctggtgtggtcgatcattatctttcgccgctggcctgtttcactggaagaacagccgcagcattga

SEQ ID NO: 73484 - DNA, 945 bp, Citrobacter koseri
atgaacaccaaagcgcgtaaagtgatgatcattggggcaggtaatgttggcgcatcagcagcttacgctctgctcaatcagaatatttgtgaagaactgattctggtcgatttaaacagagatcgttcggaaggccatgctttggatctcgctgatgcagcggcctacatgccggggatgatgaccatttccacccgagaggcgcgtgaatgcgccgatgtcgatatcgccgtgattaccgtttccggcggcgcattaaaaccagggcaaacacggcttgatgagctgaacaacactgcgcggatcgtccaaaagatcgtgccggaaatgatggatggcggctttaacggcatctttcttatcgccaccaatccttgcgatatcattacctggcaggtatggacgctatcaggcctgccgcgcagccaagtaatcggcaccggcgtctggctggacaccacccgtttacggcgcgcgctggcgcaggaactggatatcggcgcgcaaagcatcgatgcctttattctgggagagcatggcgatacgcaattcccggtctggtcccactcctccgtctacggttctccgattgcggacgtttatcaacgccgtacgggtaaaatcctggacgtcgaggcgatggcggaaaaagtgcgcaaacatgggtttgaaatctataaccgcaagggctgcactgaatatggtattgccggaaccattgcggagatttgccggaacgtcttcaccggaagccatcgggcgctggccatctcctgcgtactggagggggaatacggcgttgacggcgtcgccatcggcgtaccggcggtgctgactcaaagcggtgttcaacaaattatcgaattacagttagccgatgatgaactggcgaaattcagatactccgccgaagtcatcaaagcgaatatcgcaaaactcccctga

SEQ ID NO: 73485 - DNA, 867 bp, Citrobacter koseri
atggatctgactcagctggaaatgttcaatgccgtggccgaaaccggcagtattacgcaggcggcggcgaaggtgcatcgcgtcccgtcgaacctcactacgcgaatccgccagcttgaggccgatcttggcgtggatctgtttattcgtgaaagtcagcggctgcgcctttctcccgccggacataactttctgcgctacagccagcagatcctggcgctggttgatgaagcgcgaatggtggtcgccggtgatgaacctcagggactgttttcactcggcgcgctggaaagcaccgcagcggtacgcatcccggccacgcttgccgggtacaatcagcgttaccccaaaatccagttcgccctctctaccgggccttccgggacaatgctcgaaggcgttctggaaggcagacttaacgcagcgtttgttgatggcccgattactcatccgggtcttgaaggtatgccggtataccgtgaagagatgatgattgtcgcccctcatgggcattcccccgtacggcgggcaaaagacgtgaatggcagcaatatctacgcctttcgcgcaaactgctcttatcgccgtcactttgaaagctggtttcatgccgatcgcgcgatgcccggcaccattcatgaaatggagtcgtaccacggcatgctggcgtgcgttatcgccggagcgggcatcgcgctgatccctcgtaccatgctggaaagtatgcccgggcatcatcaggtcgaagcctggccgttgagcgaagagtggcgatggctggacacctggcttgtgtggcgtcgcggggcaatgacccgtcaactggacgcgtttatcgccctgctgaatccgtcctcgcagccatag

SEQ ID NO: 73486 - DNA, 1389 bp, Citrobacter koseri
atgacgatgacacctgctacacatgcgatttccgtggacccgacaaccggtgaaacgctggcgatgatgccgtgggccagcgctgatgatattgaaaatgcgctcactctggctgcccgtggatttgaggaatggaaacgcacgacggtggcgtaccgggcgcagaaacttcgcgatatcgggcaagcgctgcgtaaccgtacagaagagatggcgcacagtatttcccgtgagatgggaaaaccgatccggcaggcgcgcgccgaggtggcgaaatctgcggcgctctgtgactggtatgcagaacatggccccgcgatgcttaacccggaaccgacgctggtggaaaatcagcaggcggtgattgcatatcgtccgctggggacaatactggcggtcatgccgtggaactttccgctctggcaggtattacgcggggcgattcccatcctgctggcgggtaacggctatttactaaaacatgcgccgaatgtgatcggttgtgctgaacgtattgcgcagatcttcgccgatgccgatattccggcgggcgtttatggctgggtaaatgccagtaacgacggcgttagccagatgattaacgatccccgtattgccgccgtgacggtaacgggcagcgtgcgtgccggggccgcgattggtgcgcaggccggggctgcgctgaaaaaatgcgtgcttgaactgggcggttccgatccgtttatcgttcttaacgatgccgacctggatctggctgttaaagccgctgtcgccggtcgctatcaaaataccgggcaggtatgcgcggcggcgaagcgctttattgttgaagaggggattgccggggaatttactgaacggtttgttgccgccgccagcgcactgaaaatgggcgatccgctggcggaagagaacgatctcggtcctatggcgcgttttgatctacgggatgagctgcatcagcaagtggaggcatcaatagcagaaggcgcgcgtttattactgggcggtgaaaagctcgccggggaaggcaactattatgccgtgacggtgctgggcgatgtgacgcctgagatgacggcgtttcgtcaggagttgtttggacccgtggcggcgattaccgtggcgaagaatactgaacatgccctgcaactggccaatgacagcgactttgggttgtcggcgacgctgttcactgcgcgtgatgcactggctcaggagatggcatcgcgcctggaatgcggcggggtatttatcaatggatacagcgccagcgatccgcgagtggcatttggcggcgtgaagaaaagcggctttggtcgcgagctctcccattttggcctgcatgagttttgcaacgtacaaactgtctggaaaaaccgtctgtga

SEQ ID NO: 73487 - DNA, 1590 bp, Citrobacter koseri
atgaacttaacgcaaatttttcgaggcttaattcgtcgtttcactccccgccagtttggtctgttaacgggaatattttgcattatcgcgctgttttctattttgcaggttgcgtcatccctgatgctgtcgttttccgtgcgagacgctcagcgcaacgaacaacgtaaccagcaggcactgctgcaacaaacgaaggtggatgaggcgagggtagcgctgttgtccgcaagcgatctgctgaaccgggcgggcgtttactttatgcaggatgccgcaacgggatcagaaggcagctggcgcccgttgatggatgaagctcagcaggcgctggtgcagtcaaaaacggcctgggatgcctggcttgcaatggcccctcataaagacgacggcctgattgagagttatcagcgtttttatagcggtattcaggaacaggcggatggtctgagccagactaacgccatcgacgcgttctttgcagttcctgttcaggcgtttcagacagatttcaatgaaaactatgcccgctttcagcaagagagcgggcgtcagacagagggtggcaggcagcagctgattgccagcctggaagggttgcagcacctctttttgttcatcccgtttgtgctggtggtgattgccctgctggtctggagcggcatgtctcgttgggttatttctccgctgcgccgcctgatcgcccatattaatattctggccgcaggcgatctgtccgaaccaatgccgaaggtgagcgggtttaaccgcgaggtcgcgcaactcagttcacgcattgatgcgatgcaacaggggctgaggcagctggtgcagcaggtgagcgatgccaccaccgcaatggtcggcaacatcgatcagcttgcgcagagcaacaaacagctttatcagcaatcggcgaaacagagcgaagagttaagtagtgtcacctcgcatatctcgtttctggaaacgcatgtcgaggacaatagcggttttgccagactggctaatcaacgtgcagccgaggcgcgtcaggtagcggctggcggcgatcgtatgatggaaactgttaaccgttcgatgcaggcgattgttgagcgatcgtcagaaatgcgcgggatcatctctctgattgacagcgtcgcgttccagaccaatatcctggcgctgaacgcggctatcgaagcggcccatgccggagaacaaggtcgcggatttgccgtggtggcaaaagaagtggggctgctggcccgtaaaagcagtcagtccacgcagaacatacaggaacttatccaccactccttgcagggaatcgaggaaggctcacatgcggttaatcggctggaagaaaatttacagcaggtgatttcgttagtagacaatctgggcatactgttgaatgacatctctggcgccacgttaagccagggggacagcatccaccagatgacggggcagctacaggcgcttaaccgtgcggcgcaagagaccagcagcctggtaaataccgcatcggcgtcatcgctgcaactgcatcatgaatctcatcagcttctgaacgcggtggcgcgatttcgtctttctgcctga

SEQ ID NO: 73488 - DNA, 927 bp, Citrobacter koseri
gtggccagggccatggacaattcaattttagagaccatccttcagcaggtgcgcccgttgattggacaggggaaagtggctgattacatccctgcgctggcttctgtcgatgggtcaaaactggggatcgccatttgcactgttgacgggcaatactatcaggctggcgatgcgcaggagcgcttctcaatacaatccatatcaaaggtgctgagtctggtggtggcgatgcgtcactacccggaagaggaaatctggcaacgtgtcggaaaagatccctccgggtcgccattcaattcactggtgcaactggaactggagcaagggataccgcgtaacccgttcattaatgccggcgcgctggtggtctgcgatatgctgcaagggcgactgagcgcgccgcgccagcgtatgctggaagtggttcgggcgcttagtggtgtgtcggatattgcgtatgacgtcacggtcgcccgttctgaatttgagcactccgcacgcaatgccgctattgcctggctgatgaagtcatttggtaatttccagcatgatgtcactaccgttttgcaaaattactttcactactgcgcgttgaaaatgagctgtgcagaactggcgcgtacatttgtttttctggccagacaggggcaggcgtttcaccttgatgaaccggttgtcacgccgatgcaggcccgacaaatcaacgcgctgatggcaaccagtggaatgtaccagaacgcaggcgaatttgcctggcgagtaggattacctgccaagtcaggcgttggcggcgggattgtggcgattgtcccgcacgaaatggcgattgcggtatggagccctgaactggacccggcgggtaactccctggcgggtattgcggtacttgaacaactcacccaacaattaggtcgttcggtttactga

SEQ ID NO: 73489 - DNA, 360 bp, Citrobacter koseri
atgaacgcgcttgatccacttttttctcgcctgtcacgttcgccatttcgcgcgcggtttcgtcttggcgcaaaagaaaggcagtattgctgggataaaggcgcgcaggttattgatcaacatgccgccgagtttattgctaagcggctggccccggcttttccgcgcaacgatggtaaacaaacgccgatgcgcggccaccccgtatttattgcccaacacgcgacggcgacctgctgccgtggttgtctggcgaaatggcacaacattccccagggagaatcgctgagtgaagaacagcagcagtatgttgttgccgtcattcaccactggctggttatccagatgaatcagccgtaa

SEQ ID NO: 73490 - DNA, 1452 bp, Citrobacter koseri
gtgaaaactctaaaccgtcgcgattttcccggtgccagctatcctgagcgcatcattcagtttggtgagggaaacttcctgcgcgcctttgttgactggcaagttgatctgctgaatgaacataccgatttgaacgccggagtggtcattgttcgccctatcgaaagcacgtttccgccgtcattgagtacccaggatgggctctataccacgattattcgtggtttgaatgaaaagggcgaggcggttagcgacgcgcgtttgatccgttctgttaaccgtgaaatcagcgtctatgataattacgatgaattcctgaaactggcgcataacccggacatgcgttttgttttctctaataccacagaagccggtattagctaccatgccggtgacgcatttgatgacgcgcccgcggtcagctaccccgcgaagctgacgcgactgctgtttgaacgttatacctgttttgacggcgcgcttgataaaggatggatcatcattccttgtgaactgattgattacaatggcgaggcgttgcgcgagctggttctgcgttacgctcaggagtggaacttgtccgctgcgtttgtgcagtggctggatcaggcgaacaccttttgctccacgctggttgaccggatcgtgaccggatatccgcgtgatgaagtgacgcaacttgaagcggaacttggctatcacgatgcttttctcgatactgcggaacatttttatctgtttgtgattcaggggccaaaaaaggtagcgtctgagctgcgtcttgataagtatccgctcaacgtgctgattgttgatgacatcaagccgtacaaagagcgtaaggtcgcgatcctgaatggtgcgcatacggcgctggtgcccgttgcgttccaggccgggctggataccgttggtgaagccatgaatgaccgcgacatttgcgcctttgttgaaaaagccatctatgaagagattattccggtgctgaacttacctcgcgacgagctaatgtcgttcgccagtgcggtgacggggcgtttccagaatccgtatattaaacaccagttgttgtcgattgcgttaaatggcatgactaaatttcgcacccgtattttaccgcagctactggcagggcagcaggtcagcggcgttttaccggcgcgcctgacgtttgcgcttgcggcgctgatcgcattttatcgtggtgaacgtcgcggcgagacgtatccgctccaggatgatgcgcactggattgagcgctatcaacagtggtggcatcaacatagcgacggtcttatcagcacacaggatttggttcatgccgtgctggccgtggacgcgcattgggggcaggatctgacgcacgttgcaggtctggtcgaacaggtcacgaccgacctggatgcaatcctggcgaaagggatgcgtgaagcggtaaaaccgctgtgctaa

SEQ ID NO: 73491 - DNA, 522 bp, Citrobacter koseri
atgtctgctatcgtcacggaaagattcattttgcgccctcaagtcatcacagattatgatgtatggtatccgatgtattcagaccctaaaatatttcatctggttaatgccccaggctttacgccagaagaggcatggaaccgcctgttgagaaacatcgggcattggtctgtttttggttacggtatattttctatttttcaaaagtctgacggcacgtttttaggcgaaacagggctggctaattttcatcgtggcattgatgaaaactttgagaactgtgtcgaggcatcatgggttatttcacgttcagctcagggggctggcgtagcaaaggaagccgccgtcgctgcgcatcagtggtttgtccattcgttttcaccttcgaagacaatttgtcttatcgcaaagaataacattccgtccattcgtgttgctgagcatgtgggctaccgtatttatgatgaatgcttatacaaaggcgctgagtgtttaaaacttgaatgcttatgggataaataa

SEQ ID NO: 73492 - DNA, 714 bp, Citrobacter koseri
atgaaagagcttaatatcttcggtcaatatgtaggcagacatcttgagggtaaccttgattttattttacctgacacgcgccagttgtcaggccgttactgtcacttacaaccccttgcgacttaccactgtgatgatctttatcagggctggcatagcatagaggacccacgggactggacttatcttcctgatgaacgccccgagacaaggcaagcaacctttgactatatcaaacgcatcatcagtcagggcggaatttcatattatgccataatagaaaataaatctgcgaaagcccgaggcaccctcgccctttttaatatagacaagaataatggcgttgcggaaatcggatatgtacatctcacgccagcgataaaacgcacctttttaagcacggaagcaatttatcttttattgatgtatgtttttgatgtgcttaaatatcgtcgttgtgagtggcaaacagacacgcttaatcatgctggaatgaatgctgctgaaagaattgggtttcggaaagaaggcatcttacgtgataagcaaatcataaaatcaagaagcgtggatatcgcaacatattcaattattagcgccgagtggccgaagatatccagtgcgatatctgtctggctaagaacggaaaatctcgacgaacgtggacatcagattcaccctttacggcactatctggcggagtctgaagtgtaa

SEQ ID NO: 73493 - DNA, 513 bp, Citrobacter koseri
atgaacttgaccatacgttatgctgtacctgccgataccctgacattgcaaacgctggggaagtcaagttattaccatcatttcaaagagttatgggcttgtcctgtagagcttcgacaatttattgacagtgagtacgcgccggaccaacttgaaaatagtttaaatgatccgtcagtcacctggctcattgcggaaagcgataagccagtaggttttgcaaagataagctgggaccgtccagttagcggtggtaatcactcaggagcgctcttaaacaaactgtattttgcacccggagaaaccggtaaaggatatggccgaattcttttcgaaaaagctatcgagatagcaaggcataaggagcagcattttttctggttgcaggttcttaagggtaacgacagcgggcgtcggttttatgaatccctggggatgcagcatcttgcggatgaggaattcacaacgcctaagcaaaaaagcgtgttacatgtattcggaaaatgtatttag

SEQ ID NO: 73494 - DNA, 780 bp, Citrobacter koseri
atgaaagagatctgttccgcagattcgtcaacatttaaacatgtgcgttttgttctcacagacatggatgaaacgctgacttacaaggggcgccttgcggctgaaacctatctggcgctggaacgattgcagaacgcgggagtaaaagtgataccggtcacagccgcgcccgcaggctggtgcgaccagatggcacggatgtggccagttgatggcgtcattggtgaaaatggcggtgtgtttttcagaaggcgaaatgacggtcatggcattgagcgtttcttctggcacggcacagaaaaatatcctgacgtcgctgagcgcctgacgcaaattggggagcagataaaaagggaaattcctgccgctcattttgccgacgatcaacctttcaggatgacgtccattgcctttgctaaaccgtcagaagctcatcagtgttcattaatacttaacgcattgacgcaagcaggtgctacaaccaccgtaaacaatctctggattcttggctggtctggagaatatgacaagttatctatggcccgacgagtgctcagggatttttacgatctcgacattgatgccgaacgttctgccgtattgtatagcggcgactcgacgaatgatgcgccgatgttttcattctttgaacatacggttggagtgagcacggtatcagattaccttgatcaaatcccgaaacctccgcagtggattacccgtggcccgggaggtgctggttttgtggaaattgcagatgcggtaattgccgccagatag

SEQ ID NO: 73495 - DNA, 639 bp, Citrobacter koseri
atgtcgggtatcgctatgaatagtaaaacaaccacttcattacttcctgaatctcatctttttgaaaagaaagatgttatccatgcctttgactatcacaacatcagcaacaacgtagcgctcaccggctcttgttatgtccatcggcccgtctgcaacacattgttcatttgcgatgctgaacgtttctcattacttgagaggtggcgtatgcatatgtacaaacacgcattattactggtccagaatgaaatcgatggtgtgctgttgctgcaccatgctgaacgtctggcaaaagaaatggggactcagatcaccctcgggcatatcagttctgattaccgggagctggattacacgagtgatgctttaacccgggatcggcaatcacatgaagtgatcgaggccaaagcgatgctcagtcgcctggcggaatccagcagtattcatgtgcaagtgaaatcaattatcagcattcaacgtttcaaagatgttgaagcggttatccaacatgaggatatcgacctggtcatgctgggtcataagaatcgcctgtttggggttttttcctcgttctcttttgagttcatcaatcatctctcggttgatgtgctgattaaacatatatccactccataa

SEQ ID NO: 73496 - DNA, 1287 bp, Citrobacter koseri
atgagctatgaaattgaacgtgtgatcgcaagagaaattctggactcccgaggtaatccgaccgttgaggtcgaagtctccgccatcggcggcggtgttgcgcgcgcgtcagtcccttccggtgccagtaccggttcgcgcgaagccattgagcgccgtgatggagataagtcacgttttggcggcaaaggtgtattgggcgcggttcagagtatcaatactgagatcgataatgcgctacggggatatgatgtccgccgccagaaagatatcgataaccgcctgataactcttgatggtacggaaaataaaagtcgtctcggggctaatgctattctcggagtatcgcttgccgtggcgcgtctggccgcgcagctatcaaacattccgctgtatcgttacctcggcggcgttggcgctaacctcctcccggttccttgtatgaatatcatcaatggcggcgttcacgctcgctggcaaggcgccgattttcaggagttcatgattgccccctggggcgcaagctctgttcgggaagccattcgctggggtagcgaggtgtatcagaatttacgtcaggtcttactggagaaaggtttgtctactggcgtgggcgatgaaggtggattcgcgccagccgtctcgtcaaaccggcaaccgctggaattgattgtcgaagcgatcgaaaaagccggttataaacccggcgaggatattgttatttgcatggaccctgcatccagcgaattttattcagacggaaaatacaccctgcgcagcgaaaatgcgcaattcggtgcggaagagatgacgcgctattatgagcggctggtcaacgaattccccattgttctgattgaagatggcctggctgaagatgactgggctggctggcgaattctgagtgatacgcttggcaataagattgaactggtgggtgacgatctttttgtgactaacgtaaaatatatccagcgaggaattgatgaaaatctggcgaatgccgcgctgatcaaattgaaccagattggtacgttaagcgagacaatcgaagcggttcaattgtgtcatgatcatcactggggcagctttatctcacaccgtagcggagaaacaatagacagtttcattgctgatatgacggtaggcttacgcgccggacacctcaaaacgggagcgccaagccgtggagagcgcatcgagaaatacaatcagctaatgcgtattgaagatgaacttggcgatgccgccgtttttgccggtaaatctgctttcagaaaaggttaa

SEQ ID NO: 73497 - DNA, 1536 bp, Citrobacter koseri
atgaacgcgtatctgatgtataaagataacgattttatcgttgacgataatatcccagagaacatcaaatttgccatgaaagatctggagctggcggtgttgtttcatgcgttgtctgatggagatgattttctttattccgtcgtcaggaaggcatgttctgtgctgctatcgggcattcctgacattgagtacaggcaggctattctgcgggattgtctgtataacgaggacgttatcagaacattctataacgtggtggttgaatgtctgcaaatggaaaaggagaaacttcactacggcgtttttggtcattatccttccgctgtgctgcatcagtctctttcgtttacccaattcctgatgacctatttacagaaaataaaaattatcgcacaagaaaatatccatcacgttgaatctccggggatggttcgtcttttctcgatgcttgttcaggagttaaacgatgattatatgagcactattgaaagacatctaaagcagatggctttcaaaaaaggcgtattaatcagcgcgcgattagggcaggggaatcagggcaaagactatgtactcaggcggcccaatcccccgcaaaaaggatggtttcggcgtctttggacaaaaaggccagcgcattacaccgtacagctagccgcgcgtgatgaaaatggcttcagggcattaagcgacttaaaggacgaagggctcgtattgatcgccaacgcaatggcgcaatccaccgcgcatttgcttaattttctaaagtcactgcgcactgaattaggattttatatttcatgccttaatcttgcgcaggccttaaacaaacgcaatattccactgtgctttcctgtcccgatatatcaaagagaacgccatcatgtgtttgaggcactctttgatccctgccttgcactgacatcggatcgggaaatcgttagcaacacattaagaacggataataaaaatacttttatcatcactggcgcaaaccagggagggaaatccacgtttttacgcagtatcgggctggcgcagataatgatgcagacggggatgttcgtttctgctgaatgttatagcgcggatctttgtcggcagatattcacgcattacaaatgtgaagaagacagccatatggtcagcggaaagctggatgaagagctccgacgaatgagtgatattgttgatgctctacaacgtgatgacctggtgctgtttaacgaatcgttctctgcaacaaacagtcgggaaggggccgaaatcatcagaggcgtggtaaccgcactggcagaaagcaacgtgaagcttttttttgttacgcatactgcggaatttgcatgttcgttttatcaggaggatcgccaggacacggtatacctgtgcgccgaacgacgcgacgatggagaaaggacatacaaaatagcagaaggcgtgcctctggatatcagttatggcgaagatctgtaccgggatgtttttgatgcctctcccgtataccggaatacgggagaggtttcagagcattaa

SEQ ID NO: 73498 - DNA, 1560 bp, Citrobacter koseri
atgcgccgtacctcaacaacatcgctgcaatttattaccgttttgtatgcctctggtcgtcgtcatacacccccttcgggcgatcgtgctcctgcatattttgtcgatctgaatcttgataaaatcgtcgatcgcattgttcagggacgggaagagtacggcatcagcactttcttttattcaccgctcgaatgtctggaggatatcctctatcgacaggaaattattcaggatgtgacaatacatgcgctctataaggcgctaatggcatattccgcagagatgaagaatatcagggagatttcagaagaaaaaacaaaccggttttacttctatcaacagcggcgctgggagcttgagtgcattttgttgtattgccaggccgttacggcgctgtatgagcgtatagcgccgctgtctttgtcttccgacggtatgattaatttcaggcattatcttcgtcagtatatcgagagtgaaaattttaccgggttatattcaaccgccactatgataagaaaaagtctggaggcggttcagtacggcctgaaaattaaaggcgacgccattattgttgaacggtatcaccaggagaaaaactatagcgatgagatcctcgatgtgttctcaaagtttaagcagcatgatgtgaatgtcgaggtggagagtagacatcacagcttcgggatgaaccatattgaagcacaagttctggattgtgttgccagactatttcccgccgagtttcatcaacttgatgtgtttatagatgccaacaaacgctacagagataacacgctggatctttttgaacgtgaagtgcagttttatctggctgttgtggaatacattgaaaaatttcggcagaaagggctgccattttgtatcccggaggtacaacgagatgaaaaggctatttcggctgttgcggctttcgatctcgcgcttgcagaggtcatccttgagaaaaaggagaaggttgtctgcaatgatttcagcttccaggagcatgaacgtattttcgtcatatcgggccccaaccagggcgggaaaaccacctttgcccgcatgatagggcaactgcattttcttgccttgctgggcatttatgtccctgccaggcaggcaaagctctttctgacagacactatttttacgcattttgagaaaagcgaaaatatttataacctccggggaaaactgtatgacgacctggtgagaataaaagcgatccttgatgctgccacatcacacagtttgattatcatgaatgagatttttacgtcaaccacatcgcgggacgccatttatctgggaacgcgggtaatcaagaaaatagtcatgctcgatgcgctttgtgtctgcgtaacgtttatcgacgagcttacggcattagacccgtccatcgtcagcttaatgagtacggttgagcataataatgcggcattaagaacctataaaatcaccaggaaaccggccgatggtatcgcatggtcaacgacgctggtgataaagcatgggctgacatatgagcagataaaaacgaggttaaacggatga

SEQ ID NO: 73499 - DNA, 1323 bp, Citrobacter koseri
atgatcatcagctctcgtcacgctcgtcttgtcagcaaagtaaaaaaacgggctacgcttgtcgccaccgcgtttttacttgccagttgcgcctcaaaacctcccgtttcgctggttacgcctccttcttccgcgacgccagcctcatcccagaaaaatcagcagccggttcgtggtatctggctggcaaccgtttcgcgtcttgactggcctccggtcagttccgtgaatacgagtaatgcggcggttcgggtgcgtcaacaacagaacgcgttgatcgaaaagctggataagctaaaaagtctgggaatcaataccgtgtttttccaggttaagccggatggaacggcgctctggccgtcaaaaattttaccgtggtcagatatgctgaccggaaagattggtgaagatccgggctacgatccgctacagtttatgcttgatgaagcgcataagcggggaatgaaagtacacgcctggtttaacccctaccgcgtatcggtaaacaccaaaccggcaacggtggcgcagttaaacgcgacggtgacgtcaaatccggcgagcgtgtttgtgctgcatcgcgactgggtgcgcatctctggagaccgttttgttcttgatcccggcattcctgacgtccgggactggatcaccagtatcgtggcggaagtggtcacacgttatcccatcgatggcgtacagtttgatgactatttctataccgaaacgccaggctccacgcttaacgacaattcgacctttgcccgatatggtcaggcgtttgcctcaaaagcggactggcggcgacacaatacgcaactgctgattgagcaggtgtcccgcacggtcaaaaacctgaaaccggatgttgaatttggcgtcagccccgctggtgtatggcgtaaccgctcgcatgatccggcaggttcggatacgaggggcgcggcggcgtatgatgaatcctatgccgatactcgccgctgggtgcaactgggattactggattacattgcgccgcagctctactggccctttgcgcgtgacgcggcccgttatgatgtgctggcgaaatggtgggcggatgtggtgaaacccacgaatacccatctctatattggcgtggcgttgtataaagtcggcgaaccgtcaaagaatgagccggactggatgattaatggcggcgtcccggagcttaagaagcaactggatctgaatgaatccgtctcacaaatcaaaggcacaatcctgttcagagaaagctatcttgatcagccgcaaacccagcaagcggtgaactatctgaaaagtcggtggggaagctaa

SEQ ID NO: 73500 - DNA, 501 bp, Citrobacter koseri
atgcaaagtctggccgccttcactggcgcgaattaccagacgcctggttcgctcgactaccgaagttttttacgtgcgacgcaaatatgcaccaacgatattcgggaaaaagcgcttgccttcgaacgagtggtctttaatgtcgtgttcaacaaccgggacgatcatcctaagaacttcgcttatctgatgtccgcagatgggcaatggaccctggcgcccgcctatgatgtgacctattgcgatgggcctggcggctatcatcagatggatgtgatgggtgaagctctggatattgaaagaaagcatcttcaggcgctgggtgaacaggaagccgaattaccagccaccagagtcgcagagatcatcgcgactatttgcgacgttgcggcgacgttcagcgcaattgctaccgacctctacccggggcaaatcacgggcgacacgctgaactatatccaaaaacagattgatgggaatatcagccgcctgaagggatga

SEQ ID NO: 73501 - DNA, 549 bp, Citrobacter koseri
atgcctgagcagatagacgtcttctatgaaggatggggggaacgatggctctggggcaagctggtctcctcaacggcattgaccggtcggccagtcatcgcctttgaatacagtgacgaggccgttcgcaaaggttttgagctgtcccgcttaacattaccgcttgaggggccgcgattacgcagggactttccggctcatcaattacatcttccggggccggtttacgacgctctgcctgatggctggggaatgctgctgatggatcgcttattcaaacgcagaggactcaatgccgcccgaattggccccctggagcggctcacctgggtaggcggcaacgcaatgggggcaatgacattccagccggtacaggcagaggcagaacttacctcgcaagaagagatcccgctggtgcagctggccgcagaggtgcaggaggttctgagcggagaaggcggggagttcctgcaaaaattattgcagatgggcggttcaccacagggggcacggccaaaagcattactccatcgtgacactgtcacgtaa

SEQ ID NO: 73502 - DNA, 318 bp, Citrobacter koseri
atgatggatttaacccttagttctccagccgagattgttacgctactgtgcgaccgattacgcaaagaacgcctggcaaaacagatgactcaggctgacgtggccgcccgggcgggggttggcgtcaatacggtttcaaaccttgaagcaggcaaaaatgtgggcttcgagaatctggtcagagtggcggtggtattaggttatggcgacgcgttgaaagcgctgttcaagcccaaaattgatagcctggatgatatcttacgttatgagaagagcgcgacgcgtcagcgggtgaagaggaaaaatagcgatgcctga

SEQ ID NO: 73503 - DNA, 1944 bp, Citrobacter koseri
atggtctggtatccatcacgcatttccacccgtctgacgataggggggattgcgctgcttgcagtgaccacgctggttattgttgccattatgctctggcgcggtcagccgcgcgttgttgagatcaactccgccctgatagaggagacagggcaaggactgactcgccagttaggtactgttttatcgcgtattgaaggtgaaacggtaagcctgtcgcgccttgccgaagtgctgccaaacgacgaatcgctataccagcatgtcgttccgcatcttattggcgaacagaatgattccatcattaccggcggcggcatctggccggagccggatgcctttacgcccggcattgagcgacgcagtttcttctgggcgcgtgatgcagaagggaaattgatcttttccgacgactacaacgttgccggtggaagcggttatcataacgaaagctggtacctccaggcgaaagggcactcacagaacagctgcgtctggtctgatgtttaccaggatacgatttccggggttaacatggtgacctgtagcattccttatcaactggcagggaaatttgccggcgtcgccacaaccgatatccgactggataacgtcgccacctttatgcaacagcaggggaacagcacaggcggttatgcctttgtggtggataaacaggggcaaatcctctatttcccgcaggccgatcacgcgcagtttaaaacgtttactgacctggtcaaagcctctgactggctcgccccggtagccggatcgctgaaaacgctgaatgcctcggccgatgtcgccaccattcctcttgcacacgacggcatactggacgggccttcccgggtgatgcttttcccgatggcggataccgggtggatcgttgggctggtgacgcctgaagaacgcgttgtcgggctggcaaaagtgatgatgaaggatgtactggaagtgctgattccgatcatggccattctgctggtgggctcctggctggtggtgcgccgtcttatctctcgtctggacgatacgcgtcgcgcgctggatgatatcgcccagggcgaaggcgacctgactcgccgcctggacgtccggggtaaagatgagatttccgatattgctcaggcctttaacctctttgtggacaaaatatccgcgatcctgattaccgttcgcagcagtagcgtggtggttgcgaataacgccgtcagtctggctgacagtaatatggagttatcctcccgcgtaacgcagcaggctgccgcgctggaggaaagcgcgtcggcgatggagcaattaaatgcgaccgttcatcaaaataccggaaatacacagttagccgatgagctttccgaaaacacggcgcaaacggctaaccgctgtggcgatgtcatgcagggcgtgatttccacgatggataacgtcagcgcgtcgtccggcaggatggtggaaattgtcgccgttatcgacagcatcgcgtttcagaccaacattctcgcgctgaatgcggcggtggaagccgcacgagcgggtgatgccggtcgcggatttgccgtcgtcgcctctgaagtgcgcacgctggcacagcgcagcgccactgccgcgcaggagatcaaggcgttaatcgatgaatcggtctcacacgtagacagcagcagtcagcagatccataacgccggggatcgtcttggcgagttggtcggcaacgtgcgtcaggtcagacaattgatgggtgaaattcgcgtggcgggtgaagaacagcgtaaaggtgtctctgaggtcacgctggcagtaaccgaaatggacagtacggttcagcagaacgcgtcgctgattgatgatgccgctgcgcgaacccaggtcctgaaagaggaggctgaacaactggcgctgctggtctcttcattcagattgcctgaacccactgcggcataa

SEQ ID NO: 73504 - DNA, 867 bp, Citrobacter koseri
atgacatcaaaacctgagttatttgcccgaattgagaagagttttagccagcatacgcccagcgaaaagcgcgttgcaggctggctgttagcgcacgcggcgcagataccgtttgaaacggcagacggtatcgccagagcgacaggcaccagcggcatcacggtgggacgttatttacggaagcttggttttcgtaatcttgaggatgccaaggccagcctgcgggaactgccatccgtgccctatcagccctgggggatgaatgaacgccttgactcctggcaacagcagcagcggctgcccgacagagcgcgccagtcgctgtcgctggaaattgatgccatcacccacgtctatcagctggcgcaaagtgaaacgttcttgcgcatcgctcagcaactggcgcatgcggaggccgtgtatgttctggggattcagtccacgcgcggcattgctaacgcctttttcagccatctggaatacctgcggcccaaagtcagttattccgaagggctatccgggagctgggttgagtcgctgaattccgggttcgcacggccatatgtggtgatcacggatacccgcgcctattccgccgctgcccgtcagtattgtcgcgttgccagcgagcggcgcattccgctggcgttaatcaccgatgtctggtgtccgtgggccagagactacgcaatcgacttattgcaggtaaaaaccgacaccgggcacttctgggattcgctcgcccccgtgagctgcctgttcaacttattgctgtcaggcgtggtggatcaactgggcgatacgcttgctgaacggctgcgaaccaatcgccaactgcaacaagagtttggtcaattcgaacaataa

SEQ ID NO: 73505 - DNA, 588 bp, Citrobacter koseri
atgtcagaaacccctgaactggtcgatctgtcagtgattttcccctcgctgcatatcgatctcaaatacgccaccgccgataacctcaccggcgcgcccatttaccgggaggcccgttgcctgctgcatacggatgccgtcaccgcgctggcgaaaagtatcagcatcgcgcagctggcagggctgtctctggtggtatacgacgcctatcgtccgcagcaggcgcagtcggttctgtggcatgtctgtcccgatccgcaatacgtggtggatgtggccatcggttcaaaccatagccgtggtacggcaattgacgtcactctgatggatgagcatggcaacgtgcttgatatgggggccggttttgatgaaatgcacgatcgctcgcactcgtatcacccttctgttccacccgcagcgcaacgtaatcgattgttattgaacgccattatgtttggcggtggtttcgtcggcatcagcagtgaatggtggcatttcgaattgccggacgcggccagctaccccttgctcgacgactgcattgcctgtttcccggcatcacgcacaacaacacaaccctccctgtaa

SEQ ID NO: 73506 - DNA, 1563 bp, Citrobacter koseri
atgaagacaacacacgctttaacttcgctgtttcgtcccgccctgattgccgtggcactggctgttgccctgcccgccgctcaggcggctgtacccaaagatatgctggtgattggtaaagcggccgatccgcaaacgcttgatcctgccgtcactattgataacaacgactggacggtgacctacccgtcttatcaacgccttgtgcagtacaaaaccgagggaggtaaaggttccacggaggttgaaggcgatctggcgagcgactggaaagcctctgacgatcagaaagagtggacgtttacccttaataaagatgcccgattcgctgatggctcgcccgttacggcagatgcggtgcaacaatcttttgcgcgtctgctgaaaattgggcaaggcccggcagaagcctttccaaaagatttgaaagtcgaagccgtcgatgactatacggtgaaatttacgctgagccagccgtttgcgcccttcctgtacacgctggcgaatgacggcgcctccattattaacccggcggttctgaaagaacatgccgcagatgatgcgcgcggttttctggcgcagaacaccgcaggttccggcccgtttatgctgaaaagctggcagaaaggacagcagctgattctggtgccgaatccgcattatgcgggagccaaacctgcctttaagcgcgtgtcggtaaaaattattggtgagagcgcttcccgccgcctgcaattgtcgcggggagacatcgacattgccgatgctctcccggtagaccagctcaacgcgttaaaacaggaagggaaagtcaacgtggcggattacccttcgctgcgcgtgacttatctctatctgaacaacagtaaagcgccgctgaatcaggtggatttgcgccgggccatttcatggtcaacggactatcagggcatggtgacgggtatcctcagcggtaacggcaagcagatgcgcggcccgattcctgaaggtatgtggggctatgacgcaaaggcaatgcagtacagttttgatgaagcgaaagccaaagccgcctgggagcaagtcgcgaccaagcccgatggcctgagcttcctctactctgataacgatccaaactgggagccgattgcgctttccacgcaggccagcctcagcaagctgggcattaaggtgaagctggaaaaactggcgaatgccaccatgcgcgaccggatcggcaaaggtgattacgacattgccatcggcaactggagcccggacttcgccgacccgtacatgttcatgaactactggtttgagtctgataagaaaggcctgccgggtaaccgttcgttttatgaaaacgccggggtcgataaacttctgcgcagcgcgctgaccaccaccgatcaggcggccagaacgaaggattaccagcaggcgcaaaccatcgtgattgatgaggccgcctacgtctatctcttccagaaaaactaccaactggcgatgaacaaagaggtcaaaggctttgtcttcaaccccatgctggaacaggtctttaatattggcgccatgagtaaataa

SEQ ID NO: 73507 - DNA, 1023 bp, Citrobacter koseri
atgacgttctggagcattttacgccagcgatgctggggacttattctggtggtcgccggtgtttgcgtaattacgtttattatttctcacctgattcctggcgaccctgcgcgactgctggccggcgatcgcgccagcgatgagattgtcgaaaacattcgccagcagctggggctggatcagccgctgtatgtgcaattttttcgctatgtcagcgacgtttttcacggtgatctgggcacgtctatacgcactggccgcccggtaatggaagagttgcgcgtgtttttccccgccacgcttgaactggccttctgttccctgctgctggcgttggtgatcgggatcccgctggggattttatccgccgtatggcgaaaccgctggctggaccatctggtgcggctgatggcgataaccggcatttccaccccggcgttctggctggggctgggcgttattgttctgttttacgggcatctgcaaattctgcccggcggcggaaggcttgatgactggctggacccgcccgcccacgtcaccgggttctacctgattgacgcgctgctggaggggaatggcgaggtctttttcaacgcgttacaacaccttattttaccggcgctgaccctggcgtttgtccacctgggaattgtcgcccgtcagattcgttccgccatgctggagcaactcagtgaggactacattcgtaccgcgcgtgccagcggtctgcctggctggtacatcgtgctctgctatgccttgcctaacgccctgattccgtcgattaccgttctggggctggcgctgggcgatttgctgtatggcgccgtgcttaccgagacggtctttgcctggccgggaatgggggcctgggtggtcacctctattcaggcgctggattttccggcggtgatgggattcgccgtagtggtctctttggcttatgtgctggtaaacctggtcgtcgatttactctatttgtggatcgatccccgaatcggtcgcggaggtgctgaatga

SEQ ID NO: 73508 - DNA, 897 bp, Citrobacter koseri
atgatgttaacgcaagagacgcccgccccgtcgcagaccgcccgccgccggatcgactgggcaaaactcttctggctgatgaaaagcagcccgctgacgctgactggcggcgtgattatcatcctgatgttgctactgatggtgctgtcgccctggataacgccttacgatcccaatgccatcgatttgaccgcgcgcctgcttgcgccctctgcgacgcactggttcggcactgacgaagtgggacgcgatctgttcagccgcgtactggtcggcagccagcaatccattgtcgccgggctggtcgtcgtagggattgccggtggaatcggctccttgcttggctgtctgtccggcgtcatgggcgggcgcgccgacgctattattatgcgcctgatggatattatgctgtcgattccttcgctggtgctgacgatggcgctggccgccgcgctggggccgagcctgtttaacgccatgatggcgatcgccattgtccgtattcctttttatgtgcgcctggcgcgagggcaaacgctggtcgtgcgccagtttacctatgtacaggctgcccgaacgtatggcgcttcccgctggcaccttatcagctggcatatcttacgtaattcgctgccgccgcttatcgtgcaggcgtcgctggatattggcagcgcgatcctgatggccgccacgctgggctttattggccttggcgcacaacagccctccgctgaatggggcgcaatggtggctattggtcgtaactatgtcctcgaccagtggtggtattgcgcctttcctggggcggcgatcctgattaccgctgtcgggtttaacctgtttggcgatggtattcgcgatctgcttgaccctaaagccggaggaaaacagtcatga

SEQ ID NO: 73509 - DNA, 987 bp, Citrobacter koseri
atgacccaacccgtgctggaaattgaggatttacacctgagctttccgggttacaaagccgatgttcacgcccttaaccacgtatcgttgcgtatcgaccggggcgaaatcgtcggcgtggtcggcgagtccgggtcaggtaaatccgtcaccgccatgctggcaatgcggctgctgccggaaggcagctatcacattcatcagggccgcgtatcgctgctgggcgaggacgtgctgaatgccagcgaaaagcagatgcgtaaatggcgcggcgcgcgcgtgtcgatgatcttccaggagccaatgacggcgctgaatcccacccggcgcattggacaacaaatggtggaagtcattcgccatcatcaggcggtgagccgccaggcggcgcgggaaaaagccatcgccctgctggaagagatgcaaattcccgatgcggcgcaggttatggcgcgatttccgtttgagctttccggcgggatgcgccagcgggtgatgatcgcgctggcattctcctgcgagccggagctgattattgccgacgaacccactaccgcgctggacgtcacggtgcagctacaggttctgcgtttgctgaaactaaaagcgcgagccagcggtactgcggtgctgtttatcagtcatgatatggcggtggtatcgcagttgtgcgatcggctgtatgtcatgtacgccggaagcgtgattgagagcggccccacgcagacggttattcgccgccccacgcatccctattccattggtttgttgaaatgcgcgccggagcacggcgaacctcgcgcgccgctgcccgcgattccagggacggtgcctaacctgacctgtctgccaaccggatgcgccttccgcgaacgctgttttgtcgccgggacgctgtgcgaggctgtcccggcgctggagaatcatggcgaacctgaacaacaatccgcctgctggtatccacaacaggagatgacgcatgtctga

SEQ ID NO: 73510 - DNA, 945 bp, Citrobacter koseri
atgtctgacatattgctctcgttacgggatgtccatatcaccttccccgcccgtaaaaactggttgggccgggtgacggaacgcgtacatgccctgaacggtatggatttgcagattcgccagggagaaacgctcggcatcgtgggggaatccggctgcgggaaaagtacgctggcgcaactgctgatgggaatgttaaaacccagccacggcgagtgctcgcggcctggcgttgcgcgcactggcgccaacagcgggatgcagatggtctttcaggacccgctctcttcgctggatccccgattacccgtctggcggattatcaccgagcccgtctggctccagaagcataacagcgaacgtgaacggcggacgctggcggaagaactggccttacaggttggcatccggcctgagtacctcgacaggcttccccatgcgttttccggcggacaacgccagcgcatcgccattgcccgcgccttatcgtcagagccggacgttatcgtgcttgatgaaccgacttccgcgctggatatctccgtgcaggcgcagatcctgaatctgctggttgcgctacagacgcgccgtaaactgacgtatgtgttgatttcacacaacgtgtcggttgtgcgatacatgagcgatcgggtggcggtgatgtatctcgggcaaattgttgaactgggctacgcgcaacaggtgttaaccacgcctgcgcatccctatacccggctgttgctggattccgtgccgaaaacgggtgcgccactggcagaagacctggtgctgcgcaaaacggaattaccggggaaccgccacctgccgcaagggtgttattttcgcgatcgctgtccgctggcaacccgtggctgtgaaaaaccgcaggcattattgacgcggggatcggagagcgacgttcgctgctggcgagcggtggagtaa

SEQ ID NO: 73511 - DNA, 432 bp, Citrobacter koseri
atgacaatccataagaaaggtcaggcacactgggaaggcgatattaaaggtggaaaaggtacggtatcgaccgaaagcggcgtgttgaatcaacaaccctatggctttaatacacgctttgaaggcgtaaaaggaaccaacccggaagagttgatcggcgcagcccacgcggcctgtttctcgatggcgctttcgctgatgctgggcgaggcgggttttaccccatcgtcaatcgacacgacagccgatgtctcgctggataaagtcgacgcgggttttgcgatcacgaaaattgcgttgcacagtgaagtggccgtacctggcattgatgcgtccacctttgacggcattattcagaaagcaaaagccggatgcccggtttcgcaggtgctgaaagcggaaatcacgctggattatcagttgacgtcataa

SEQ ID NO: 73512 - DNA, 144 bp, Citrobacter koseri
atgaaatcgaaccgtcaggcccgtcatattcttggactggaccataaaatttccaaccaacgcaagctcgtgaccgaaggcgacaaagtcagcgtggtcaacaaccctactggcagaaaacgtcacgctgacagccaaaagtaa

SEQ ID NO: 73513 - DNA, 1698 bp, Citrobacter koseri
atggaaaccaaaatcaagaaacagcgttccctttatattccttacgctggccctgtgctgctggaatttcctctcctgaataaaggaagcgctttcagtatagaagaacgccgtaacttcaacctgctggggttactgccggaagtggtcgaatcgattgaagaacaggcggagcgcgcctggatccagtatcagggattcaaaacggaaatcgataaacatatctatctgcgcaacattcaggataccaacgaaaccctgttctaccgactggtgcaaaaccatctcgatgagatgatgccggttatctataccccaacggtgggcgccgcctgtgagcgcttctctgagatctaccgtcgcgcgcgcggcgtgttcatctcttatcagaaccgccacaacatggacgatatcctgcaaaacgtgcctaaccacaatatcaaagtgattgtggtgacggacggggaacgcatcctcggtcttggcgaccagggcattggcggaatggggattccaatcggtaaactgtcgctgtacaccgcctgtggcggcatcagcccggcctataccctgccggtggtgctggacgtcggcaccaacaatcagcagttgctgaacgatccgctctatatgggctggcgtaacccgcgcatcaccgatgacgaatactatgaattcgtcgatgagtttattcaggcggtgaaacagcgctggccggacgttttgctgcaattcgaagatttcgcgcagaaaaacgcgatgccgctgcttaatcgctatcgcgatgaaatctgctctttcaacgatgatattcagggaacggcggccgtgaccgtcggtactctgattgccgccagccgtgcggcgggcagccagttgagcgagcagaaaatcgtcttccttggcgcgggttctgccggttgcgggattgctgaacagatcatcgcgcaaacccaacgcgaagggctcagcgaagaagccgctcgccagaaagtgtttatggtggatcgctttggtctgttgacggatcagatgcctaacctgctctcattccagacgaagctggtgcaaaaacgcgagaacctgcaacactgggacagcgaaagcgaagtgctctccctgcttgatgttgtgcgcaacgtgaagccggacattctgatcggcgtgtcggggcaaaccggactctttactgaagagatcattcgcgagatgcacaagcactgcccacgtccgatcgtgatgccgctgtctaacccgacgtcccgcgttgaagccacgcctcaggacatcatcgcctggactgaaggtaatgcgctggtcgcgaccggcagtcctttcgcgccggtggcctggaaagataaaatttaccctattgcgcaatgtaataacgcctacatcttcccggggatcggcctgggcgtgattgcgtccggcgcgtcgcgtattactgacgaaatgctgatgtcggcaagcgaaacgctggcgaaatactctccgctggtgctcaacggcgaaggtctggtattgccggagctgaaagatattcagaccgtgtcgcgagcgattgcctttgccgtgggtaaaatggcgcagcaacagggcgtggcggtaaaaacgtccgcagaagcgctacagcaagccatcgacgagaatttctggcaagcggaataccgcgattaccgccgtacctctatctga

SEQ ID NO: 73514 - DNA, 657 bp, Citrobacter koseri
atgagtaagtcgaaaatgattgtgcgcacgaaatttatcgatcgcgcctgtcactggacggtggtgatttgcttcttcctggtgtcgctgtcgggaattgcgtttttcttcccgacgctgcagtggctgacgcaaaccttcgggacgccgcagatggggcgtattttgcacccgttcttcggcgtagcgatttttgtcgcactgatgttcatgtttgtgcgctttgtacaccacaacatcccggacaagaaagatcttccgtggctgaaaaatattgtggaagttctgaagggcaatgaacacaaagtcgccgatgtcggtaagtacaatgccgggcagaaaatgatgttctggtcgatcatgagcatgattttcgtgctgctggtgacgggcgtgattatctggcgtccgtactttgcgcagttcttcccgatgcaggtcgtgcgttacagcctgctgatccatgcggcggcaggcatcatcctgatgcacgccatcctcatccatatgtatatggcattctgggtgaaaggatcgattaaagggatgatcgaaggtaaggtgagtcgccgctgggcgaagaaacaccacccgcgctggtatcgcgacgtcgagaaggtcgaagcgaaaaaggaaagcaaagagggattacaataa

SEQ ID NO: 73515 - DNA, 885 bp, Citrobacter koseri
atgtctttggaaacgcaggacatcatcaaacggtctgcaacaaacccgatcacgccgcctccccaggcgcgtgattataaagcggaagtcgcaaaactgatcgacgtctcctcctgcgtaggctgtaaagcctgccaggtggcttgttccgagtggaatgacattcgtgacgaggtaggtcattgcgtcggggtgtatgacaacccggccgatctcagcgcgaaatcctggacggtgatgcgttttagcgaaaccgaacagaacggcaagctggaatggctgattcgtaaagacggctgtatgcactgtgaagatccgggctgcctgaaagcatgcccgtctgccggcgcgatcatccagtacgctaacgggattgttgatttccagtccgaacattgtattggctgtggctactgcatcgccgggtgtccatttaatgttccgcgcctcaataaagaggacaaccgcgtctataaatgtacgctgtgtgtggatcgcgtcagtatcggtcaggaaccggcttgcgtgaaaacttgcccgaccggggcaatccatttcggcaccaagaaagagatgctggagatgggggagcagcgcgtggagaaactcaaagcgcgcggtttcgaacatgctggtgtttacaacccacaaggtgtgggcggtacgcacgtcatgtacgttctgcatcacgcgaaccagccggagctatatcacggcttaccgaaagatccacagattgatacctctatcaacttgtggaaaggggcgctgaaacctctggctgccgccgggtttatcgccaccttcgccgggcttatctatcactacattggtattggcccgaacaaggaagtggacgatgaagaggaggaccatcatgagtaa

SEQ ID NO: 73516 - DNA, 2412 bp, Citrobacter koseri
atgaccaaccactgggttgatatcaaaaacgccaacgtcgttatggtgatgggcggtaacgccgctgaagcacatccggtgggattccgctgggcgatagaagcgaaaaacaacaacgacgcaacgctgattgtcgtcgatccacgttttacacgtacagcctcggtcgcggatatttacgcgcctattcgttccggtacggacattaccttcctgtccggcgtactgctgtatctgattgaaaacaataaaatcaatgccgaatacgttaagcattacaccaacgccagcctgctggtgcgggacgattttgctttcgatgatggtctgtttagcggctacgacgccaaaaaacgccagtatgacaagtcatcctggaactaccagttcgacgaaaacggctatgcaaaacgtgatgagacgctgagccatccgcgctgtgtatggaatttgctgaaacaacacgtttcccgctatacaccggatgttgtcgaaaacatctgcggtacgccaaaggccgatttcctgaaagtgtgtgaagtgctggcctccaccagtgccgccgatcgtaccactaccttcctgtacgcgctgggctggacgcaacataccgttggcgcgcagaacatccgtacgatggcgatgatccagttgctgctcggcaacatggggatggcaggcggcggcgtcaacgccttacgcggccactctaacatccaggggttaacggatttaggtctgctttccaccagcctgagcggttatctgaccctgccgtctgagaagcaggcggatctgcaaacctatctgagcgcaaacacgccgaaagccacgctggctgaccaggtgaactactggggcaactatccgaagttcttcgtcagtctgatgaaatcgttctacggcgatgcggcgcagaaagagaatgactggggctttgaatggctgccgaagtgggatcaggcctacgacgtcattaaatacttcaacatgatggatagcggtaaagtgaccggctacatctgtcagggctttaacccggttgcgtccttcccggacaaaaacaaagtggtgcagtcgctgagcaagttgaagtacatggtggtcattgacccgctggtgacggaaacctccacgttctggcagaaccacggcgagtctaacgacgtcgatccggcgtcgatccagactgaagtcttccgtctgccgtcaacctgttttgccgaagaagatggctctatcgccaactctggccgctggttgcagtggcactggaaaggtcaggatgcgccgggcgaagcccgcaacgacggccaaattctggccggtatttaccaccgtctgcgcgagatgtatcgcagcgaaggaggtaaaggccttgaaccgctgctgaagatgagctgggactacaaacagccggatcatcctgagtctgaagagattgcgaaagagaacaacggctacgcgctggaagatctctatgacgccaacggcgtcctgctggcgaagaaaggccagttgctgagcagttttgcccagttacgcgatgacggaacgacgtcgtcctcctgctggatttataccggcagctggaccgagcagggcaaccagatggctaaccgtgacaacgccgatccgtcaggtctcggcaatacgttgggttgggcatgggcatggccgctgaaccgccgcgtactgtataaccgcgcctcggcagatcctcagggtaaaccgtgggatccgaaacggatgctgatccagtggaacgggtcgaagtggacggggaacgatatcccggacttcaacaccgccgcaccgggtagcgcaaccgggccgtttatcatgcagccggaagggctgggacgtctgttcgccatcgataagctggcggaagggccgttcccggaacactacgagccgatggaaacgccgctgggtaccaacccgctgcacccgaacgtgatctccagcccggtcgttcgtctgtacgaagaagatgcgcggcgtatgggcaagaaagatcagttcccgtatgtcggtacaacctatcgtctgaccgaacatttccacacctggaccaagcacgcactgctgaacgcgattgctcagccagagcagtttgtggaaatcagcgaaaacctggcggcctcgaaagggattgccaacggcgacgcagtgaaagtcagcagcaaacgtggattcatccgggcggttgccgtggtgacccgacgtctgcaaacgctgaacgtcaatggtcagcaggttgaaaccgtgggtattccgctgcactggggctttgaaggggttgcgcggaaaggctatatcgcgaacaccctgacgccaaatgtcggtgattccaactcgcaaacgccggaatataaagcgtttttagttaacatcgagaaggcgtaa

SEQ ID NO: 73517 - DNA, 588 bp, Citrobacter koseri
atggacgtcagccgcagacaattttttaaaatctgcgcgggcggtatggcgggaacaacagtcgctgctctgggttttgcacccaaaatggcactggctcaagcgcgaaattataagctgttacgtgctaaagagatccgaaacacctgcacatactgttccgtaggttgcgggctattaatgtatagcctgggcgatggagcaaaaaacgcaaaagaagcaatttatcacatcgaaggggacccggatcatccggtcagccgtggcgcattgtgtccgaagggcgcaggtttgctggactatgtacacagtgaaaaccgcttgcgttacccggagtatcgcgcgcccggttcagataaatggcaacgcattagctgggatgacgcgttcacccgcatcgcaaagctgatgaaagccgaccgtgacgccaactttattgaaaagaacgaacagggcgtaacggtaaaccgctggctttccacggggatgctttgcgcctccgccgccagtaacgaaacaggcatgttgacgcagaagttcgcgcgttccctcggcatgctggcagtagacaaccaggcacgcgtctga

SEQ ID NO: 73518 - DNA, 882 bp, Citrobacter koseri
atgacgacacaaaaagcaacgttaattggacttattgccatcgtactctggagcacgatggtcgggcttattcgtggggtaagtgaaggacttgggcccgttggcggcgccgccgctatttattcgctaagcggattattgctcatctttaccgttgggttccccaatattcgtcgttttcctgttcgttatttaatcgctggcagcgtactgtttgtcagttatgaaatatgtctggcgctctcgctgggatatgcagcaacgcgtcaccaggcgattgaagtcggcatggtcaactatttatggcccagcctgacgattctttttgctattttgttcaatggacaaaaaacaacctggctggttgttccaggattaattgtcgcgttaaccggcgtctgttgggttttaggcggtgaacatggactccatgctgatgaaattatcagcaatattgcaaccagtccattaagctattttctcgcttttctcggcgcatttatctgggcaacctactgtaccgtcactaacaaatatgccagagggtttaatggcattacgatatttgtcctcctcactgctgcaagtttatgggtacattattttctgacgccgcagccggagatgatttttagcacgcctgtcgttatcaaactgttttctgctgccctgacgttaggatttgcttatgcagcatggaacgtgggtattttgcatggcaacgtcacgattatggctgtggggtcctattttaccccggtgctgtcatctgcgctggccgctgtcctgttaagcgcgccgctgtcattttcattctggcaaggtgcggttatggtgtgtgcgggttccctgctttgttggttagcgacgcgtcgcgcctga

SEQ ID NO: 73519 - DNA, 1101 bp, Citrobacter koseri
atgaaacttaaattagttgcagtggcagtgactaccctgttggcagcaggtgcggtaaacgcagctgaggtatataacaaagacggcaacaaactggacctgtacggtaaagtaaccgctcttcattatttctctgacgacaagggtgatgatggcgataaaacttatgcgcgtctgggcttcaaaggcgaaactcagatcaatgaccaactgaccggtttcggccagtgggaatatgaattcaaaggcaacaacgacgagtccaacggcaccaaaggcaacaaaacgcgtctggcgttcgctggtctgaaatttgatcagttcggttctctggactacggccgtaactacggcgtcgtttacgacatcggcgcatggactgacgttctgcctgagttcggtggcgatacctggacccagagcgatgtgttcatgactggccgtactaccggcgttgcaacctaccgtaacaccgacttcttcggtctggttgaaggtctgaacttcgctgctcagtatcagggtaaaaacgaacgtagtaacagcgataaaatctacggcgctgacatcactaaagcgaatggcgacggtttcggtatctcctctacctatgagttcgacggtttcggcgtgggtgcatcttatgcaaaatctgaccgtactgacgcgcaggtgaattctgctgcgaacgaactgaacgcaggcggtaaaaacgcagaagtttgggctgctggtctgaaatacgatgcgaacaacatctacctggcgaccacctactctgaaacccgcaatatgactgcttacggcagcgatcacattgcgaacaaagcgcagaacttcgaagctgttgctcagtaccagttcgacttcggtctgcgtccgtccatcgcttacctgaaatccaaaggtaaagacatcggtagctggggcgaccaggatctggttgagtacatcgatgtgggcgcgacctactacttcaacaaaaacatgtctacctacgttgattacaaaatcaacctggttgacgacagccgcttcaccgaagcagctggcgttagcactgacaacatcgttgctgttggtctgacctaccagttctaa

SEQ ID NO: 73520 - DNA, 441 bp, Citrobacter koseri
gtgcaaacgttcacaggacgttgcctctgtgggcagagtcattttaccgttgacgttgaaatgctcgatgtttatgcctgtcactgcacgctgtgtcaaaaatggtctggtggtattgcgatgtacctggaagcctgcggtcgtccgtttatggctccccattcaccagagccctctcacttctcttcttctttgcgtggcgaacgctacttctgttcaggttgtgggtgtccgctgtggttccggctgacggaaagcgaccgctattttatgccctggacgctgttggaattaaccgaagatgagcggcgtcgtctgatcctggcagccgaaatctataccgaaacgcaacctgcgttctggcggttgacggggcaatacgctcgcctgagcggtaaagagatcgaagcgatggattacccctgtcaattagcacattag

SEQ ID NO: 73521 - DNA, 1488 bp, Citrobacter koseri
atgtttcgtcagtggttaacgttaatgattattgtactggtctacatccctgttgcgattgatgcaacggtgctgcacgttgccgcacccacgctgagcatgacgttgggcgccagtggcaacgagctgttgtggatcattgatatttattctctggtgatggcagggatggtattgccgatgggcgcgctgggcgatcgaatcggctttaaacgcctgctgttgctggggggaggcttattcggtcttgcgtcgctggcggcagcgttcgcccacagcgccagttggctgatcgctacccgcgcgattctggctatcggcgcggcgatgattgttccggcgacgctggccggtatccgcgccacgttttctgaggcccgtcaccgtaatatggcgcttggcgtctgggcggccgtagggtcgggcggcgccgcgttcggcccgctggtcggcggtatgttactggagcacttttactggggatcggtctttctgatcaatgtgcccattgttctggtggtgatggcgttaacggcgcgctttgtgcctcgccagtccggtcgccgcgatcagccattgaactttagccatgcggtcatgctgattatcgccatcctgctgctggtatacagcgcgaaaaccgcgctgaaagggcaactggccagcggcgttatcgccctgacgctgatgatcggcgcgctgttgttgggcatgtttatccgcacgcagctcgccgcagcgcgcccgatgatcgatatgcgtctgtttacgcatcgcatcattctgagcggcgttgtgatggcgatgacggcgatgatcacgctggtcggcttcgagttgctgatggcgcaggagcttcagtttgttcatggcttaacgccgtatgaagcagggctgtttatgctgccggtgatgctcgcaagtggattcagcggcccccttgccgggatgctggtttcacgactgggattgcgaacagtggcgactggcggcatggcgctaagcgcgctgagcttttatggcctggcaatgacggatttcagcacgcagcaatggcaggcctggtgcctgatggcgctgttgggttttagcgccgccagcgcgttactcgcctctaccgccgccattatggccgccgcgcccgcagaaaaagcggcggcggccggggcgatagaaacaatggcctatgaactgggcgccgggcttggcattgcgatctttggcttgttgttaagccgcagcttttccgcatctatcctgcttccttccggcctgaacgcagaggaaatcgaacgcgcatcgtcgtcaatgggagaagcggtgcagctggcggatacgctctcgccttcactcggtgaggcgatactggacgccgccagacaggcgtttacctggtcgcacagcgtggcgctgagcagtgccggaagcatgttaattctgttagcggtagggatgtggtttagtctggcaaaagtaaaacgcggctaa

SEQ ID NO: 73522 - DNA, 579 bp, Citrobacter koseri
atgagttatctgaatcgggatgagcgccgtgaggtgatcctgcaagcggcaatgcgcgtcgcgctggaagagggattgagcggcatgacggtaaggcgaatcgcgcaggaagccggcgtcgcgaccggacaactccaccaccatttcagcagttcgggcgagcttaaatctcaggtattcgttcgtctgattcgcaccttgctggatgccagcctggtgcccgagcactgcacctggcgcatgcggctgcacgccatgctggggagtgacgatggcggattagagccctacattaaactctggcgggaagcgcagatcctggcggataacgacccggaaattaaaagcgcctacctgctgaccatgcaaatgtggcatgaagaaacgaccgccatcattgaaggcggtcaggaagcaggagaattttcattggcctcagccgccgctgatgtcgcctggcgattaatcgcattagcctgcgggctggacggcatgtacgccctcggtatgcctgaaatgaccgaccctgcctaccagcagcatctggaccgcatgattacgctggagttatttcgctga

SEQ ID NO: 73523 - DNA, 1395 bp, Citrobacter koseri
atggcgctacaaaatgagaaaaataatcgttatcttttgagtgactggaggccagaacaacccgctttctgggaaaacaaaggtaaacacattgcccgaagaaatctttggatatcagtggcttgtttattgctcgcattctgcgtctggatgttatttagtgccgtcgccgttaatttgaataaaattggttttaatttcaccactgaccagctctttttattaaccgctttaccttcgctgtccggggctatattacgcgtgccctactcctttatggtacctatatttggcgggcgtcgctggacgatttttagcacagttattctgattattccctgtatctggctcggttttgcggtgcaaaatacatccaccccttttggagtatttattatcattgcgctgctgtgcggttttgctggcgctaactttgcctccagtatgggcaacatcagctttttcttcccgaaagcaaagcaaggtagcgccctcggcgtgaacggcggtttaggcaaccttggcgtcagcgtgatgcaacttgtcgccccgctggtgattttcctgcccatgttcacttttctgggcgtacagggcgtgccgcagcccgatggctcgctgctttcgctgacgaacgccgcgtggatctgggtgccgttattgcttatcgcgaccctcgcagcctggaccgggatgaatgatatcgccagttcgaaagcctctgtcgcttctcaactgccggtgctgaaacgctttcacctttggctgctcagcctgctctatctcgccaccttcggttcttttatcggtttctccgcaggattcgctatgctggcgaaaacccagtttcccgacgtcaatattctgcaactggccttctttggcccgtttatcggtgcgcttgcgcgttctgcgggcggcgttatttctgacaagttcggcggcgttcgcgtcacgctgattaacttcgttttcatggcgctgtttaccgccctgctgtttctgacattaccgggctccggctcaggaagttttatcgccttctatctggtgtttatggggcttttcctgacggcgggcctgggaagcggctcgaccttccagatgattgcggtcattttccgccagatcacgatctacagagtgaaactgcgcggcggctcagatgcgcaggcccagcgtgaagccgtgaccgatacggccgccgccctcggttttatctctgcgattggcgcagtcggcggtttctttatccctaaagcttttggttcttctctggcgttaaccggctcgccggttggcgcaatgaaaatctttctggtgttttacatcgtttgcgtactggtgacctggctggtttatggtcgccgtaaaccggcagcaacaaaaaaataa

SEQ ID NO: 73524 - DNA, 3741 bp, Citrobacter koseri
atgagtaaactgttggatcgctttcgctattttaagcaaaaaggcgacacttttgcggacggtcacggtcaggtgatgcacaccaaccgggactgggaggacagttatcgtcagcgctggcagttcgataaaatcgtgcgctccacgcatggcgtgaactgcaccggctcctgtagctggaaaatctacgttaaaaatggtctggtgacctgggaaacgcagcagacggactacccccgaacccgcccggatctgcctaatcatgaaccgcgcggctgcccacgcggcgccagttattcctggtatctctatagcgctaaccgcctgaagtatccgctggtgcgtaaacgcctgattgaactgtggcgtgacgccctttcccgccagcctgatccggtactggcgtgggagtcgatcatgaacgatccgcaaaagtgccaaagctacaagcaggtgcgcggacgcggtgggtttattcgttctaactggaaagaacttaatcaactgatcgcggcggccaacgtctggaccgtcaaaaattatggccctgaccgtgtcgccgggttctcgccgattccggcgatgtcgatggtctcctacgccgccggaacccgttatctttcattgctcggcggaacctgcctgagtttctatgactggtactgcgatctgccgcccgcatcgccgatgacgtggggcgagcaaaccgatgtcccggaatccgcagactggtacaactccagctatatcatcgcctggggctctaacgtgccgcaaacgcgcacgccggacgcgcacttcttcacagaagtacgttacaaaggcaccaagacaattgccattacgccggactactcagaagtcgccaagctgtgcgaccagtggctggcgccgaagcaaggtactgacagcgcgctggcgatggcaatgggccacgtcatcctcaaagagtttcatctcgataaccccagcgactatttcctgaattactgtcgccgctataccgacatgccgatgctggtcatgcttgaagcgcgcgaagacggcagctatgtgccgggtcgcatgatgcgggcgtccgatctggtcgacgggctgggtgaaaccaataacccggaatggaaaaccgtcgcttataaccgcgcgggtgaactggtggtgccgaacggttccatcggctttcgctggggcgagaaaggcaagtggaatcttgagccgctggcggcaggcaacgaaacggaactgaccctctccttgctgggccagcatgatgatgtcgctggcgtggcgttcccttactttggcggtaatgagaacccgcattttcgcagtgtgaagcaagaaccggttctggtgcgccagttgccggtgaagcgtcttactctggccgatggcggcctctgcccggtcgtcagcgtctacgacctggtgctggcgaattatggtctggaccgtggtctggatgacgatcacagcgccaaagattacgcggaaattaaggcctacactcccgcctggggcgaacagattaccggcgtaccgcgtcgtcacatcgaaacgatcgccagggaatttgccgataccgcgcataaaacgcatggccgttccatgatcatcctcggtgccggtgtgaaccactggtatcacatggatatgaactatcgcgggatgattaacattctcgtgttctgcggctgcgtggggcaaagcggcggcggctgggcgcactacgtggggcaggaaaagttacgcccgcaaaccggctggctgccgctggcgtttgcgctggactggaaccgcccgccgcgtcagatgaacagcacgtcgtttttctataatcacgccagccagtggcgttatgaaaaactgaccgcgcaggaactgctgtcgccgctggctgattcctcacgctttaccggccatttaattgatttcaacgtgcgagctgaacgtatgggctggctgccctccgcgcctcagctcaatctcaacccgctcacgctgaaaagcaaagcggaacaggccggattatcccctgctgattacaccgtacaggcgctgaagtcgggagatattcgttttgcctgcgagcagccggacagcggtaaaaaccacccgcgcaacctcttcgtctggcgctcgaatttgctgggttcatccggcaaggggcatgaatacatgctcaaatacctgctgggcaccgaaagtggcattcagggagaggcgctggggtccagtgacggcgtcaaaccggaagatgtggagtggcaaacggccgccattgaaggcaagctcgacctgctggtgacgctggatttccgtatgtccagcacctgcctgttctcggatattgtgctgccgaccgccacctggtatgaaaaagacgacatgaatacctcggatatgcatccgtttattcatccgctgtctgctgctgttgacccggcgtgggaatcgaaaagcgactgggaaatctataaagggatcgccagagtgttctccgacgtctgcgtggggcatcttggcaaagaaaccgatgtggtgctgcaaccgctacagcatgactccccggcggagctggcgcagccgtttgatattctcgactggcgtaaaggcgaatgcgatctgatccccggtaaaaccgcgccgaacatcgcggtggtggaacgcgactatccggcgacgtatgagcggttcacctccctcggcccgttgatggatacgctgggcaacggcgggaaaggcatttcctggaatacggaaaacgaagtcgatttcctcggtaaactcaattacaccaaacgcgaaggcccggcgaaaggtcgcccgctgattgacaccgcgctggacgcctctgaggtcatccttgcgctggcgccggaaaccaacggtcaggtggcagtcaaagcctgggaggcgctgggcgcgattaccgggcgcgatcatactcatctggcgctgaacaaagaagacgagaaaatccgcttccgggatattcaggcccagccgcgcaaaattatctccagcccgacctggtccggtcttgaaagcgagcatgtctcttacaatgccgggtacaccaacgtccatgagctgatcccgtggcgcacgctgtccggtcgtcagcagctctatcaggatcacgcctggatgcgcgccttcggggaaagtctggtggcctaccgtccgccgattgacacccgtagcgtcagcgaaatgcgcgaaatcccgccgaacggtttcccggaaaaagcgctgaacttcctcacgccgcaccagaaatggggcattcactccacctatagcgaaaacctgctcatgctgacgctgtcgcgcggcgggccgattgtctggatcagtgaaaccgatgcccgtgagctgggcattgaggataacgactggatcgaggccttcaacgccaacggcgccctcaccgcgcgtgcggtggtcagccagcgcgtgccgccgggtatgaccatgatgtaccacgctcaggaacgcatcatgaatatcccaggttctgaagtcacagggatgcgcggcgggatccacaactccgttacgcgcgtctgcccgaaaccgacccatatgatcggcggctatgcgcagctggcttacagctttaactactacggtacggtcggctcgaaccgcgacgagttcatcatgattagaaaaatgaaaaatattaactggctggatgatgaaggtcgggatcaggtacaggaggcgaaaaaatga

SEQ ID NO: 73525 - DNA, 1545 bp, Citrobacter koseri
atgaaaatacgctcacaggtaggcatggttctcaaccttgataagtgcatcggctgccacacctgctccgtcacctgtaaaaacgtctggaccgggcgtgaaggtatggagtacgcgtggtttaacaacgttgagacaaaacccggtatcggctatccgaaaaactgggaagatcaggaggagtggcaaggcggctgggttcgcgatgtcaacggcaagataagaccgcgtctgggcggcaagatgggcgttatcaccaaaatcttcgccaacccggtgatcccgcaaatcgatgattactacgaaccgtttacctacgattatcagcatctgcatagcgcgccggagagcaaaaaccagcccaccgcccgcccgcgttcgctgattgacggcaaaaggatggacaaaattgtctgggggccaaactgggaagaattgctcggcggagaattttcaaaacgtgcccgcgatcgtaacttcgagaagatgcaaaaggagatgtacggccagttcgaaaacaccttcatgatgtatctgccgcgtctgtgcgagcactgcctgaacccaagctgtgtggcgacctgcccgagcggcgcgatttataagcgtgaagaagatggcattgtgctgatcgaccaggacaaatgtcgcggctggcgtctgtgcatcagcggttgtccgtacaaaaaaatctacttcaactggaaaagcggcaaatcagaaaaatgtattttctgttatccgcgtatcgaatccggtcagccgaccgtctgctcggaaacctgtgttggccgtattcgctatctcggcgtgttgttgtatgacgcggaccgcattgaagaagcggccagcaccgaacacgaaaccgatctctatgagcgtcagtgcgacgtgttccttgacccgaacgatccggcggtgattgaagaagcgctgaaacagggtattccgcaaaacgtgattgaggccgctcagcgttccccggtctacaaaatggcgatggactggaagctggcgctgccgttacacccggaataccgcaccctgccgatggtctggtacgtgccgccgctgtcgccaattcagtcttatgccgatgctggcggcctgccgcaaaccgaaggtgtgcttccggcgatcgaaagcctgcgtattccggtgcagtaccttgccaatatgctgagcgcaggcgataccggcccggtgctgcgcgccctgaaacggatgatggcgatgcgccactatatgcgttcgcagacggtggaaggcgttacggacacccgcgctattgaggaagtcggcttaagtgtggaacaggtggaagagatgtatcgctacttggcgatcgccaactacgaagaccgtttcgtgatcccaaccagccaccgtgaaatggcgcgtgacgccttccctgagcgtaacggctgcggcttcaccttcggcgatggctgccacggttccgacaccaaatttaacctgtttaacagcagccgcattgacgccatcaacatcaccgaagtacgcgataaggcggagggcgaataa

SEQ ID NO: 73526 - DNA, 696 bp, Citrobacter koseri
atgcagatcctcaagattattggcttgctgatggagtacccggatgagctgttgtgggagtgccgtgacgacgccatcgcgcttattcgccatgacgcgccaatgctcaccgacttcaccactgagctgttaaacgccccgctgctggataagcaggcgcagtggtgcgaagtctttgatcgcgggcgcgcgacatcgctgttgctgtttgaacacgttcatgcggaatcgcgcgatcggggccaggcgatggtcgatctgctggcccagtatgaaaaggtgggactgcaacttgactgccgcgagttacccgaccatctgccgctctatctggagtatttgagcgtgctgccggaagcagaagcgcgggagggattgcagaacatcgcgccgatcctcgcgctgctgggcgggcgtttaaaacaacgggaaacgccgtggtatcagctgtttgacgccctgctgtcgctggcgggcagtccactttccagtgacagtgtcacgcaacagatcggcggcgaggcacgtgacgatacgcgtcaggcgctggatgccgtctgggaagaggaacaggtgaagtttatcgaagataacgccaccgcctgtgacagttctccgttacaacactatcaacgacgctttagccaggacgtggcgccacagtatgtcgacgtcagcgcgggaggcccgaaatga

SEQ ID NO: 73527 - DNA, 681 bp, Citrobacter koseri
atgatacagtacctgaacgtctttttttacgacatctacccctacctctgcggcacggtgtttattctcggcagttggttgcgctatgactacgggcagtacacctggcgcgcctcgtccagccagatgctggacaaacgcggcatggtgctatggtcaaacctgttccatatcggcatcctggggatcttcttcggccatctgttcggtatgttaacgccccactggatgtacgcctggtttctgcccattgcggtgaaacagcaaatggcgatgattcttggcggagtctgcggtgtgctgacgctggtcggcggcgctggtctgctgattcggcgcctgtttaatcagcgcgtgcgcgccagctcatccacggcggatattttgatcctctgtatcctgctgatccagtgcatcctcgggctgacgacaataccgttctccgcgcaacacccggacggaagcgagatgctgaaactggtcggttgggcgcaggcggttgtgacgttccagggcggcgcttcggcgcatctggacggcgtggcgccaattttccgcgcgcatctggtgctgggaatgaccatcttcctgattttcccgttcacgcgtctggtgcatgtctggagcgcgccgtttgagtatttcactcgccgctaccagattgtccgttcacgtcgctga

SEQ ID NO: 73528 - DNA, 846 bp, Citrobacter koseri
atgacgtcttttttgaccgcctattttgcccgcataaattggtcgggcgctgccgaagctaatcttgacactttacgagcgctgcatttgcagcataacagcaccattccgtttgaaaatctggatgtcttactgccgcgcgaaattcagctcgacgatctgtcgctggaggaaaaattgctgaccgcccgtcgcggcggctattgcttcgaacaaaatgggctgtttgagcgtgctttacgggagacaggctttaccgtgcgcagcctgctggggcgcgtcgtactgacaaacccgaccagcttgccgccacgtacgcaccggctgttactggtcgaactgcaaggcgagccgtggattgcagacgtcggatttggcgggcagacattgaccgcgcccatccgtttgcaggcagaatgtgaacaacagacgccgcatggcgaataccgtttgcgacaagaggggaataactggattttgcagtttcgccatcacgatcactggcagtcgatgtattgcttcgatctgggggttcagcagcagagcgattacgtgatgggcaacttctggtcagcgcactggccgcagtcgcattttcgccatcacctgctgatgtgccgccatttaccggatggcggtaagctgacgttgaccaatttccatttcacccattatcaggaaggccatgcgatagaacagcgtaatgtgccggatgtggcgtcgctttacgcgctattgcaggagcagtttgggctgggagtcgatgatgcgaagcacgggtttaccgaggcggaattagcggccgtcatggcggcgtttgatacccacccggaggcagggaaataa

SEQ ID NO: 73529 - DNA, 570 bp, Citrobacter koseri
atgagtcgttttcgtcctgtagagctacatcatgccagccgtctgttaaatcacggcccgacggttctgatcaccagccgggacgatcgcacggagcggcggaatgttatggcggcggcgtggtctatgcccgtcgagtttgagcctccccgtcttgccattgtgctggataaaaccacctggtcgcgcgagcttatagagcgcagcggtatgtttggcatcgtgattcccggcgtagcggcaacgaactggacgtatgcggtaggcagcgtctctggccgcgaagaagataaattcaactgctatggcatcccggtgataaaaggcccggtgctcggtttacccatgatcgaagagaaatgcctcgcctggatggaatgccgactgctgcccgcaacgtcggcacaggaaaaatatgacacgctttttggcgaagtggtttcggcggcggcggatgaacgtgtttttattgaaggccgctggcagtttgatgacgataaactgaataccctgcatcatttaggcgcgggaaccttcgttacctcgggcaaaaaaattaccgcgggctga

SEQ ID NO: 73530 - DNA, 1104 bp, Citrobacter koseri
atggctcaggataacagaaaagcgaaacataccatctggaccactcgcgaggatatggtgagacgaggaatgactctcagcctgccgtggtttgcttttgtgaatatcagttttgcgctgatgatcttttttcgtgacgcgttattccacgatacccacgcgcgctatctggcagagatgcgtattgtccgcactattgatgacgccgttatcggcattatgctggtctgtgccctgctgttgattacctcccggcggcaatcctggctgacgcagggattattaatcacccttagcctgttctggtcctggtgcagttattatttcatcagccactggcaattaacgttcgcctatcctctctgtgcggtgttattactcagcgccgtgatcgcactttattttcatacgccgagcgtactcgcttttctgctcccgctatggctgaccgtccccgtcgccagcgttgttttgaatcagaaagtgaatattcatttcgcggtgatctggggcattttctcgcttattttgctgggcggccgttttatgctgattcgctggtttgatgaagcctggcgacaaaatcaacacaacaacctgcttatttcgcgcctggataaccttgcgcatcgcgacccgctcaccggtacggcaaaccggcgcgcaatggaaaaactgctgcatagcgcaacggcacagcaaaatgcgtttgcgctgatcatgctcgatgtcgatttttttaaacgctataacgacgcctacgggcacccggccggtgatgcctgcctgagtcaggtcgcggatatactcgctcagtcggtgcgcagcccggaagatgtggtcgcccgctatggcggcgaagagttcgctgttattttgtttgacgcgacgttgcaagatgcagagcgcgtggcggcgagaatacaaaaagcgctggaagcggcggcgatcccccacccggcgtcaacgataagtgacagcgtcacggtaagtcagggtatcacctgctcagtgaaaggaaaaaccgctgaacagacgatcgcggatgccgatgccgcgctgtaccgggccaaagaggccggacggaatcgttgggtgcgctga

SEQ ID NO: 73531 - DNA, 618 bp, Citrobacter koseri
atgatcaaagtttatggcgtacccggctggggctcggcaattagcgaagtcatgctgactctggcggagattccgtatcaatttatcgatgtgaaggggtttgatgccgaggggccgcagcgggatctgctccagaagctcaacccgctgtgccaggttccaacgctggcgctggaaaacggagaaatcatgacggagagcgccgccattgcgctgatgatcctcgatcgccgtcccgatctcgcgccgccggtcggacacgccgagcgtcagcagttccagcgtttgttaatctggctggtagcgaacgtttatcccacattcacgtatgctgattaccctgaacgctgggtgcaaaataccccggagcagttgaagaaaagctgccttgaataccgtaaggcgctgtatatgtggctcaacgatcggctgatagcggaaccctacgcctttggcggacagctaacgctgctggactgttatctgtgcgtgatgcgcacctgggggccgggccatgactggtttcaggacaacgccccgaacattagcgcgattgccgatgcggtctgccagcatccaccgctccagacggtgctgaaaaataacgacatcatttag

SEQ ID NO: 73532 - DNA, 1626 bp, Citrobacter koseri
atggttttatccctaccacagaatgatgggaaaaaccgtttcagcgttagccaggcaatcgtttggttagcaaaaggtgcggcacaaaaagtatctcttctgtccgacaggtcaacaggtaacacaatgaaaacacacaatacaaacgcgcttgaacaacatgccgcgaaacgacgctggttgaacgcccatgaagagggttatcacaaggcgatgggcaaccgacaggtgcaaatgattgccattggcggcgcaattggcaccggattgtttttaggggctggcgcacgactgcaaatggctggccctgccctggcgctggtttatctggtatgcggtattttctcattctttattcttcgcgcactcggcgagctggttttgcatcgcccttccagcggcagcttcgtctcctacgcccgtgaatttttaggcgagaaagcggcatacgtcgcaggctggatgtacttcatcaactgggcgatgaccgggatcgtcgatatcaccgcagtggcgctgtatatgcactactggggcgcattcggtgacgttccgcaatgggtgtttgccctgggcgcgctggcgatcgtgggcacaatgaacatgattggcgtgaagtggttcgccgagatggagttctggttcgcgctggtaaaagtgctggcgattgtcctgtttctggttgtcggcacaatctttttaggaagcggcaaaccgctggatggcaacacaacaggcttccatctgatcaccgataacggcgggttcttcccgcatggcctgttgcctgctctggtgctggttcagggcgttgtcttcgccttcgcgtcgattgagcttgttggtacggcggccggagagtgcaaagatccgcaaacgatggtgccaaaagcgatcaacagcgtgatctggcgtattggtctgttctatgtcggttccgttgtcctgttggtgttgctgctgccgtggaacgcgtatcaggctggtcagagtcccttcgtgaccttcttctcaaaactgggcgtgccttacatcggcagcattatgaacattgtggtgctgacggcggccctctccagtctgaattcaggcctgtactgcaccggccgtattttacgttcgatgtcgatgggcggttccgcgccgaaatttatggcgaaaatgagccgtcaacaggtgccgtacgccggcattctggcgacgctgggcgtgtatgtcatcggggtgttgctcaactatctggtgccttctcaggttttcgaaattgtccttaacttcgcatcgctgggtattatcgcctcctggggcttcatcgtggtgtgccagatgcgtttgcgtaaggcgattaaagaaggcaaagcggcagacgtcagctttaagttaccgggcgcgccgtttacctcctggctcaccctgctgttcctgctgagcgttctggtgctgatggcgtttgattaccctaacggcacctataccatcgcttcacttccgctgattgccattctgctggtcgctggctggtttggcgtgcgcaaccgcgtggcggaaattcaccgtaccgcgccggttgtgccgcaggaagagaataaacaggacatggtattacgagaagagacggcgagttaa

SEQ ID NO: 73533 - DNA, 1062 bp, Citrobacter koseri
atgcatttacgtcatctgttttcgccgcgcctgcgtggttctttactgttaggttcactgctggtcgcgtcttcatttagcacgcaggcggcagaagaaatgctgcgtaaagccgtcggcaagggcgcttatgaaatggcctatagccagcaggaaaatgcgctgtggctggctacttcgcaaagccgcaaaacggacaaaggcggggtggtttatcgcctcgacccggttacccttgaggtgacgcaggccatccataacgatctcaaaccgtttggcgcgaccatcaacaacgcgacgcaaacgctgtggtttggtaacaccgtaaacagcgcgctgacggcaatcgatgccaaaacaggtgatgtaaaagggcgtctggtgctggatgagcgcaagcgttccgaagatgtccgtccgctgcaaccacgcgaactggtcagcgatgatgcgactaacaccgtatatatcagcggcatcggtaaagagagcgtgatttgggtggttgacggtgaaaaaatcgccctgaaaacgaccatccagaataccggtaaaatgagcacgggtctggccattgacagtcaagcgaagcgtctttacaccactaacgcagacggcgagttcatcaccatcgatactgcggacaacaagatcctgagccgcaagacattgctggatgacgggaaagagcacttctttatcaacctgagcctcgacaccgcgggccatcgcgcttttatcaccgactccaaagcggctgaagttctggtggtggatacccgtaatggcaatgtgctggcaaaagtagccgcgccggaatcactggccgtgctgttcaacccgacccgcaacgaagcttatgtaacgcaccgccaggccggtaaagtgagcgtgattgacgcgaaaagctataaggtcgtaaaaacttacgacacgccgacattcccgaatagcctggcgctgtctgcggacgggcaaacgctgttcgtgagcgtgaagcagaaatcaacccgtgagcaggaagccactcagccagatgatgttatccgcatcgcgctgtaa

SEQ ID NO: 73534 - DNA, 2124 bp, Citrobacter koseri
atgaagatcattaccgctcgtcaggccgcatttcccgcccttttattccctttcgttttctcgccggtgagccaggcggccacggctgaagatgaacaaacgatgattgttagcgcgacgccgcaaacggtgtctgaactggacacgcccgccgccgtcaccgtggttgaaggggaagatatgcgactggcgacgccgcgtattaacctgtctgaatccttaaacggcgtgcccggtttgcaggtgcaaaaccgtcagaactatgcgcaggatttacagttgtcaattcgcggatttggctcccgctctgcatacggcattcgcggtattcgtctgtatgttgacggcatcccggccaccatgccggacggacaagggcagacgtccaatatcgatctgagcagcgtccagaatgtggaagtgctgcgcggccccttctccgcgctgtacggcaactcttccggcggcgtgatgaacgtgacgacggaaaccggacgccagccgccgacgattgaagccagcagctattacggcagtttcggtagctggcgctatggcatgaaagccacgggggcgatgggtgacggaacgcaggcgggtgacgtggattacaccgtctccacgacccgattcaccacccacggttttcgcgatcgcagcagcgcgcaaaagaatctggctaacgcaaaactgggggtgcgtctggacgatgccagtaagttaagcctgattttcaatagcgtagacattcacgcgaatgaccccggcggcctgaccgaatccgaatggaaagccaacccgcagcagtcgccacgtgccgaacagttcaacacgcgaaaaaccatcaagcagactcaggcaggcctgcgctatgagcgtcagctcagcgaacacgacgatctgagcgtgatgatgtatgccggtgaacgtgaaaccacacaataccagtccataccgatggcgccgcagcgggataaccccgcgcatgcaggcggcgtaatcgtgcttcagcgtcattatcagggtatcgacacccgctggacgcaccggggcgagctgggcgtacctgtgacgttcaccaccggcctgaactatgaaaatatgagcgaaaatcgcaagggttacgagaactaccgcctgaataacggcgtgccgcagtttggcgtgaaaggcgatttgcgtcgtaatgagcgcaacctgatgtggaacgccgatccctacctgcaaacgcagtggcaactgaccgaaaaactttcgcttgatgccggcgtgcggtacagctcagtctggtttgactctaacgatcattacgttacgcctggaaacagaaatgacagcggcgaggccagctaccatcaatggctccctgccggggcgctcaagtatgcgttcaccgatgcgtggaacgtttatctggccgcagggcgcggttttgaaacgccgaccatcaatgaactctcctatcgcccggacggacaaagcggcctgaacttcggcctgaaacccgccaccaatgacacggtggaaattggcagtaaaacgcgtattggcgatggtttactgacggcggcgctcttccagacggatacggatgatgaaattgtcgtcgctaccagcggcggtgggcgcaccacatataaaaacgccggtaaaacccgccgtcagggcgcggaattatcatgggatcagcgtttcgccggtaactggcgggtaaacgcctcctggacctggctggatgcgacctaccgcagcaacgtctgcaaaagtggcgattgcaacggtaaccgcatgccgggcattgcgcgtaatatggggttcgcctcgctgggatatgtaccggatgaaggctggtatgccggcaccgatgcccgctatatgggggacatcatggcagacgatcaaaacacggcaaaagcgccctcgtataccgtggttggtctgaacaccgggtataagtttaactacagcaacttaacggtcgatgtgtttggccgggtcgataacctgtttgataaagagtatgtcggttcggtgatcgtcaacgaatcaaacggacgctattacgaaccggcgccggggagaaactacggcgttggcgtcaatctggcatggcgttttgagtaa

SEQ ID NO: 73535 - DNA, 1062 bp, Citrobacter koseri
atgccacaagcagaggagaacatcatgggccaacaagcataccgtaatcgtcgttgggttctggcttcgcgtccgcatggcgcgccggttgagagcaacttccgcatggaagaggacgacgtggcgacgcccggtgaagggcaagtgctgttacgtacaattttcctgtccctcgatccctacatgcgcggaagaatgagcgacgaaccgtcctactcaccgccagtggagatcgacggcgtgatggttggcggaacggtcagccgggtcgtggagtccagtcaccctgattaccatccgggagaatgggtattaagttacagcggctggcaggattatgatatttccgacgggaaagggctggtgaaactcggtgacaaccctgagcatccgtcatgggcgctgggcgtgctggggatgccgggctttaccgcctatatgggactgctggatatcggccagcccaaagcaggggaaacgctggtcgttgcggccgccaccgggccggtcggcgcaaccgtcgggcaaatcggcaaactgaagggctgtcatgtggtgggtgtcgcaggcggcgcagaaaaatgccgctacgcgaccgagattctcggttttgacatatgcctcgatcaccacgcggcggattttgcggaacaactggcgaaagcctgcccgcagggaattgatgtgtattatgaaaatgtcggcggtaaggtgtttgatgcggttctgccgctgttgaatacttcggcacgtatcccgttgtgtggtctggtgagcgggtataacgccacaaaactccccgacggacctgatcggctgccactattaatggcgacgctgttaaaaaaacgcatccgcctgcaagggtttattattggtcaggactacgggcaccggattcatgagtttcagcaggagatggggcgctgggtcaaggaagggaagatccactaccgcgaacagatcaccgacggactggaaaaagcgccgggggcgtttatcggtctgctgaccgggaagaacttcggcaaggtcgtgattcgcctggcggatgatgcctga

SEQ ID NO: 73536 - DNA, 576 bp, Citrobacter koseri
atgaatactatcgaagacagcataaatcaacggatcagtgcaagaattcgcattgagcgtgaatcgcggggctggtcgctgacggagcttgccgagcgggcaggcgtatcgcgcgccatgatccacaaaatcgaacgcggagagagcagcccgacggccacgctgctggggcggctttccggggcgtttggcatcagcatgtcgacgctgatcgcgcgtgcagaaatgcaggagggcaagctgctgcgttttgccgatcaacccgtctggcacgacccgcagacgcactacctgcgccgccacgtctcaccgcgcagcgacctgcccatcgatctcgtacaaatctcgcttccagcggggagtgacgtaccgatgcctgcggcatcctacgcgctggcaagacagcttatctggttacagcagggtgaactggtctttgtcgaaggcggggttcgccatgagatgaaagcgggcgactgcctggagctggggccgccaaacgactgccgttttatcaatgagacgcaggaaacatgcgtttacctggttgtgcgcttaaaccacgcgggtaattaa

SEQ ID NO: 73537 - DNA, 519 bp, Citrobacter koseri
atgtctattcgatttgctggcaaagaagactgcgccgccatcgccgaaatctacaatcacgcggtattgcacacggcggcaatctggaacgatcaaacggtcgatgtggataaccgcatcgcatggtttgatgcgcgtcagctatcaggctatccggttctggtcagtgaagagaatggcgtcgtcaccgggtacgcctcctttggcgactggcgtaactttgatggtttccgccatacggtcgaacattccgtatatgtccacccggatcatcaggggaaaggcctcggacgggcgcttctcagccgtctgatcgaggaagcgcgcgcatgcggcaagcatgtgatggtcgccggaatcgagtcgcaaaatcaggcatcgctgcatctgcacgaaacgctggggttccgcattaccgcccaaatgccacaggttggcaccaaattcggccgctggctggatctgacgtttatgcagcttcagcttgacgatcgccgcgacccggatgcgcgcggatga

SEQ ID NO: 73538 - DNA, 450 bp, Citrobacter koseri
atgaaccagacgctgaccctcgcctttctgattgccgccggtattgggctggttgtgcaaaacacgcttatggtgcgcatcacacagaactcgtcaacgattctcatcgctatgctgctgaactcgctggtcgggattgtcctgtttgtcagcattttgtggtttaaacaaggcacggcggggtttagcgagctggtttccagcgtgcgctggtggacgttgattcccggcttgctcggatcgttttttgttttcgccagtattagcgggtatcagtacgttggcgcggcgacgactatcgcggttctggttgccagccagcttattggcggcctggtattggacattttgagaagtcatggcgtgccgttacgtgcgctggcaggcccggtttgcggcgcggtgttgttggtgatcggcgcgtggctggtcgccagacgccagttttaa

SEQ ID NO: 73539 - DNA, 234 bp, Citrobacter koseri
atgtcgcacctggaagaggtcactgcgcgcgtagatgccgctatcaaagagagcgtcattacccatatgaacgaactgctgatcgcgctgagcgatgacgccgaactgagccgggaagatcgttacacccagcaacagcggctacggacggcgattgcgcatcacggtcgtcagtacaaggaagatatggaagcgcgtcgcgaacagcttaccaaaggcggtagcattctctga

SEQ ID NO: 73540 - DNA, 1599 bp, Citrobacter koseri
atgtctacagggaaaacgttgctcgcgctggcgctcagcgcacttttaccggcaggggcggcatttgcggccaataccgataccatcatctactgttctgaagcctcacccgaatcgtttaacccgcaaatcgccagttccggcccgtcattcgtggccagttcgcaggtgctgtacaaccgactgatcaatttcgatccggtaaaaaatacgccggtgccgtcgctggcgaccgactggacgatttccccggacgggaaaacatacacgtttacgttgcgtcagggcgtgaagttcaacagcaataaattctttaaaccgacgcgcgattttaatgccgatgacgttattttctcggtgctgcgccagaaggatgcagatcatccgtaccataatgtgtcgcagggcagctacgaatacttcaatgatgtcggcctcgataagttgattaaagaggtgaaaaaggtcgacgattatcacgtccagtttgtgctgaacgaacccaatgcggcattcctcgctgactggggcatggatttcgcctccattctctccgcagagtatgccgatgcgatgctgaaaaaaggcacaccggaaaacgtcgataactggcctgtcggcactggcccttacgtactgcaacactacaagcaggattcacagattcgctacctggcgaacccaaactactgggatggcgaagtgccgaccagacatcttattttctcgattacgcctaacgcccagacgcgcctggcaaaactacaaaccaacgagtgccagattattccggcgccatcccccgtacagtttgacgagattaaaaagaataacgcgttaacgctgcattcggtcgatgcgctgaacgtcggctatctggcctttaataccgagaaaaaaccgtttaataacgtactggtgcgccaggcgttaaattacgccactgataaaaaagccattatcaacgcggtgttcctcggttccggtacggtggcgaaatcgcccatcccgccaaatatgatgggctttaataacaacctgaaggattacgactacgatccgcaaaaagccaaagatttgctgaagcaggcggggctggagaaggggttcgaggcaacgctctggtcgatgccggtgcaacgcccttataaccccaattcccggcgcattgcggagatgatccagagcgactgggcaaaagtcggcgtgacggcgaaaatcgtctcttacgaatggggagagtatctgtccgggatgcgtaaaggcgagcacgataccgcgctgttcggctggatgtctgacaatggcgatccagataactttgccgatgtgctgctgggctgcaacagcataaaaaccggctcaaatgccgcgcgctggtgcgataaagggtatgatgatctcgtccagaaagcgaaacgggtgagcaagccggaagaacgtgcgcagctctaccagcaggcgcaggacattttctatcagcaagcgccgtggatcgcgctggcaaacggcaaaacgttctacgccacacgcagcaacgtaaccggatacagcgtaagcctgatgggcagtgatttttcaaaagctaaattgaattga

SEQ ID NO: 73541 - DNA, 1332 bp, Citrobacter koseri
gtggcaaaaactctcttacgtagcggcaatctggacgactatcaggccgtgggcggcggcggtcaggccgtatttgattccgcattgcaaattcgtgaaacgcttcgtctgcgtaaacagcaggcaatggtggattgtctggcgatcccgcaaattaatgacagcggcgatcgcgtcgactggtattccccggtcgagggaaaagccatcgcatggaaggccgcagaggaagaagcgcgatttcgggcgctgcgctacctgaacagcacgctggaaaacgcggcggcgctgagccgcaaaagtctgcaatccgggaaaacttcgttgcagctgttcggttccctgctggaaaaagcggttcagttccctggggaaaaccacgtttttctggttgatggcaaaccggtcatcaccttctgggggtttgtgaatcttaatgaaaacacccgtgaggacgtgcttgactgcctgcgcgccattgatgttccgcccgtcctgccgcctgccgctgaacccgagcaggaggtggaagatgagccgttgccagaggtgacgtttgcccgttccgatgagcccttactgacgccggtgatgattgaacgcccccaggaacccgaacctgaaccggtcgcccctgttgttgtcagcgaaccgcaggcgccttcgccatctccaaccgctcccgtgaagccctcttcgcgtctgccgctatggagcctgccggttgccgccgtgattgtcgccgccgttgcggcgccgctgttatggaaaccgtctgcccccgccgccgaaaccacgacggtcagtacgccggttgtcgccgcgaaagtggacagtaaaccgttgccgaagatgattgcccaactgccgctgcatcaggcggaagtgattccgccggtgaaaaaagcgaagcccgcagatgaaccggtagtgatcgccgccatccccaaagatgcgctggtgatggatgccggtcagatgaaagcaggagtcacgcgctttttgaatggaaactggcgcgtactgattgacgttaaagatccggtcagcggaaaagcgccttcgctgcgttaccagatccagaacaacaaaggcaccgcccgggtggtacacggcgacaacatcgtctgccgggcggacattttctccggcctgcatcagaccggagagctgatgatcaagagtcgtggtcacgcacgttgcaccgatggttcgcgctacccgatgccggaaatcacctgtaaagccagcacgaatgacgttgcggcttgctcagcgcgttatgacgcccatgcggaagtcccgttgacgatcaaaaagataggtgcctga

SEQ ID NO: 73542 - DNA, 2982 bp, Citrobacter koseri
atgttggtgaatctgtgtgattacaaacaaagcgtaacgctcatcgcaaacagcggcgtacaattcctcgacttcggcctgacgccgcaggagtctgcccatcttggtcgtttcgtgcgtaaaacggcgaatggccccctgctccggctcgactttgatctgaccaacgggcgctatacggtaccggggcgcacgggggggcaacctgaagtggtcaaaccggaaagcacccagatgttgcactattcgctggatgtgctggatggcgtctggttgccgctccctttcctgcgctttaaccctccccgtacgtttgtggaaggccccgacaactgggcgcgcgtacaggtgcgtaagctgcctgaacccgacagcgcgggtcatacgcaccgcattaccgtggcgctggacagccagttaagcgagaacgcgccggcggcgctggcgcctaacgaaaacgacctgctcaatggcacacggttcgcgctggcctggcgcgatgatgaaattgccgattttcttgaccagacgtggattgacggctggctgcgcgaatccttccttcatcacgtcacccaggaggagaaccgctctgagcaggagattcagcaggcgctgcgtaactttgagtaccaggcgcactggttgaatctgatgacgttactgggggaacagctttccgtgccggaagtgaagctggtcacccacacgctcagcacgcctgcgattccggtggatctgattctggacgtcggcaatacccatacctgcggcatattgattgaagatcacggcgacgccaatgacggtttgcgccagacggcggaattacaggtacgctccttaagtgagccgcaatgtcttaacgatccgctgttcaccagccgactggagttctccgaagcgcgtttcggcaaacagcatttttcggttgaaagcggccgcgacgacgcctttatctggccatcgattgtgcgcgtgggcgacgaagcccgcaaactggctatgcagcgtctgggaacggaaggcagcagcgggatctccagcccgcgtcgttatttgtgggacgaaaccccggttttacaggactggcgcttcagccagatgaacagcaaaacgcagcgagaaccgctcgccaccgccttcccgctgatgaatctgatgaatgacgacggacaaccgttattcagcctgccgcccgatgaccggttgccggtcttttcgccgcagtacagccgcagcacgctgatgacgcacatgctgtgcgaaattctgtcgcaggcgctggggcaaatgaacagcgtggcgacgcggttacgcctcggttttccggcgtcgccgcgtcagttgcgcacgctgattctgaccctgccatcggcaatgccgaaacaggaacgcgaaattttccgccagcgtatgttcgaagctatcgcactggtatggaaagcgatgggctggcatccgcaggatgaggatttttcctcccgtaaacagcaggaaaagagcgttgttccggtgccgaacattcagatggaatgggacgaagccagctgcggacagctggtatggctgtataacgaagcgatttcccattacgccgggcgcacggagacattcttcaacgccctggctcgcccggaccgcttgccggaaccgggcgaaaccaaaggtcgggcgctacgcgtggcgtctatcgacatcggcggcggcacgacggatatggcggtcgtccactaccagcttgatgacggcgtcggcgcgaacgtcaagatcaccccgcacttactgttccgtgaagggtttaaagtcgcgggcgatgacatgctgctggacgtcatccagaaatgcatattgcctgcgctgcaaacccgcttgcagcaggccggcgtgacggatgccgccgccctgctggcaacgctgtttggagattcaggccgcattgatacgcaggcgattttgcgtcaacaaacggcgctacagctgtttatgccgctggggcacgccgtactggccgcctgggaacagagcgatgttaacgatccgctggcgggtctacacgcgaccttcggcgaactgctgactcaacgccctacgcgcaacgtgatgaattacatccagcaggcgatcgaccatgcgctgccttcaggctcaccggcgttcgatctgctgagcgtaccgttgcaggtgcagttcagccacttacaggaagcactactggccggtcagtttaccctgacctcgccgctgcatgccgtttgcgaagcgatttctcattaccgctgcgacattctgctggtgacgggcagaccaacctgcctgcccggcgtgcaggcgctgatccgccatttacagccggttcccgttaaccgcatcgtctggatggacaagtatcgcgtccatgaatggtatcccttcagccagcaggggcggattggcaacccgaaatcaaccgccgccgtgggggcgatgctgtgcagcctggcgctggatttacggctaccgcgctttaactttaaagccgccgatatcggcgcctattccaccgtacgctatctcggcgttctggataacacggtcaataccttgcgcgatgaaaacgtctggtatcaggagatcgatctcgataaacccggcgcgaagctggatacccgtctgcacttcccgcttcgcggcaacgtgacgctcggtttccgccaactggcgaacagccgctggcctgcgaccccactctataccctgagcattaactcagcagagctggcgaaaaccatcgccggtgatggcgttctcaatgtccgactgcaactgcgcggcgggaacaaagagacggggccggaatcgtttgtgctgggtgacgcctggctacaggatggaacgcccgtcgccgcgaatgccctgaccttaaaactgaataccctggccgaccgtcgtcatagcggcagccactactggatcgacagcgggagtgtgtacctgaaatga

SEQ ID NO: 73543 - DNA, 2163 bp, Citrobacter koseri
atgagcaagacgttaaacaccacacaggccgccattgcgtgggttaaccatacacgtcagcacgcagtacgcctggatgatgaagcggacgccctgctggcgcagctcacactcgccgccgccggtgaatcggcgctgaatgccgcgcaacaggcaagaggcagcatcggtctgtatggccattcacaatcctcaaaagcgcatctgcttggcgcgctgtgcggtaacggcgagggaaaactgaacatcgccacgccggatcgctgctttgactattttacccatatcaacccaggccatgcgccagccaatatggcgatccgttttacgcaggatgaaagcgcggcggttgatagcgaatggccgctgcgtctgcggctcatcagtgaagctgaactggtacagctgtttatcacctgggccagcgcttcgcccgataaccggcaggtcgaaaaatccattattgagacgcggttagaaaagtggcaggcgctgcgtcagcgtcagccggttcagggcgtgaccgcagaggacgtcgccgccattgctcgtttctggcgcacctgcgttcctgtcgggcaacagcaaatcgacgatgcgctctggcatcagttcgcctccctgctgccctcggtggatctgacgacccgcgccagcgcctgggcattactctggggcgaacagcctgaattaacgcaacagtggctaacgctggcgcgtacgctgcaacagaccggccatgcgcaggagttagcggcgccgttgagtctgctggtcgatcatttcggccttccggcagaaagttttctgacccagggcgcgttatccggcaacgacgcgcagagcgacgtcgttgtacatcctgttgagcaccatcagttactcaatgcggtgagcctctctctggattcactggctttgctgacgcgtgaactggtgcttagcgttgaaaacacggcgctggataatgtcgatctgctggatattccgctggcgccggatgcgcacccgcatccactctggcgggcaaaactcggctggatgctggaacattatcgccaacatttgcagcccgatgtgctggtcatttgcaatgccacctccgcccgatcgcagacgcccgctgccgcccgcacgctgctgggctgggtgaacgatacacaaccgctgcgcgacgccgcgctaccgggcgtggtctgggccattacgccgcaggatgcgcgtttcacaacgcagcagaatcttgatgaagccgtgcagcagttaatggggaaacccggccttcactggggcacgcttcaggcgctggataaacacagcttgcagcgtctggtggaatggctgtcacaggcgacggcgccgttacagcgccaggcgcggctggcctccctgtgtgagcagcatcaacaacggcttcatgacctgctgttgagccatatcaccccaaaagacagcggcagtaaggcgacggaatccgttattcgccagcttcaggggcaggccgcccggcatggcgagttgctcgacgggcttctgccgccgatacaccattttgagtcgcttttgcgtatccagcagccgcgcgaggagcaggtcagcggcctgtttaatgaagcgatcgatctgtttgcggatgagccagacgctccccgcccggcagaaaacaaagagacagggtatctggcccacaaaatgtggattaaccatgtgcgccagtggagccgaaatgagagcaacgcccgtcgtttaggtctggagtcgcatacgctcaggctggtcgtggatattctgattaccgccagctatcggcttaatgtgcctcagcagttacagcagattatgcagcgtgaagaggtttgcggcgcgcagctgcatgccgggatcggtaactttatcgcctggcttggctacgaaaatgtggcggaggacgcccgacccgccagccggttccagaaaggatcggcgatcttcagcgcgcctcgcctgcaaccgatggcccggctcacccaactggatgaacagcctgtacatgccgccagtcgctatgtgtatgactggctggtcgcgctctatacccgggcaaatgaaaataaggggtatcagcatccgcaggatgtgtccgacgccgacaaaaaacggctgatggcgctgctcaatgcctga

SEQ ID NO: 73544 - DNA, 174 bp, Citrobacter koseri
atgtcgctctaccaaaaaatgttggttttttacgcagtgatggcggcgattgcctgcctgattacctggtttctttcccacgataaaaaacgtatccgctttctgagcgccattctcgtgggcgcaacctggccgatgagtctgcccgtcgcattgttattttcgctgttttga

SEQ ID NO: 73545 - DNA, 1425 bp, Citrobacter koseri
atgccacatcaattactgattaacggcgagctggtcagcggtgaaggtgaaaaacagcccgtctacaacccggcgacgggcgaggtgattctggagattgcagaggcgtcgcccgcacaggtagatgccgccgttcgcgccgcagaccgggcattcgcggaatgggggcaaaccacgccaaaagtcagagcggagctactgctaacgctggcggacgtgattgaggaaaatgcgcagacattcgccgaactggagtcgcaaaactgcgggaagccgctgcattgcgcgctcaatgatgagatcccggcgattatcgatgtatttcgcttctttgccggcgccgcacgctgtctgaacggcctggcggcgggggagtatctggaagggcatacctcgatgatccgccgcgatccggttggggtcgtcgcctcgatcgcgccgtggaactatccgctgatgatggcggcctggaaactggcgccagcgctggcggcgggtaactgtgtggtgataaaaccgtctgaaatcacgccgctgacggcattgaagctggcggagtttgcgaaggatattttcccgccaggcgtgcttaacgtgctgttcgggcggggcaagacggttggcgatccgctcaccgggcatgaaaaagtacggatggtctccctgaccggctcgattgcgacgggcgagcacattattcaacataccgcgccctccattaagcgcacgcacatggaattaggcggtaaggctccggtgattgtctttgatgatgccgatctggatgccgttgtcgaaggtgtgcgaacgttcggtttctacaatgccgggcaggattgtacggcggcctgtcgtatctatgcgcaaaaagggatctatgacgcactggttgaaaaactcggcgcggcggtcgccagcctgaaaaccggttcgccaaacgacgaatcgactgagcttgggccgctcagctcgcaggcgcaccttgagcgagtgacaaaagcggtggaagaggcgaaagcgctcggacatatcaacgtggtgaccggcggccagaaactggacggcgcaggatactattttgcgccaacgctgctggccggcgcaaaacaggaggacgccatcgtgcagcgagaagtgttcggcccggttgtcagcatgacggtgtttgatgatgaagagcaggtgctggcgtgggcaaatgatactcagtacgggctggcatcatccgtctggacgaaagatgtgggtcgggcgcatcgcctgagcgcacgattgcagtatggctgcacctgggttaatacgcatttcatgctggtgagcgagatgccgcacggtgggcaaaaacgctcaggctacggcaaggatatgtcactttatgggctggaagactatacggttatccgccacataatggttaaacattaa

SEQ ID NO: 73546 - DNA, 1410 bp, Citrobacter koseri
atgaagaaatatcagcgactggcggaacaaatttgcgatcaaatcgcctccggcgtgtggcagcctggcgatcgattaccctccctgcgtgagcaggtggtcagcagcggcatgagttttatgaccgtaggacatgcgtatcagttgctggaaagccaggggcgcattattgcgcgtccgcagtcgggttattacgtggcggcgcgcccggtgcgtcaacctgcgatgccgcccgtgcaggtaatgcgcgatgaagccgttgatattaatacctatattttcgaaatgttgcaggccagccgggatgcgtcggtgatgccgttcgcctctgcctttccagacccgcgtctgtttccgttgcagcagcttaaccgttccctggcgcaggtcagtaaaaccgccacggccatgagcgtgattgagaacctgccgccggggaacagcgagctgcgccatgccatcgcccgacgctatgcgcagcagggaattaccgtctctcctgatgaaatcgtcattaccgccggggcgctggaagccctgaacctcagccttcaggcggttaccgaaccgggcgactgggttattgtggagaatccctgcttttatggcgcgttacaggcgctggagcgactccgcctgaaagcgctttctgtcgccacggatgtaaaagaggggatcgatttagcggcgctggaacaggcattacaggagtatccggtgaaggcgtgctggctgatgaccaatagccaaaacccgctcggcttcacccttagcccggagaaaaaagcgcggctggtcgcgttactggatcagtacaacgtcgtgctgattgaggatgacgtgtacagcgagctctattttggccgcgacaaaccgctgcctgccaaagcctgggatcgccacgacaaaatattgcattgttcgtcattctcgaaatgtctggttcccggttttcgtatcggttgggttgcagcgggaaagtacgccagacaaattcagcggctacagctgatgagtacgctatccaccagttcaccaatgcagcttgctctggtcgattacctttcgacacgccgctatgacgcgcatttgcgtcgtctgcgccgccagttggcggagcgaaaacagcaggcctggcaaacgctgctgcgtcatctgcccgctgaggtgaagattcaccacaatgacagcggctattttctctggctggaactgcccgaatctcttgatgccggggaactcagtgcgcaggctctggcgcatcagatcagtatcgcccccggtaaaatgttttcgacctctgatacctggtcgcattttttccggtttaataccgcatgggggtggggagaaagagaggagcaggcggtatctcaactggggaaacttattcgcgatatgctgaaataa

SEQ ID NO: 73547 - DNA, 438 bp, Citrobacter koseri
atgagagcgttaccagaaactatgcgttatcccgtcaatctcattcccgcagaagaagggggttatgttgtgtcgttcccggacattccagaggcgttaacacaaggtgacacccgccatgaatctctcgaagccgcgcagggcgcattagtcaccgcctttgaattttattttgaagataaccagccaattcctttaccttcaatggttgatgaagctgatgattatgtggagattcctcttagcattgcgtctaaagtccttttgttaaatgcgttccttgaatcaaaaatcacgcagcaggagctggcgaggcgcattggcagacccaagcaggaaattacccgactattcgacttaaaacacgcaacgaaaatcgatgctgtacagattgcggccagagcattgggtaaagagttatcgctgactatgctttag

SEQ ID NO: 73548 - DNA, 1962 bp, Citrobacter koseri
atgcgccagcaacctcatcaccttgaactgttaagtccggcacgcgataccgccattgctcgtgaagcgatcttacatggcgccgatgctgtttacatcggtgggccgggcttcggcgcgcggcataatgccagtaacagcctgaaagatatcgcggaactggtgccttttgcgcatcgctatggcgcgaagatctttgtgacgttaaacaccattctgcatgatgatgagcttgagcccgcgcaacggctgattaccgatctgtaccagaccggcgtcgatgcgctgattgtgcaggatatgggcatcctggaactggacattccccccattgaactgcatgccagtacgcagtgtgatatccgcagcgttgaaaaggcgaaattccttgccgacgtcggtttcacccagattgtgctggcgcgcgaactgagtctgagccagatccaggcgattcatcaggccaccgacgccactattgagtttttcatccacggcgcgctgtgcgtggcttattccgggcagtgctatatctctcatgcgcagaccggtcgcagcgctaaccgtggcgactgctcccaggcctgtcgcctgccgtacaccttaaaagacgatcaggggcgggtggtctcgtacgaaaaacacctgttatcgatgaaagataatgaccagacggccaatctgggcgcgttgatcgatgccggcgtgcgttccttcaaaattgaagggcgctacaaagacatgagctatgtgaagaacatcacggcgcactatcgccagatgctggatgcgattatcgaggagcgtggcgacctggcgcgggcttccgccggtcgtactgagcacttttttattccttctacggataaaaccttccatcgcggcagtaccgactattttgttaacgcccgtaaaggggatatcggcgcgttcgattcgccaaaatttatcggtttaccggtaggcgaagtcgtcaaagtggcaaaagatcacctggacgttgaggtgacggaaccgttatccaacggcgatggcctgaatgtgctgatcaaacgtgaagtggtggggtttcgcgccaatacggtggaaaagacgggacagaaccgttatcgcgtctggccgaatgaaatgccgcccgacctgcataaagtgcgcccgcatcatccgctgaaccgtaatctcgaccacaactggcagcaggcgttaaccaaaacctccagcgaacgccgggtggcggtggatatcgcgttaggcggctggcaggaacagctaattctgacgctgaccagcgaagagggcgtgagcgtcacccatacgctggagggacagtttgacgaggcgaacaacgccgaaaaagcgttgaacaacctgaaagaaggcgtggcgaagctgggacagacgatgtactacgcacgtagcgttgaggtgaatctccccggcgcactgttcgtgccgaacagtttactcaaccagttccgtcgcgaagcggcagaaatgctggatgcggcgcgtctggcgaactatcaacgcggcagccgtaagccggtggcgcaaccagccccggtttacccggaaacgcatttgagcttcctggctaacgtctacaatcacaaagcgcgcgcgttttatcatcgctacggcgttcaactgatcgacgcggcgtatgaggcgcaccaggagaagggcgatgtgccggtgatgatcaccaaacattgtttgcgctttgcctttaacctgtgcccgaaacaggcgaaagggaatatcaaaagctggaaagcaacgccgatgcaactggtacacggcgacgaagtattgacgctgaagtttgattgccgtccgtgcgaaatgcacgttatcggcaagatcaaaaatcatattctgaaaatgcccttgcccggcagcgttgtcgcctccgtaagcccggaagatctgatgaaaacgctgccaaaacgtaaaagctaa

SEQ ID NO: 73549 - DNA, 537 bp, Citrobacter koseri
atggacaacctgacccattatctggcgacgacgctgaaggcgctgcgccaacagcgagaatggagtctgtcgcgtctggcggaagcgacaggggtttcaaaagcaatgctcggccagatagagcgcaacgaatccagcccaacggtatcgacattatggaagattgccaccggtttgaatgtcccgttttcaacgtttatctccccgccggaagcggaggatctcccgaccttcgacccgcagcagcaggcaatggtgatcacgccgctgtttccgtgggacccgcagctccgttttgaccatttttcaatattgatggccccgggcgcgcttagcgaatcgacgccgcatgaggcaggcgtcatcgaacatgtggtggtgattcagggaacgctggatatgtgtattgccggggagtggcgcacgctcaaatccggcgaaggcgtgcgttttgcgggcgatgccgcccatgcgtatcgcaatagcagcgaccagacggttcactttcactccttgatccattacccacatagttag

SEQ ID NO: 73550 - DNA, 309 bp, Citrobacter koseri
atgcggtcattttcacttcctctgccaaccgtgttgtctggttttgttgcggtcctggtcggctatgcaagctcagcggcaatcatctggcaagccgcgattgccgccggcgcatcaaccggacaaattgccggatggatgacggcgcttggcatcgcgatgggcgtcagtacgctggcgttaaccctatggtatcgtgctccggtgctgacggcatggtcaacgcccggcgccgcgttactggttaccggcttgcagggtctcacgcttgcggaggccatcggcgtattattgtcgcgaatgcgttaa

SEQ ID NO: 73551 - DNA, 819 bp, Citrobacter koseri
atgcaggtgattccgcattctcttgctgccgcgatgctggccggtattttattgcgttttggtttgcaggcgttcggtcatctggatggcgagctgtttctgtgcggcagtatgctgctggcgtggttagcgctgaaagtgctggtgccgcgctatgcgattatcgccgcaatggttgtcggtattctggttgcgggcatgaaaggtgacattgtcacgcatggcataaccctctccccggtgctaccggcgtttatcgcgccccacttttcgcttgctcatagcctcggcgtcgccattccactgtttctggtgacaatggcgtcacaaaacgcgcccggtatcgccacgatgaaagcctccggttactcccttccggtttcgccgctgatcgtgtttacagggctgctggcgctggttttatctccttttggcgtctactccatatgcattgccgctattaccgccgccatttgccagagtcccgaagcgcacccggacgccgggcgtcgctggctggctgcggctgtcgcaggcgggttctatctgctggcgggattgttcggcggttccgtcaccgctctgatggccgccctgcccgtaagctggattcagatgctggccgggctggcgctgctgggaacaatcagcggcagtctgtaccaggcattgcttaatgaaacggagcgtgatgccgctatcgtgacctttctcgtcaccgcaagcgggctgacgctgctgggcattggctctgcgttttggggactggtagttggaggcgtctgctacggggtgctatcgtttgctcgccgcgcgtaa

SEQ ID NO: 73552 - DNA, 876 bp, Citrobacter koseri
atgtctcagtcttatgatgcctttgaaaatttacgcaaacataatgccgtgctgcatgactcggttgcgttgcattcgggtgtccagctggcggcatggtcaaataaacgtgacaacattacgcaatattgcgatcaccatactctcagcctgtatgtcgctgacggctacgagagctaccacaaaacgccgggcggctggaagaatggcggggggccggatcgcttctgtctgatgccaaaagagagtgagtccgtctgggacattcgcgacgacctgtcgtttgtccatctctactgtacagatgcccatctgcgggatgttggggaaaaggtctgggataaaagcccgtacagctttaccctggatgagcgcacctttggcaacgatccgggaataacggcggtttatcgccagttcctgctgggaaatgactggcagcaaccggcgaatcatatgacgctcagcgccgcctcgtcactgctgttgacgcatctggtgcagcattacagtaacgtgcagtggcgtcttccgacggttactggcgggttagcgcccgccacgctgcgcaatgtgctggcgtacattgaagcgcatcttgctgagccgctgacgctaagcgatctggcgcgcgaggcggcattgagcgaatttcatttcgccagaatgtttcgccagtcgatgaacatggcgccacaccagtacgtgatgcagcggcgtatggcgctggcgcagcaatgggtctgtcattcaacccgttcgctgtcagagatcgcgatggcctgcggattcagttcagcgagccatttcagcaatcgctttaagcaggtgaccggtaagacgccgtcgcagttacgcgcggcgagcaaacgatag

SEQ ID NO: 73553 - DNA, 909 bp, Citrobacter koseri
atgaacgcattattatactgtctggtggttgtcatttggggaaccacctggattgcgatttatctgcaacaaggcccggtatcggcgcccgtgtccattttctggcggtttgccgtcgccagcgcgttaatgatgctcatcctgctggcgagcgggaaattacgtaaattatccgggcgcgaccacctgttttgcctgttacaaggcggatgcgtcttctgttttaacttctggtgtttttatagcgccgccgcctggatcaatacggggctggagtccgtcattttctcaatggccgtactgttcaatgcggttaacagctttgtgttcttcggacataaaccgccgctacgcttttattacgctgccggtctgggattaacgggcattatcacgttgttctggcaggatctggccaacagcggctggaaccactcgctgttactggggattggtctgagcgcgctgggaacgtttggcttctctttgggaaatatgatcagcatgcgccatcagagaaaaggtctggaagtcatgaccaccaacagctgggcgatgctgtacggcacgctgctgatcgccgccattgcctgtatacgcggcgataacttcacgccgcaatggacgttgagctacctcggcgccctgctgtatctggcaatattcggttccgttatcgcgtttggcgcgtattttactctggtgggacgcatcggccctggcaacgcggcctacagtacgctgctgtttcctctggtggcgctgacaatatccacactctatgaaggttacgtctggcaaatgaatgccgttgttggattagtgctgattctggttggcaatctggtgatgttcacgcgtccagaggcgttaatgagtaaattaatttaccgtcgccgggcggcataa

SEQ ID NO: 73554 - DNA, 669 bp, Citrobacter koseri
atgcgtactcatactttatttaaagttgcagtgctttctggcttattggctttatctggctgtgcgtcaaaaatcactcagccggataaatattctgggttcttaaaagattattcagggctgaaagaaacaacctccgcaacgggaaaaccggtgctccgttgggttgactccagctttgatgagtctaaatatgacagcatcgtctggaacccgataacctactatccggtgccaaaacccacgacgcaggtcgggcagcaggttctggataaattacgaagctataccgatacccaactgaaaacggccattgagaaacgtaaacctctggtaacgaccccagggccgcgtagcctgattttccgcggcgcgataaccggcgttgataccagcaaagaggggctgcaattctatgaggtggtgccggtcgccctggtggttgcgggtacgcagatggcgacaggccatcgcacaatggatacgcatctttactttgaaggcgagctgattgatgccgccaccaataaaccggtggtgaaagtggttcgtcagggcgagggtaaagacctgagcaacgaaaatacgccgatggcgtttgaaacgttgaaagaagtgattgatgacatggcgactgatgccaccatgtttgatgtcggtaaaaaataa

SEQ ID NO: 73555 - DNA, 159 bp, Citrobacter koseri
atggactataaatggtatcgccagcacaaattcaacacggcgagttgcaggccgtatcaggcctgcaacgctatcgtaaaattgcgttatgcgcttttacgcgccagcagcgtcgcaaaacgcagtttgatgcggttgccgttggcgtccgtgcggtga

SEQ ID NO: 73556 - DNA, 597 bp, Citrobacter koseri
atgacccttcgtgacgaaaattactttactgaaaaatacgatttaacccgtacgcactccgacgtcgttgaggcggcaaaggtggtcgcgccaggtaaaacgttggatctgggctgcggaaatggccgtaatagcctctatctggcggcgaacggctatgacgttaccgcctgggataagaatccgatgagcatcgccaacgttgagcgcatcaaagcggcggaagggctggaaaacctgcaagcaaaagtggttgaccttaacgcgttaagcttcgaaggcgactacgattttattctctcaacggtcgtgatgatgttcctggaagcgaaaaccattccggggctgattgccaatatgcagcgctgcaccaaaccgggcgggcataacctgattgtggcggcaatggatacggaagatttcccctgcaccgtgggtttcccgtttgcgtttaaagaaggggaactgcgccgttactacgaaggctgggaattgctgaaatacaacgaggatgtgggtgaacttcaccgcacggacgccaacggcaaccgcatcaaactgcgttttgcgacgctgctggcgcgtaaaagcgcataa

SEQ ID NO: 73557 - DNA, 1002 bp, Citrobacter koseri
atgagtaagaacaagcagagcgaccgggtgctcaatcttccggctggctattttgggatggtattgggcaccattggcatgggcttcgcgtggcgctatgccagtcatatctggcccgtcagtcactggattggcgatggcctggtgatcctggcaatgatcatctggagcttgctgacgcttgcctttcttaaccgtctgctgcgttttccacagagcgtactggcggaggtacggcatccggtaaagagcagttttgtcagcctttttcctgcgaccacgatgctggtggcgattggttttgtcccctggtgtcgtgggttagccgtgggattgttcagcattggcgtcgtggtgcaactggcttatgccgcatggcaaacggcgggactctggcgcggttcgcatcctgaagaggcgacaacgccggggctgtatctgccgacggtagcgaacaactttattagcgcgatggcttgcggcgcgttgggttacaacgacgccgggctggtctttttaggggctggcgtattctcatggctgagtctggaacccgttattttgcaacgtttgcgcagttccggtgaattaccggcggtactgcgcacatcgctgggcattcagttggctccggcgttagtggcctgtagcgcctggctgagcgtcaacggcggagaaggcgatacgctggcgaaaatgctgtttggctatggcttgctgcaactgcttttcatgctgcgcctgatgccgtggtatctgtcgcagccgtttaatgcctctttctggagcttctcgttcggcgtttcagcgctggcgacgacagggctgcatttagggcacgccagcgcgtcgggattttttcatacgctggcgattccgttgtttatttttaccaattttatcatagcgttattgctcgtacgcacgtttgcgctgctgatgcaggggaaacttctcgtgcgcacagaacgcgccgcattactgaaatctgaggataactaa

SEQ ID NO: 73558 - DNA, 981 bp, Citrobacter koseri
atgagcaaatatcacctgagtgaagaatcgcgtgcctttagttatcaggataacggccacaagaaaagcgtcctgctgcgccagatcattgcccttaccgactttaacgacgtcaaagccggaaccgctggcggctgggtagacgacgaaagcgtgctggcgcaagaaggacactgctggatttacgacgagaatgccctcgcattcgccggggcgatgatttcaggcaacgcccgcatcacccaggcctgcatcatcagagatcgcgcgcaaatcagtgataacgtctggattgatctggccgagatcagtcacggcgcccggataagcaacaacgtcaccgtgcagaattcgctcgttcgcggtgaatgtcatctgtctggcgacgctcgtattctgcaccattcggagattatcgccgcaaaaggcctaacccaggaaagcgacctgacgctgcaaatctacgatcgcgccaccgtcagcagctcgcgcattgtgcatcaggcacaaatctacggcgatgcgatagtcacccaggcgtttattgaacaccgcgcggaagtgtttgatttcgcgatcgtcgaaggtaatgaagagaataacgtctggctttgcgactgtgccaaagtgtacggtcacgcccgcgttattgcgggaacggaggaagatgccatccccacgctgcgttacagtgctcaggtggcggaacacgcgacggttgaaggtaactgcgtattgaaacatcacgttctggtcggtggtcatgccgaactacgcggcggccctgtcctgcttgacgatcatatcctgatcgaaggccatgcccgcattctgggggacgtgctgattgagcatcatgtggaaatcaccgatcgggcgacgatcgaaacctttgatggcgacagcatccacttgcgtggcccaaaagtggttaacggtgaacagcatattacacgaacaccgttggcagggttactctga

SEQ ID NO: 73559 - DNA, 546 bp, Citrobacter koseri
atggctgaagtcatcacgatcagcgaaacactggaactgcgagcggtggaagagtgccatgttacgccgttacatcaactggtgcttaaaaacaaagactggctacaggcatcgctaaactggccgcagtttgtcgccagcgaagacgatacgcgcaaaaatgtgcagggtaatatgatgttgcaccagcgtggctacgccaaaatgttccttatctttcaggaagaggaggtggtgggcgtcatctcgtttaatctgatagaaccgttgaataaaaccgcctatatcggttactggctggatgaatctcaccagcggcagggcattatgtcacgcgcgcttcaggcgtttatcggtcattatgccgggcgcggcgagcttcgacgctttgtgattaaatgtcgggttgcgaacccggcgagcaaccaggtggcgcgccgcaatggttttgaactggaaggatgcctgaaacaagcggagtttctcaacggggagtatcacgacgtcaacctgtacgcccgcattatcgagaacgcctcagagtaa

SEQ ID NO: 73560 - DNA, 225 bp, Citrobacter koseri
atgtttccagaatacagagatctgatttcacgactgaaaaccgagaatcctcgctttctttccttgttcgaaaaacacaacacccttgatcatgagattgcccggctggaaggttctgacggcaggggatacagtttggatattgttcgtctgaaaaaagagaaactccatctgaaggaggatctgctcagaatattgcagaaagaaagtttgaatgagagctga

SEQ ID NO: 73561 - DNA, 1620 bp, Citrobacter koseri
atggccgccgtgtgcggtacgagcagtattgcttcactcttttcccgcgccgctttcgcggcagagtctgatattgcagatggtcaaaccgtccgttttgacttttccgttctgcaatcaatggcgaacgatttagcgcaaaagccgtggggcggcgaaccccgggcgttacctaatacgctggcgaatctgacgccgcaggcctacaacagcattcagtacgatgcggcgcactctctgtggaacaacatcgaaggccgcaagctggatgtgcaatttttccacgtaggaatgggctttcgtcgtcgcgtgcgtatgttctcgcttgatgccagcacacatcaggcgcgcgaaattcatttccgcccggaactgttcaaatacaacgatgccggtgtcgatacccgtcaactggaagggcaaaccgaccttggcttcgcgggctttcgcgcctttaaagcgcctgaactggcgcgtcgcgacatcgtctccttcctgggggcaagctacttccgcgcggtggatgacacttatcagtacgggctgtccgcgcgaggcctggcgatagacacctataccgacagcaaagaagagttcccggacttcaccgcattctggtttgagacggcgaaaccgggcgacaccacgtttaccgtgtacgcgctgctggatagcccaagcgtcactggcgcctataaatttgtgatccactgtgaagagagtcaggtgatcatggatgtggaaaaccacatttatgcgcgtaaagacatcaagcagctgggtatcgcgccaatgaccagcatgttcagctgcggcaacaatgaacgccggatgtgcgacaccattcatccgcaaattcacgattctgaccgcctggcaatgtggctgggcaatggcgaatggatctgccgtccgctgaataacccgcagaaattgcagttcaacgcctatctcgacaataacccgaaagggttcggcctgctgcaacttgaccgtgacttttcccactatcaggacatcatgggctggtataacaaacgcccaagcctgtgggtggagccgcgtaacaaatgggggaaagggtctatcggcctgatggaaatcccgacgaccggtgaaacgctcgataacgtggtgtgcttctggcagccggaaaaagcgatcaaagcgggcgatgatctggcattcaaataccgtctttactggagcgcgcaaccgccggttcgctcgccgttggcgcgcgtgatggcgacccgtaccggtatgggtggtttccccgaagggtgggcgccgggtgaacactacccggaaaaatgggcgcgccgctttgccattgattttgtcggcggcgatctgaaagccgctgcgccgaaggggatcgaacctgtcattacgctgtctaacggcgaagcgaaacagattgagatcctctacgtcgaaccgttcgatggttatcgcatccagtttgactggtatccgacgtcagattcgaccgacccggtggatatgcgtatgttcctgcgctgccagggggacgccattagcgaaacctggctgtatcagtatttcccgccggcgccggataagcgtcgctacgttgatgaccgcgtgatgcgttaa

SEQ ID NO: 73562 - DNA, 1509 bp, Citrobacter koseri
atgttgaatccctccatcccgcttgtcgaaacgaaacagggaaatgtcatgggtgtcgtgcaaaacgacatccacatctggcgcggtataccgtatgccgcgccgcctacgggtcagctccgctggcgggcgccacagcctgtcgcaccctggcagggcgaacgccctgcgaatacattttcatgcgccagctggcaggatattgaatattgtcgcgagcttggcgggggcgatccggggcgtttttccgaggattgcttgtatctgaacatctgggcgcccgcgatgcgcccgcagccgttgccagttatggtctggctgcatggcggcggctacaccatcggcgcgggaggattaccgccttacgacggttgtgcgctggcgaagcgcgatgtcgtggtagtcacgctcaattatcgtcttggtcacctgggattttttgctcatccggcccttgatggcgaggacggcgaatgcgtgcataacttcgccttgctcgatcagatcgcggcgctacgctgggtgcaggacaatattgccgctttcggcggcgatgcgcagaatgtgacgctgttcggcgagtccgctggcgcgcgtagcgtcctgtcgttgatggcgtccccacggacaaagggcctgttccataaagccattattcagagtggttatacgttaccggatacgccgcgcgaggtcgcgctgcaaaagggtatcgaactggcggcgcattttaatttgccggacgccactgctgaacagttgcgggcgctaccggcggaggcattctggccgctgggcgcgccgttgaaaatcgcgccgacgccgatttccggcgatgcggtattgccacagccgatgatggagaccttctttgccggaaagcagcacccaatgccggttctgattggctccaacagcgacgaagcgagcgtgatggcggtgtttggcgttgatctcgccgggcagatcgcgaaattgcggcgcgaacgccgactggggttagggctgatcaaactgctctatcccggcgtgaaaggcgatgaagaactggggcgtcaggtctgccgcgatatggcgttcaccacgttgggttatgtggtgatgcaggcgcagcagcgggtaggcgaaccgtgctggcgatactggtttgactatgtcgcggaaactgaacacacaacctacgccaacggcgcctggcacggaaatgaagtgccgtatgtctttgatacgctgacgctggcggaacccgcgcgcaattacgtgaatgacaacgatctggcgtttgcccggcatatcgccgattactgggttaatttcgcccgtcacgccagccggacctgcgatgttctgcatggtccggtgcgctggcccgccagcgttcaagggcgggatcgcttgttacgcatcggactgaataaatttgccggttttaaagtagagaaccgctttatgggcgcgcggatggcgctgttcaaacgggtgatgaaacatcacgtcagtctggaataa

SEQ ID NO: 73563 - DNA, 1344 bp, Citrobacter koseri
atggcgaacaccatcgcggctgatgagattcgggaacacttttcgcaggcaatgtcagcaatgtaccagcaggaagttccacagtacggtacattgctggaacttgtcgctgatgtgaatctgacggtactggaaaataatcccacgctgcatgaaaagctggccaacgcggatgagctggcgcggctgaacgttgaacggcatggcgcgattcgggtgggtacggcgcaggagctttccaccttgcgccgaatgtttgcgattatggggatgtatcccgtcagttattacgacctttctcaggcgggcgttcccgttcattccaccgcctttcgccccattgacgatgcgtcgctttcccgcaacccgtttcgcgtcttcacctcgctattacggctggagttaattgagaacgcgacgctgcgccaacgcgcggcggatattctggcgaagcgcgatatctttacgccgcgctgtcgcgaacttctggacgtctttgatgcgcagggcaattttaccggggcgcaggcgcgggagtttgtgcaggaggcgctggagactttccgctggcaccggcacgccacggtggacagggaaacgtatcaggcattacataatgaacaccgtctgattgctgacgtggtgtgttttccggggtgccacattaaccacctgacgccgcgcacgctggatatcgacaaagtgcagttgatgatgccggaatgcggtatcgaacccaagatcctgattgaagggccgccgcgccgtgaggtgccgattctgttacgccagaccagtttcaaggcgctggaagagtcggtgctgtttgccggtgaaacggagggcagccatacggcacgttttggtgagattgaacagcgcggcgtggcgctgacgcctgaaggacggcggttgtacgatgcgttactgcataaggcggggacgggcaaagataatcttacgcatcagctgcatttgcaggcggtctttaacgctttcccggacagcgaatttttactgcgccagcaggggctcgcctggtttcgctaccggttaacgcctgccggtgaatcgcaccgccagtctattcatccgggcgacgacccacagccgctgattgaacgcggttgggtggtggcacaacccattacctatgaagattttctgccggtaagcgcggccggaatattccagtctaacctgggtaacgaaacccaggcgcgcagccacggcaatgccagccgcgacgcctttgagcaggcgttggggtgcccggtatatgatgagtttgcgctttatcaggcggcggaagaacgcagtaaacggcgttgcggactgctctga

SEQ ID NO: 73564 - DNA, 903 bp, Citrobacter koseri
atgatatatgtaattggtcacctcaatcctgatagcgatgctatctgtacagccatgatgacggcgcgctggctaacgttacgcgggcaggaggcagtggcgttccgcacgggggaagccaaccgtgagacgcagtttatttttgcgcaggcggggttgcccattcctgaacgattaagcgttccgctcaccgatcgggacgtctggctggttgattttaccgaaccagcccaggggccggattctttagcgcagagtaacgttgttggcattattgaccatcaccgcttaggcgggttgatcacccgactgccgccggaagtgtgggtaaaacctgttggcagtagcgcgacattactgtggcaactgatgacggatgccattcgaaaacagctttcacccgcagaagcgacgttattactgggcgccgttctgagtgacactgtcacgcttcgttcgccgacaacgaccccggatgaccgccttgcggtggaatcgctcagccagctcgccggtttgtctcttgaacgctttagccgcgatcttctgtacgcgaaaaccagcgtggaagggatgagcgccagccagcttcttcagaaggacatgaaaacctttactgtccacgggcagcgggtttgcgtggcgcagcttgagctgtatgcgctggagcaggttgatgcgatgatggacgacctgcgtgaggaaatggcgcgctatgctgccggggcagatgcggcgctggttgttctgatgctcacggatatcaatctcggttattcccgcctctggtttgccggagatgcccagccggacgtcccgcacccctgcgaggtggaagggatgctgagccgtaagaaacagatgctcccctggctggaacatcacctgaatcagcacaggtga

SEQ ID NO: 73565 - DNA, 924 bp, Citrobacter koseri
atggaaaaaaatagcttgtttagtcagcgcatccgtttgcgccatcttcatacttttgtagctgtcgcccaacaaggaacactggggcgcgcggctgaaacccttaacctgagtcaacctgcactctctaaaacgcttaacgagctggagcaactgaccggaacccgcctttttgagcgcggtcgcctcggcgcgcagttaacgctgcccggcgaacagttcctcacccatgcggtaaaagtgcttgatgcgcttaataccgctggccaggcgttgaatcgcaaagaaagcctcaataatgatgtggtgcgcattggcgcattgcccaccgccgcattgggtatccttccggccgttattggtcagttccataagcagcaaaaagagacgacgttacaggtcgccaccatgaataacccgatgctgctcgctggcttaaaaacgggggaaatcgatctcggtattggccggatgtccgacccggaattgatgagcggtctgaattacgagttgctgtttctggagtcgctgaagctggttgtgcgccctaatcacccgctgttacaggaaaccgtcaccttaagccgtgtgatggaatggccagtggtcgtgtcgcccaaaggcaccgctccccggcagaatgcggaaggtctgctacaaagtcagggctgcaaaatgcccgttggctgcatcgaaacgctgtcggcctcgctgtctcgccagcttaccgttgattatgactacgtctggtttgtcccttcaggcgcggtgaaagaagatctgcgccaggctacgctggtatcactgccgattcccaccctgggcgctggcgaaccgattggcatcctcacccgtgtggacacgccgctttctcccggcgcgcaggcgctgatcgccgctatccgcaaatccatgccgcactga

SEQ ID NO: 73566 - DNA, 1689 bp, Citrobacter koseri
atggacaacatatcaacgatgcaagcaccgcataagctgggttttctgcatcatattcggctggttccgctgttttcctccattctcggtggcatccttcttctgtttgcactcagttccgggctggcggggtactttctgctacaggcagatcgtgaccagcgggatgtgacggacgaaattcaggtgcggatgggcttatccaacagttctaaccatctgcgtaccgcgcgtatcaatatgatccatgcaggcgcggcgagccgcattgctgaaatggacgacatgaaagccaatatcgctgaggcggagaagcggattaagcagtcgcaggaaggctttaacgtctttatggcgcgggcggtaaaaacaccagctgacgaagcgctggatgcggagctgaatacccgcttcaaagcctatatcgatggcctgcaacctatgttgaaatacgccagaaacggcatgttcgaggcgattatcaaccatgaaaacgaacaggccagaccgctcgataccgcgtataacaccgtattgctcaaggcgattgagctacgcacggcgcgcgcgaatcagcttagcgaccaggcgcatcagcgcagccaactgggattgatgttcatgattggggcgttcgcgctggcgctggcgcttacgctactgacgtttatcgcgctccgccggacggtaatcaaccctctgcaacgtgctgcgcagcgtattgaacagattgccgcaggcgatctcaccatgccggatgatccaaccggacgcagtgaaatcggtcgcttaagccgccatctccagaagatgcagtcctctctggggcaaacggtgggaacggtacgccagggggcggaagagatttatcgcggcaccagtgagatttccgccggtaataccgatttgtcatcgcgtacggaagaacaggccgcagcaattgaacagaccgcagccagcatggaagaactcacggccacggtgaaacagaatgcggacaacgcgcaccatgccagcaaactggcggaagacgcctccggcaaagccagtcacggcggtcagatggtgtctggcgtcgtgaaaacaatgggcaacatctccaatagttcgaagaaaatttccgagatcacggccgtcatcaacagcatcgctttccagaccaatatcctggcgcttaacgcggcggtcgaagcggcgcgagcgggtgaacaagggcgcggcttcgccgtggtcgccagtgaagtgcgcacgctggcaagccgcagtgcgcaggcggcgaaagaaattgaagggctgatcagcgaatcggtcagactgattgaccagggttccggggaagtcgtcgcagcaggcaacaccatgaatgatattgtcgatgccgtgcgacgcgtaacggacattatgctggagatcgccgcagcctctgatgagcaaagtcgtgggattgtgcaggtgagccaggcgatttccgagatggataaggtcacgcagcaaaacgcctcgctggtcgaagaggcctctgccgccgccgcatctctggaagagcaggctgctcgcttaaccgaagcggtcggggcgtttcgtttgcaggggggaagtgcgattaaacgcgcgccgtctgtggacgtcgtcgccagttcatcaccgcaaccggtaacaaccagcggtgataactgggaaacgttttaa

SEQ ID NO: 73567 - DNA, 1119 bp, Citrobacter koseri
atgaaatcacgtgcagcagttgcatttggccccggccagccgttaaagattgttgaaattgacgtcgcgccgccgcaaaaaggcgaagtgctggtcaaaattacccataccggcgtttgccatacggatgcgtttacgctctccggcgacgacccggaaggcgtgttcccggcggtgctgggtcacgaaggcggtggcgtggtggttgacgttggcgaaggcgtcaccagtctgaagcctggcgatcatgttattccgctgtacaccgcagaatgcggcgagtgtaagttctgtaaatccggcaaaaccaacctgtgtcaggcggtgcgcgccacgcagggtaaagggctgatgccggatggcaccacccgtttttcttacaacggcgaacctgtctatcactatatgggcaccagcacattcagtgaatataccgtttgtgctgaaatttctctggcgaaagtcaatccgcaggcgccgctggataaagtctgtctgctggggtgcggcgtcaccacagggattggcgcggtacacaacacggcaaaagtaaaagaaggggatagcgttgcggtctttggcctgggcggtatcggcctggcggtgattcagggagcggtgcaggcgaaagccgggcgtattctggcggttgacaccaacccggagaaattcaaactggcggaagaaatgggcgcgaccgatttcattaacccgaatgactatgacaaacccatccaggatgtgattgttgagctgaccgatggcggcgtcgatttcagttttgaatgtatcggtaacgtcaatgtgatgcgcgcagcgctggaatgctgccacaaaggctggggcgagagcatcatcatcggcgtggctggcgcaggccaggaaattaaaacccgtccgttccagcttgttaccgggcgcgtctggcgcggttccgcttttggcggtgtgaaagggcgtagccaactgccaggcatggtggaagaggcgatggcggggaaaattcgtctggacccgttcattacccatcgcttgccgcttgatcaaatcaacgatgcctttgatttaatgcatcagggcaagtccattcgcaccgttatccatttcggtgataactga

SEQ ID NO: 73568 - DNA, 276 bp, Citrobacter koseri
atgccgcattcacctgaagataaaaaacgtattctcactcgggttcgccgtatccgcgggcaggttgacgcgctggaacgggcgctggagtcaggggaaccttgtctggcgatcctgcaacagattgccgccgttcgcggcgcatctaacgggctaatgggagagatggttgagattcacctgaaagatgaactggtcagcggcgacaccacgccggatcaacgcgccgtgcgcatggctgaaatcggccaccttctgcgcgcttatctaaaataa

SEQ ID NO: 73569 - DNA, 531 bp, Citrobacter koseri
atgagcaataagtacacaagcctgcaaattggcatccactggctggtctttttactggttattgtgacctactgtgcgatggagttgaggggatttgcgccccgcagctatcgtccgtggatcaatatggttcatgtctcgtgcgggatgacaatcctggtgttgatggtgacgcgcctgctggtcagactgaaatacccggcgccgcccattgtgccaaaaccaaagccgatggtgaccggaatggcgcatcttgggcatctggtgatctatctgctgtttattgtcttgccgattattggcctggtgatgatgtataaccggggcaattcctgggttgcgttcggcctggtgatgccgcatgcgtcagacgctaattttgaggtggtggatatgctgaaaacctggcatatcacgctggcgaaactggggtattttgtcattggtttgcatgccgccgcggcgctgatgcatcactatgtctggaaagacaatacgctgttgcgcatgatgccgcgcaaacgttcctga

SEQ ID NO: 73570 - DNA, 1002 bp, Citrobacter koseri
atgagtaaaattggcattaacggctttggtcgtatcggtcgtctggtgttacgtcgtctgctggaagtgaaaagcgacattgatgtcgtcgccatcaatgacctgacctcccctaaaatcctcgcgtatctgttgaaatatgactcaaactacggcgtattcccctggagtgtggatttcaccgaagacgcgctgattgtggacggcaaaaaaattgcggtttacgcagaaaaagaggctaaaaatattccgtggaaaaccaccggcgccgggatcattgtcgagtgcaccggcttctatacctcagccgagaagtccaaagcgcacctcgacgctggcgctaaaaaagtgctgatttccgccccggctggcgatatgaaaaccattgtcttcaacgtgaatgacgacacgctggatgccagcgaccagattgtttctgtcgcatcctgcaccactaactgcctggcgccgatggcgaaagcgctgaatgacaactttggcattcaggttggcaccatgaccacaattcacgcctacaccggaacccagtcgctggtcgacgggccgcgcgggaaggatctgcgcgcttcgcgggcggcggcggaaaacatcatcccccacaccaccggcgcggcgaaagccattggtctggtgattcctgaactgagcggaaaacttaaaggccatgctcagcgcgttccggtgaaaaccggctctgtaaccgagctggtctcgattctggagaaaaaagtcactgcggaagagatcaacgcggcgctgaagaaagcgacaacccataatccgtcgtttggctataccgatgaagagatcgtctcttccgatatcatcggctcacatttcggttcggtgttcgatgccacgcaaactgaaatcagcacagtgggcgatctgcaactggtgaaaaccgtcgcctggtacgataacgagtacggttttgtaacccagctcattcgcacgctggataaattcgccaaactctga

SEQ ID NO: 73571 - DNA, 927 bp, Citrobacter koseri
atggacgtattcagccgcgaaaccttagaagaaatgatggcgcaagccgtctcccgctcagccacatttaccctctggcctgatggcgaagcccccggagcgaaaaacagcgatgctgtttttacgccagaaccgcggcataccggtacatccatcttcgatcgcgccgtcacgggcgtccgatctcctgaaatcaccgtttacgcgccagataaacccaacggcgtggggcttctcgtgacgcctggcggttcctaccggcgcgtcgtactggacaaagaaggcagcgcgctggcgcccttttttaatgcgcgtggttataccctgttcgtgatgacctaccggatgcccggagatggccatgctgagggggcaaacgcgccgctggcggatgtgcagcgcgcgatgcgctatcttcgcgccaatgcgcaagcgtggaagatcgacccggaacgcatcggggtgctgggtttttctgccggtgcgcatgtcgccgccagtctggggacgcgttttgctgaccccgccagtccccccatcgacagcctggatgaaatcaacgcccgccctgcttttatggcgctggtctatccggtcatcaccatgcgtgacgacattcatcatcccggctcacgccttgagctgatgggtgcggaacctgacgatgaacagattcgccactactcgcttgaggaacgcgtggatgccgctacgccgcccacatttctgctgcatgccatcgacgatccggcggtaaaggtggaaaacagcctggtattttttaacgcgctgcgccgttctggcgtagcggtggaaatgcatctgtttgagcgaggaaaacacgggtttggcattcgtgatacgcagggattgccggtcgcggtctggccggaactgatgatgaactggattgcgaccaaagtgtga

SEQ ID NO: 73572 - DNA, 1440 bp, Citrobacter koseri
atgtccgcacccgtacaacacccgatgtatatcaatggtcaatttgttagctggcagggagacgcatggattgatgtagtgaatcccgccaccgaagaactgctctcccgtattcctgatggcggcgcgcaagaggcgcgtcaggccattgacgccgctgcgcgcgctcagccggaatgggaggcgctgcctgcgattgaacgcgcggggtggctgagaaagatcgcggcagggattcgtgagcgggcagaagagatcagcgcgctgattgtcgcggaaggcggaaaaatccagcagctggcgcaggtggaagtcgcgttcaccgccgactacatcgaatatatggccgagtgggcgcgccgttatgaaggcgagatcctgcaaagcgaccgccccggagaaaatattctggtctttaaacgcgcgctgggcgtcaccaccgggattctgccgtggaactttccgttctttttgattgcccggaagctcgctccggcgttgttgaccgggaataccatcgtcattaaacccagcgaatttacgccaaacaatgccattgctttcgcgcagatcgtgcatgacatcggcttaccgaaaggcgtattcaacctggtgctgggacgcggtgaaacggttgggcaggagctggcggggaacccgaaagtcgcgatggtgagcatgaccggcagcgtggtcgccggcgagaaaattatggcggcggcagcgaaaaacatcactaaagtttgcctggaattgggcgggaaagccccggcaatcgtgatggacgatgcggatcttgagctggccgtgaaagcgattgtggattccagagtgatcaacaccgggcaggtctgtaactgtgctgagcgcgtttatgtgcaaaaagggatttacgatcgctttgtgaatcgtctgggcgaggcgatgaaagcggttcagtttggcgatccggcacagcgtgatgacatcgcaatggggccgctgattaacgctgccgcgctggagcgggtagagcagaaagtggcgcgcgccgtacaggagggcgctcgcgtggcgttgggcggcaaggccgtggagggcaaaggttattattatccaccgacgctgctgctggacgttcgccaggagatgaccatcatgcatgaggagacatttggccccgtgctgccggttgtggcgtttgatacgctggaagaggcgctggagatggcgaacgacagcgattacggtctgacatcgtctgtatatacgcaaaacctgaatgttgcgatgaaggcgatcggcgggctgaaattcggcgagacctacatcaatcgcgaaaactttgaggcgatgcagggattccatgctggctggcgcaagtcaggtattggcggggcagatggcaaacacggtctgaacgagtatctgcaaacgcaggtggtctatttgcagtcctga

SEQ ID NO: 73573 - DNA, 801 bp, Citrobacter koseri
atgagaatgagaccgtttccggcattatccagtgcaacgctggaagcagcgaatacgctggggcattggctggcccaaaatgacttctctggtgacgcgccgtatcaggctgactgcgttgtgctggcggggaatgccgtcatcccggcgatagacgccgcctgtaacatagcgaaagcgcagcagatcccgctgttgatcagcggcggtatcggccattccaccacgtttctctatgccgccatcgccgggcacccgcgctacaacaccatacgcaccaccgggcgtacggaagccaaaattcttgcggatatcgctcatcagttctggcagatcccgacggagaaaatttggccagaagacaaatcaacaaactgcggtgagaacgcgcagtttagctgcgccctgattggtcaggtatcggcgcccattaacaccgctattatcgtacaggacccgacaatgcaacgccggacgatggcgacgttccgccgcgtcacctgcgacgatcccgattcgccccgctggttgagctatccgggtattgtcccgacgctgtgccagcacgatgacggcgtggattttgccggagaacagaaggggttgtggtccgtggatcgctatctctccctgattgcgggagagcttccgcgcttacgggatgatgaaaccggctacgggccgcgtggccgcgactttattgtgcacgttgatattcccgctgacgttgaggcggcgtggcagacgctgcaaaatgacgctgacctgattgagaccatgaacagtcgttcgttgcgttaa

SEQ ID NO: 73574 - DNA, 1653 bp, Citrobacter koseri
atgcgcctgccccaacgcgatccttatgctcctcgcgagtggcagcctcacgaaaagcccgcgctgttaggctcaccttcgactcccattcacagcacgccgaaacgcatcgcctacggcgtggtcggcctgctggtgtgtctgaccggcgcactcgggaacgcggtcgtgaccgcgaatctgcaaaatttacagggcacctttgccgcctggtcgacggagatcgcctggctgcctgccgtttatgtcatgaccaatgtctcaattaacctgctgctggtgaaatttcgccagcagtttggtctgcgggcatttaccgaaggttttctggtgctgtatgtgctggtcaccttttttcacctcttcgtcaacgatctgagttccgcgctaatggtacgcgcggcgcacggtatggtcgccgccgcgctcagttcgctgggtatttattatcagatacaggcctggcctgcgaaacaccgtctgaaagcgttaacgatcggtattaccgggtcgtcgctggctattcccctcgcccggttgttctctaccgaactgctgcaactggatgagtggcgcggcctgtacttctttgagctgggactggcgctggtttcgctgggctgcgtcatcgccttaaaactgcctcccggcgacagacgtaaggtttttgaaaagaaagactttattacttttattctgctcgcgcccggcatggcgctggtctgtgccgtgctgtcgctggggcgactggactggtggtttgaagcgccctggattggctggtctctggcgctggcgacggtactcatcatcagcgcaattgtgttcgagcataaccgcagcaatccgctgttgaatacgcgctggctctccagcggcagtattctccgcctggggctgattatgttgctgatccgcattgtgctggcggagcaaaacaccggcgtaattggctggctgcaatacgctggcttacagaatgagcaaatgacgcatctggcctggtcaattttcgctggcattgtgtgcggcatcatcaccagttgcctgacgattaaaccgacgcggctggcctggcccgtgattacgtcgctggcattgatgatcgtcgcctcgctgctcgacagccactccacaaacctgacgcgccccgaccagttaatggtcagccaattcttactcggctttggcagcgcgttcttccttgccccggcaatgctggcgggtatcggcggcgtcatcgccgatccgcgcaatctggtcagtttttccgtcttatttgggatgagtcagaacatcggcggtttgctgggctccgccattctcggcactttccagacctggcgtgaaaaatatcactccagcctgctggccgatcagctcaccacgctaaatccgctggtgaatgagcgtctacagatgtacagccagatgtacaaaagcctgattggcgacagcgcattgctgaacacccaggcgatcgcccagctacaaaccgttacgtcgcttgaggcaaatatcctcgcctataacgatacttatttactgacggccagcattgccgccgctacgctaatctggattttatggcgcttgctgcgactgcgtattaccgcccggatggcgctgaaaaaagccaccggaaccaagtaa

SEQ ID NO: 73575 - DNA, 1083 bp, Citrobacter koseri
atgagtcagcaggatgccgccaaagagcaggcaaatacccgaaacaatctccgtgtggtgtcaatttttgccgctgccgccattggcctcgtcggggttctggtgatcctctacgcctggcaattaccgccgtttacccgccatacgcaatttacggataacgcctatgtgcgtggacaaaccacctttattagcccgcaggtgaatggatatatcacgcaggtgaatgtgcaggactttgtgcaggtgaaaaaaggcgaactgctgatgcagatcgacgaccgtatttatcgccagcgtgtccatcaggccgaagcgcagctggccatgaaaatcgccgcgttaaataacaacctgcaacagcgtaaaagcgccgaagccgtgattgcgcgcaatgaagcggtactgaagaacgccaaagcgcaaagtctgaagactcaggcagatttgaaacgcgtgaaagatctcaccgccgacggttcactgtcgattcgtgaacgcgatgcggcgctggccagcgccgcgcaaggcagcgcggatatcgaccaggcgaaagccacgctggagatgtcacgacaggatttacaaacggtgatcgtcaaccggggagcactggaagccgacgttgaaaatgcccgcgcagcgttagagctggcgcagatcgatctgcaaaatacccgcattgtcgcgccgcgcgatggccagcttgggcagattgccgtccgcctcggcgcgtatgtcaccgccggaacgcacctcaccacgctggtgccgccgcagcactgggttatcgccaatattaaagagacgcaactggcggagctgcgcgtgggtcagccggtacggtttaccgtcgatgcgctgaatgatcgggcttatgaaggccgggtggagagcatttctccggcaaccggcgtggagttcagcgccattacgccggataacgcgaccggcaactttgtcaaaatcgcccagcgcattccggttcgggtggaggtgctgggtaaaccggaggagattgcgcgattgcgtccgggcatgtcggtgcaggtacatatcgatacccgggaggcgaaacaatga

SEQ ID NO: 73576 - DNA, 1377 bp, Citrobacter koseri
atgacgcgccgtcccgttgccgctttgctgttcgtcctgctgctcagtggctgtcagtcggttgatgtggcacccgcaaaaccgtctttgcaaatccccgccgcctggcgaaccgccaccggccccgccagcgcaacagaacaggtatggtggagaaattttcacgacagtcatctgaatcgttatgtcgatcaggcactgcaaaataacagtgacgtgctgattgcccgcgaacgggtaaatgaataccaggccagggtctatgccgccgaaggcagcctgttcccttcgctggatgcgggcgttagcggagcgcgggcgcgaacgcagtctgcggcaaccggacttccgatctacagtacgttgtataagggcagcctgacggcaagctacgatgtcgatatctggggcgttaatcgcagcaccgccagtgcagcgcaggcctcgctggcggcgcaaaaagcggcggcggccgccgccgatctgaccgttgcctcgtccgttgcgtccggttatgtcacgctgctggcgctggatgagcagctcaacgtgacaaaatcgacgctgaaatcgcgtgaagaagcctggaatctggcaaaacggcaatatgaaacaggctacagctcgcgcctggaattgatgcagtcggattctgagcttcgctcgacgcgcgcgcaaattcccctgcttgagcaccagatcgcacaacaggaaaacgcgctgagtcttctgctgggcagcaatccgacgcgcctggcccgtagcgaccgttttgatgcgctgacgcccttaacgttgccgtcacagttgccctcttcgttgctcaaccgccgtcctgatgttgtgcaggctgaaagacagcttattgcgaccgatgcgacgcttgccgcctcccgcgccagcctgctgccgtcgatcaacctgacggcgaccggatcggtacaggatcgcacgctccccggtctgcttgacgacccgctccgcttatggagtatcggcggcagcattctcgcccctctgcttaaccgtcaggcattgaatgcgcaggttgatatttctcagtcccagcgtaatcaggcgctgtacagttatgaaaaaaccgtgcgtaacgccttcagagaggtaaacgatagcctcgacgccatcacccgctatcaggaacaactcagtgaattacaggcgcagcaggatgtggcgcaggaaacattgcgcatcgcccagaatcgctatcgcaatggctattcgtcttatctggatgtactggacgcccagcgcacgctgttctcagtgcaaaccaatgtggtgcaggtgaaaaacaatctgctgctggcacagattgatctctacaaagcgctgggcggcggctggtcagtctga

SEQ ID NO: 73577 - DNA, 639 bp, Citrobacter koseri
ttgattaatctgacattgctgagtgcgtatagtttatcggttttactgttgctggtcacgcccggcccggtggttgcgctggtaaccggaacggcggcccggcacggcgcgcgtaaagcctttgcgacggtgatcggaacgaacagcgcctctctggtgctgattatcctggcggcgttgatgctggccggagtggtgtcgatctccggtttgtttctgtctttgctggggatcgcagggtcgttgtatatcggctacggcgcgttaatcagcctgcgggcggggaatccgcaggcaaatgcgcaagaaaacacggtcgctgtgggcgatggcggggtgatccggggattcattaccggcatttcaaatccgaaagacatccttttctttgtcgctttcttccctcagtttattgcggtgacgcagaacttcgccgccagcattatgacgctgacggtggtgtggatcatttttgattttgctgttttatcgctgtacatcctgctcatcaataactggttgtcaccgcatcacagcaggcgtattggactggcgtcatcgctgtttttgctggtggtatcgctgtctggcctggtctataacgtccgcgaaatcattcaccacttgccgtacggatga

SEQ ID NO: 73578 - DNA, 906 bp, Citrobacter koseri
atgactctgccgccactgtatgccctgcgcgcttttgaagccgccgcccgcctcggctcattcagcaaagccgctgacgcgctgaacgtcactccgggcgcgatcagcagacatatccgtaccctggagacaacgtttgactgcccgctgtttcaccgcaacggcccgcaggttgaggtaacggaagcgggacgcgcgctggcggagcagctggccgcaggctttcggacgctggaaaacgcctgctccgcgtttcgcaaccagcagcacggtctgcgcttaaaggcaccctcaaccctgacaatgggctggttgctggacgtgctgaacagcgtacatcagcaggagccctcgcttaacgtggagctttccagcgtctggatggacaccgatacggtggatttcaatcgcgaaccctttcactgcgccatcctgttaggcaacggtcattttggtttcggcacgcaaagcaggcagctttttaaagagtggctgatcccgatatgcgcccccgcgctgcttgaacaggtacgagaaaacattgccgactgcgagcttattcacccttcgccagaccggcgcgactggacgcgatggctggcacgcagcggtaaatttaacgggctgaatacccgtcggggaaaagtgttcgacacgctggaacagggaaatcaggcggcgataagggggcatggcatctccgtgggcgatctgctgctcagtctggaggcggtaaaaagcggtctgctcgcccttccgttcaatgaagcggtggcaaccggagaaggctactatctggtctggccgcaagatacggcattcgaaaaagacattgcgctgctttatgacaggctaaagcgcgccgccccgcaggagatacccgaaggtatctcctgcctgagctga

SEQ ID NO: 73579 - DNA, 3903 bp, Citrobacter koseri
atgacagaacaacagaaaatcaccttcgccgcacttcagcaacagctggatacgctgatgctgcgtgacaggcagcgctttgcccgccgcctgcatggcgtgaagaaggttaaaaaacctgatgcacaacaggccattctcctggagatggcgaaagagattgaacaggcagcaggtaaaattgtgctgcgcgaagccgccagaccggaaataacgtatccagaaaacctgcctgtcagccagaaaaaacaggccatcctggaggccgttcgcgaccaccaggtggtgattgtggcgggggagaccggctcgggtaaaaccacgcagctgccgaaaatttgtatggagctggggcgcggtattaaagggctgatcggccatacgcagccgcgtcgtctggcggcgcgtaccgttgccaaccgtattgccgaagagttgcaaacggaaccgggcggctgcatcggttataaagtccgtttcagcgatcacgtcagcgacaacacgatggtcaagctgatgacggacggtatcctgctggcggagatccagcaggacaggctgctgatgcagtacgacaccatcatcattgatgaagcgcacgagcgcagcctgaatatcgactttctgcttggctacctgaaagagctgttgccgcgtcgcccggatctgaaaatcatcatcacctccgcgaccatcgacccggagcgcttctcgcgtcattttaacaatgcgccgatcattgaagtttccggcagaacgtacccggttgaggtgcgctatcgtccgattgtcgaagaagcggacgataccgagcgcgatcagcttcaggcgatttttgacgcggtggatgaactggggcgtgaaagtcccggcgatatcctgatctttatgagcggcgagcgtgaaatccgcgataccgccgatgcgctcaataaactcaatttgcgccataccgaagtattgccgctgtatgcacgcctctctaacagcgagcagaaccgcgtgttccagtcgcacagcggacgtcgcattgtgctggcgactaacgtggcggaaacctcgctgaccgtaccgggcattaagtacgttatcgatcccggcaccgcgcgcatcagtcgctacagctaccgcaccaaagtgcagcggctgccgattgaaccggtttcacaggcttccgctaaccagcgtaaaggccgctgtggacgtgtgtcggaagggatctgcatccgtctgtattcggaagatgacttcctgtcgcgcccggaatttaccgacccggagattctgcgtaccaacctggcttcggttattttgcaaatgacggcgctggggctgggcgatatcgccgcattcccgtttgttgaagcgccggataaacgcaacattcaggacggcgtgcgtctgctggaagagcttggggcgattacgaccgatgagcagcaaacggcttataaactgacgccttcaggacgccagttgtcgcagctgccggtagacccgcgtctggcgcggatggtgctggaagcgcagaaacacggctgcgtgcgtgaggcgatgatcatcacctccgcgctgtctattcaggacccgcgtgagcgcccgatggataaacagcaggtgtccgatgagaagcaccgtcgtttccacgataaagagtctgacttcctcgcctttgtgaatctgtggaattatctcggcgagcagcagaaagcgctgtcgtcgaaccagttccgccgcttgtgtcgcactgattacctgaactatctgcgcgtgcgcgaatggcaggatatctacacccaattgcgccaggtggtgaaagagttgggtattccggtaaacagcgaaccggcgcaataccgtgaagtgcatatcgcgctgctgaccgggctgctgtcgcatatcgggatgaaagatgccgacaagcaggagtataccggcgcgcgtaacgcccgtttctccatcttcccgggttccggtttgttcaagaagccgccgaagtgggcgatggtcgcagaactggtggaaaccagccgcctgtgggggcgcattgcggcgcgcatcgatcccgagtgggtggaaccggttgcccagcatctgattaagcgttcttacagcgaaccgcactgggaacgggcgcagggcgcggtgatggcgacggagaaagtgaccgtgtacggtctgccgatagtggccgcgcggaaggtgaattacagccagatcgacccggcgctgtgtcgcgagttgtttattcgtcatgcgctggtagagggcgactggcagacgcgccacgccttcttccgcgacaacctgaagctgcgtgcggaagtggaagaactggagcacaaatcgcgccgtcgcgacattctggtcgatgatgagacgctgtttgagttctacgaccagcgcatcagtcatgacgtgatctccgcgcgccacttcgacaactggtggaaaaaagtcagccgtgaaacgccggatctgctcaactttgaaaagagtatgctcatcaaagagggcgcggaaaaaatcagcaagctggattacccgaacttctggcaccagggaaatcttaagctgcggctgagctatcagtttgaaccgggcgccgacgccgacggcgtcaccgtccatatcccgcttccgttgttaaaccaggtggaagagtccgggtttgaatggcaaattccaggtctgcgccgagagctggtgattgcgctgattaaatcgctgccgaaaccggtacggcggaactttgttccggcgccaaactatgccgaagcgtttttaggtcgcgtaacgccgctggagctaccgttgctggatgcgctggagcgtgaattgcggcggatgaccggcgtgacggtagatcgcgaagactggcactgggatcaggtgcccgatcatctgaagatcaccttccgcgtggtggatgacaaaaacaagaagttgcaggaagggcgcgctttgcaggggctgaaagaggcgctgaaagggaaagtccaggagacgctctcggcggtggctgatgacggcatcgagcagagtgggctgcacatctggagtttcggtcagctgccggaaagctatgagcagaaacgcggtaattacaaagtgaaggcgtggccagcgctggtagacgagcgtgatagcgtcgccatcaggctgttcgacaatccgctggagcagcaacaggcaatgtggtgcggtttacgccgcttgctgctgctgaatattccgtcgccgattaagtatctgcacgaaaaactgccgaacaaagccaagctcggtctgtactttaacccgtatggcaaagtgctggagttgattgacgactgtatctcctgcggcgtggacaagctgatcgacgccaatggcggcccggtatggacggaagaggcttttgccgcgctgcatgagaaggtgcgtgctgagctgaacgacaccgttgtcgatatcgcgaagcaggtcgagcagatcctgaccgccgtgttcactatcaacaaacgtctgaaaggacgcgtggatatgacgatggcgctggggctgtctgatatcaaagcgcaaatgggcgggctggtgtatcgcggttttgtcaccggcaacggctttaagcgcctcggcgatacgctgcgctatttgcaggcgattgaaaaacggctggagaaactggcggttgatccgcaccgtgacagggcgcagatgctgaaaatcgaaagcgtgcagcaggcctggcagcagtggattaacaagctgccgccagcccgccgtgatgacgacgacgtcaaagaaatccgctggatgattgaggagctgcgcgtcagctactttgcacaacagctcggcacgccgtacccgatctccgataagcgcattttacaggcgatggagcaaatcagcctgtag

SEQ ID NO: 73580 - DNA, 606 bp, Citrobacter koseri
atgagcaaagtattagttcttaaatccagtattctggcagggtactctcagtctggtcagttgtctgattattttgttgaacagtggcgcgaaaagcatcctgcggatgcaatcaccgtgcgcgacctggccgcgaatcctgttccggtactggatggcgaactggtgggtgccctgcgcccgagcgacgctccgctgactcctcgtcaacaggatgcgctgtcgctgtccgacgagctgatcgcggaactgcaagcgcacgatgtgatcgtcattgcggcgccgatgtacaacttcaacatcccgactcagttgaaaaactattttgacctggttgcccgcgcaggcgtcaccttccgttacaccgagaaagggccggaaggtctggtgaccggtaaacgtgcggtgattctctccagccgtggcggtatccacaaagatacgccgactgacctgatcgcgccgtacctgaaagtcttcctgggctttattggtatcaccgacgtgaacttcgtgtttgctgaagggattgcttacggcccggaagttgcggccaaagcgcagtctgatgccaaagcggcgattgacagcgttgttgctgcataa

SEQ ID NO: 73581 - DNA, 870 bp, Citrobacter koseri
atggcaagtcacggtaattcagcgacgttttctctcggttcccggcaggtaaaacggctgggctatggggcaatgcaactggcaggacctggtgtatttggcccgccgagagatcgtcacgtcgcgctgacggtgcttcgggaggcgatttcgctgggtgtgaatcacattgataccagcgatttttacggcccgcatgttacgaaccaaatcattcgagaagcgctgcatccgtatcctgacgatctggcgatcgtcaccaaaattggcgcccgtcgcggggaagatgcgtcgtggttgcccgctttctcgcctgcggaactgaagcaggcggttcacgataatctgcgtaatctcggacttgatgtgctggatgtggtcaacctgcgcgttatgttcggcgacggtcatggcccgcatgaaggatctatcgaagagagttttagcgtgctggctgaacttcagcagcaggggctggtgaagcatatcggtctgagcaatgtcaccgcgaaccaggtggctgaggcgaggaagattgccgaaattgtttgcgtgcagaatgagtacaatatcgcccatcgccaggatgacgcacttattgacgcgctggcgggcgagggtatcgcttatgtgccgttcttcccgctgggcgggtttacgccgttgcagtcatcaacgctctccgacgttgccgccagcctgaatgcgacgccaatgcaggtagcgctggcatggttgctgcaacgttcagccaatatcctgttaattccgggaacgtcgtcagtgacgcatttgcgtgaaaatatggcggcaggggatttgcaactttcggatgaggttcttgcggtgctgaatggcatgaatgcctga

SEQ ID NO: 73582 - DNA, 324 bp, Citrobacter koseri
atgaaaaaacagcttagagcgaccgttcttatcctgagtttattgagctgcaacgccatcgcgttgaccctgagtgaagcaagaacgcaagggcgagtgggggaaacgcttaatggttatctggtggcgctggcaaccgatccagaaacgcgctcgctcgtcagcgagattaataaagagcgtagcgccagttatcaacagctggcgaaaagccatcagattccggtggatgaggtggcgaaaatggccggacaaaagctggtcgaccgtgcaaagccgggtgagtatgtgcagggcattaacggtaagtggctgaaaaagtaa

SEQ ID NO: 73583 - DNA, 183 bp, Citrobacter koseri
atgaaaacgatgattgccatgctggcgctcttcttactggcgggctgtacgccgcgtattgaagttgcagcgccgaaggaaccgatcaccatcaatatgaacgtcaaaattgagcatgaaattcatatcaaggttgataaggacgtggaaagtttattgaagtcacgcagtgatttgttctga

SEQ ID NO: 73584 - DNA, 2640 bp, Citrobacter koseri
atgaagggtaaatacaaagccgttctcgcgctacttttattattgatccttataccgttaacgctgctcatgacgcttggcctgtggcttcctacgctggcgggcatctggttaccggttggtacgcgtatcgcgctggatgaaagcccgaaacttacgcgccacggcctgcatatcccggagctgcgttatctggtggaggactgcccgttagcacgcatgagcggcgcggaactcacccatcccagccgctggcagctgaatatcggtacgcttgaactggactccgcctgtctggcaaaactccctgaatctgaaccatcgcccgcggcgccgcgcacgctcgcagaatggcagtctatgctgcctgatacctgggttaatatcgacaggcttattctttctccctggcaggaatggcaggggaaattgtcgctttcgttgacgccagccctccaacagattcgttatcagggcgagaaggtcaactttcaggggcggctgcacgggcaaaacttcaccgtcagccaactggaggtgagcgccttcgaaaatcagccccctgtaaaactggaaggggaatttacgctgcctctggtgccggacgggctgccggtgaacggacacgccgtcgcaacgctgagcctgccgcaggaaccgtcgctggtagatgcggaactggagtggcgggacaacaccggacagctgatcgtcatggcgcgcggtaacccggagccgctgctcgatctcccctggcaggttactcgccagcaacttgccatcagcgatggacgctggaactggccgtatcagggctttccgctgagcggacgtctggggatcaacattaataactggcaggcaggtcttgaaaatgcggtgataagcggccggttgaatgttctgacgcaaggcgatgcgggtaaaggcaatgcggtgctgacgattgggccaggcaagctgagtatggataacagcgacatgcccttgcgtttaaccggtgaagcgaaacaggacgatctgattttttacgcggtactgccgacacagctcaccggcagtctggccgatccacaactgacctttgaacccggcgcgctgttgcgttctcgtggccgggtgattgactctctggatattgacgaaattcgctggccgctggctggcgtaaaagttacccaacgcggagttgatggccgattacaggcaattttacgcgcgcacgaaaataagatgggcgactttgtcctgcatcttgatgggctggcgaatgattttcttcccgatgcggggcgctggcagtggcgctactggggcgagggcagcttcaccccgatgaacgccggttgggatgtcgccgggaaaggagaatggcacgataacaccatcacgcttaccgacctgtccaccgggttcgatcaactgcaatacggcacgatgacggtggcgtctccgcgcctggtgctggataaaccgatcgtgtgggttcgtgatgccgggaacccgaccttcagcggcgcgttatcgctggatgcgggcaataccgtgttcaccggcggcagtgtcttaccgccgtcaacgctcaaattcagcgttgaaggaacggacccaacggtattccagttcaaaggcgacctgcacgccggggcgattgggccagtgcgggtaaatgggcgctgggacggcattcgtttacgcgggcaggcctggtggccaaaacagtcggttacggtcttccagcccttgctgcctcctgactggaaaatgaatttgcgcgcaggcgaactgtacgcgcaggtggctttttccgccgcagaggatcaggggttcgaagcgggtggacacggcgtattgaaaggcggtagcgcctggatgccggacaaccaaatcaacggcgtcgattttgtgttgccgttccgtttcagtcagggcgcctggcaactgggaacgcgcgggccggtgtcattacgcatcgcagaggtggtaaaccaggtcaccgcgaaaaatatcacggccgatctccagggaagttatccgtggagcgaagagaatcctttattgctgagtgacgtgagcgtggatgtgctgggcggcaaaatcatcatgaaacagctacgtatgccgcagcacgatccggcactgctgcgggtgcaaaatgtctcttccagcgaactgatcagcgcggtgaatcccaaacaatttgcgatgtccggcccggttagcggcgcgcttccgctgtggctgagcaatgaaaaatggatcattaaagacggctggttaaccaatccaggcccgatgacgctgcgtatcgataaagataccgccgatgcggtcgtcaaagacaatatggcggcaggcgcggcaatcaactggttacgctatatggagattgcccgttcgtggacgaagattaatctggacaatctgggcgtgctgaccatgcaggcgacggtcacgggtaaaagccatgtggacggtaaagtcggcacggttaacctgaactatacccatgaagaaaatgtctttacgctctggcgcagtttgcgttttggcgacaacttacaggcatggcttgaacaaaacaccgcgttgccggaaacccgttgcccggaaggcaaggaatgtgaggaacaacaatga

SEQ ID NO: 73585 - DNA, 444 bp, Citrobacter koseri
atgaagaatttcattaatcgatttattcgctcagattacgatatcgtcattcttcgcctgagcgttatcggtgtatttatgttgtttggtacttataaatggtttgattttgaagttatggccctggagcctctgatttcatcaacatggctcaatattctgtatttgatttttggtgtccacgggggaagttatttccttggcgttatggaaaccattacatttcttgcgttgatcattggcttcgcccgacctggtgttggcatactaggcgatctcattgttatcactacaggagtaacgactctgagcctgctgccacaactggggaaaattgacagcttcattatcaaggatgttctcttgattggcgctggcgcagttttgctgaaatatgaccttacccggtatctggcattcaggaatggaacataccgggtataa

SEQ ID NO: 73586 - DNA, 462 bp, Citrobacter koseri
atgaaaattatcatcgcgacgcatgatttttattttcagcaaggtgctgaagtattattcaattcgtgtgaggcacttggcgttgaacattttaacagcgaaagagaaacgtattttattatctgtgataatgagttcgccggactcattagcatacttttctacgggtatgatttttaccttgcctgcaagtcagagccttgcaatatgaagcatggatcttgtttgaatgatcaaggtaaatcattaacacataatgaaagaattatcgctttccttttatactataaacactttagtgtagagcaaatcgccagggtgagaggtcgaagtaagaaaacagtatattcacatatttacaatatcaagaaaaaaatcggcttaaaaaatggaatgcacctgccatttaaaagtaacggcattgatcggaatgttttttttgaactgatatttctcatctga

SEQ ID NO: 73587 - DNA, 1080 bp, Citrobacter koseri
atgcataagaatgttatggcctctatgttaggtgtggttttgttcggtgctctaagcaatatcagttgggcagcggaccagagtgaagatctcaacgcaacagtcactaaacgtgagctatatacccaactggctacattagctcaatccctttctcaaaaagggagcgtttctaaagaagaactgatcaactatatagataatcatgtaaaggctacagataaaagtacgagagagtatgttgataatgctattagtgctcaggatatcttgcagagtgtttatactgatgctttagcggagcatattgatgctcaaaatcgctcgctggcttcacagcgggacgcaataaatacggtgaaacaggacgtgaccgtaagcgttgggaaggttaataaagaactggatgaacaaaaggatgttctgcgcggcgaaatcggccaggccaaagctgatgcaattgcacaggctgacaataatgcgaaagttgtgcgtggcgagcttaagcagcagggtgactccctgcgtggtgaaatcggcagcgccaaaagggatgcctacgcacgggccgacagtaatgcaaaagccgtgcgtggcgagcttaagcagcagggtgattccctgcgcggcgaaatcggcagtgtcaaaagggatgcttacgcgcgtatagacaacaatacggaagctgttcgtggcgagctttctcagaccagcaaatatttatctggaaaaatcaatgctaaccagtctgcggccagtaagaatagtcgccgtttagatcttcatgaatcctggcaaaaaatggcggcagacagaatgaatggtctgcaaaaacagatatctaacaaccgcaaagaaattcgtgaaagtgcagctcagaatgcggcgcttgcaggtttattccagccttatagcgtgggtaaatttaatgctactgcggcattgggaggatattcagataagcaggcagtagccgttgggatcggctatcgctttacagacaatgttgcaggtaaaatggcagttgcggccggtggagattccgtttcatggaacacgggtattagtctggagttctga

SEQ ID NO: 73588 - DNA, 636 bp, Citrobacter koseri
atgtacgcgatgaatctgtcgatgaataagcctggaacagtaagcaagataaccttattgaataaaccaatttcaataactgaaaatgcctgctctacatgtagtctactggagcagcttcacaggtatccttcagctactgtcgtaatatatgggcggccgtctttatttttgagtttctggctgcatgttcgggagtgttacccgtgcgcagcattgatatttaagcatggctattttttgcctgtggatgagaccattgctgagttttttaactacttcactattgaagggagaagcggtgtaaaacaccacgagaaaacaatacagcgtgtaatttattttcttcctcccgttttactaaggaaagaatctgttcaggatacagcatatcttacggatacagtacctttacttaatgaaataacacatgcgcgactttcttccgggaggttatcgaagctgtctaaaagtgttcttgcactaatactttctggcttcagtcgagagatgatagcaattaatttaaaagttggaatcaggcaagtctggttgattgaaaacttcctacgcaaaagatggcgaattccagattgttgttctctggttgagtctgtttatttctgcaatagataa

SEQ ID NO: 73589 - DNA, 990 bp, Citrobacter koseri
atgaaactcgctgtttacagtacaaagcagtacgacaagaagtacctgcaacatgttaacgagtcctttggttttgaacttgaattttttgactttctgctgactgaaaaaacggcaaaaaccgccaacggttgcgaggcagtatgcatcttcgttaacgacgacggcagccgcccggttctggaagagctgaaaaagcacggcgtaaaatacattgcgctgcgttgcgctggcttcaataacgtcgatctggacgccgcaaaagagctggatctgcaagtcgtgcgcgtcccggcctattctcctgaagccgtcgccgaacatgcgattggtatgatgatgacgctgaaccgtcgcattcatcgcgcttatcaacgtacccgtgatgcaaacttttcactggaaggtctgaccggttttaccatgcacggtaaaacggctggcgtgatcgggacgggcaagatcggcgtcgccgcgctgcgtattctgaaaggttttggtatgcgactgctggcgtttgatccttacccaagcgccgccgcgctggagcttggcgtggagtatgtcgatctgccgacgctgtttgcggaatctgatgtcatttctctgcattgcccgctgacaactgaaaactaccatttgcttaatcatgctgcgtttgatcagatgaaaaatggggtgatggtgatcaacaccagtcgtggggcgttgattgattcgcaggcggcaattgaagcgctgaaaaaccagaagattggttcactggggatggacgtctatgaaaacgaacgcgatctgttctttgaggataagtccaacgatgtgattcaggatgacgtattccgtcgtctgtctgcctgccataacgtgctattcaccgggcaccaggctttcctgaccgcggaagcgttgaccagcatctcggaaaccactctgcaaaatctggaacagctctcaaaaggtgaaacctgcccgaacgccctgttctga

SEQ ID NO: 73590 - DNA, 423 bp, Citrobacter koseri
atgaagaagatcgtcgcactggttgcactcagcatgcttatggcaggctgcgtcagcaatggaaaagtctccgttaaccgtgatcagctacagcatcaccgttttgttctggagagtgtaaacggaaaaccagtcgctgcgggtaagaacgccccggagttaagcttcggtgaaaaaatgacggtttccggccgcatgtgcaaccgcttcagcggccagggcaagctgtctgatggcgagctgaaagtcaaagaaatggcgatgacgcgtatgatgtgcgccgacccgcagttaaatgaactggatcacaccattagcgcgatgctcaaacaaggcgcgcaggtcgacttaacggctaaccagttgacgctggcgaccgcagaacaaacgctgatgttccgactggctgatttagtgcattaa

SEQ ID NO: 73591 - DNA, 267 bp, Citrobacter koseri
atgcgcgcagcgtttttagtggggtgtgccgcgttattattgtcggcctgtagtaatgagcctgttcagcaggcgacggcagcgcatgttgcgccggggttaaaggcggcaatgtccagttccggggaagccaactgcgccatgattggcgggtcgctctctgttgcccgtcagcttgacggatcggcgattggcatgtgcgcattacccaacggcaaacgctgtagtgaacagtcgctcgccgctggaagctgcggcagctattaa

SEQ ID NO: 73592 - DNA, 168 bp, Citrobacter koseri
atgaatgatttgatcaaagagagggcaaaaaaattgctaaaaaatgtcaatgaaccgcataaatgggcagtttgcctctcgacgacgcagggcagcctgcctattatttatggcggtatcgtttcggctaacgttcagaggggagagagatgcgcgcagcgtttttag

SEQ ID NO: 73593 - DNA, 3525 bp, Citrobacter koseri
atgatcactattgacggtaatggcgcggttgcttcggtcgcattccgtaccagcgaagttatcgccatctacccaattacgcccagttcgacaatggctgagcaggcggatgcctgggccggaaacgggcttaagaacgtctggggcgatacccctcgcgtcgtagaaatgcagtcggaaggcggcgccatcgccaccgttcacggggcattacagaccggggcgctctcgacctcatttacctcatctcagggcctgctgctgatgatcccaacgttgtacaaactggcgggacagctcacgccgtttgtactccacgtcgccgcacgcaccattgctactcatgccttgtctatttttggcgatcactctgatgtgatggcggttcgccagaccggctgcgccatgctgagcgccggcagcgttcaggaagcgcaggatttcgcgctcatttcgcagattgccacgctgaaaagccgcgtgccatttattcatttctttgatggtttccgtacctcgcatgaaatcaataaaattgtgccgctggcagatgacaccattctgaaactgatgccgcaggctgaaattgacgcgcaccgctcccgcgcgctcaatcctgaacatccggtgattcgcggcacgtctgccaacccggatacctacttccagtcccgtgaagccacgaacccgtggtacaacgcggtttatgaccacgttgaacaggcaatgaatgatttcgccggggccaccggtcgccagtacaagccgtttgaatactatggccatccgcaggcggaacgcgtcattattctgatgggttccgcaatcggcacctgtgaggaagtggtggacgagctgctggcgcgcggcgaaaaagtgggcgtactgaaagtccgtctgttccgtccgttctcagcgaaacatttattacaggcgctgccggaaaccgtacgtaccgtcgccgtactggatcgcaccaaagagcctggcgcacaggccgaaccgctgtatctggatgtgatgaccgcgctggcggaagcattcaacagcggcgagagagaaaccttaccgcgggtgatcggcgggcgctatggcctctcttcaaaagagtttggccccgattgcgtgctggctgttttcaacgaactggcgagcgccagacccaaatcccgcttcacggttggcatctatgatgatgtcactaatctgtctctgcccctgccggaaaacaccctgcccggtacagcgaaactggaagcgctattttacggtctgggcagcgacggcagcgtttctgcaaccaaaaacaacatcaagattattggtaactccacgccgtggtatgcacagggttactttgtctatgactcgaagaaagctggcggcctgacggtctctcacctgcgcgtcagcgagcagccgattcgttccgcttacctggtggcgcaggctgattttgtcggctgccaccagttgcagtttattgataagtatcagatggcggaacgtctgaaaccaggcggtattttcctgctcaatacgccgtacaacgcagatgaagtctgggcacgtctgccgcaggaagttcaggcggtgctgaaccagaaaaaagcgcggttctttgtgattaacgcggctaaaatcgcccgcgaatgcggactggcggcacgtattaataccgtgatgcagatggccttcttccacctgacgcagattctgcctggcgatagcgcgctggcggaattgcagggggcgatagcgaaaagctacagcagtaaaggccaggagctggttgagcgtaactggcaggcgctggcgctggcgcgcgaatcggtaacagaagttccgttgcaggcggtggacccgcacagcgcaaatcgtcctccggtggtgtctgacgcagcgcccgatttcgttaaaacggttacagccgccatgctcgccgggcttggtgacgccctgcccgtttcggcgttgccgccagacggcacctggccgatggggacgacccgttgggaaaaacgcaacatcgccgaagagatccctatctggaaagaagagctgtgtacccagtgtaaccactgtgtcgccgcctgcccgcactcggcgatccgcgctaaagtggtttcgccggaagcaatggagaacgccccggccagtctgcactcgctggatgtgaaatcacgcgatatgcgtggtcagaaatacgtgttgcaggtggcgccggaggactgcacgggttgtaacctgtgtgttgaagtttgcccggcgaaagaccgccagaaccctgaaatcaaggccatcaatatgatgtcccgccttgaacatgtcgaagaagaaaaagtgaattatgacttcttcctcaatctgccggaaatcgacaagagcaagctggagcgtattgatattcgcacctctcaactgatcacgccgctgttcgaatactccggcgcctgctccggttgtggtgaaacgccgtatatcaagctgctgacccagctgtatggcgaccgcatgttaattgccaacgcgaccggctgttcttctatttatggcggtaatctgccttcaacgccttacaccaccgatgccaacggtcgcggccccgcatgggcgaactcgctgtttgaagataacgccgaattcggtctgggctttcgcctgacggttgatcaacatcgcgtgcgcgtcatgcgcctgctggaacagttcgccgatcgcatcccaacggatttaaacgacgcattgcacgccgatgcgacgccggaagttcgtcgtgaacaggtcgccgcattacgccagcatctgaaagatgtcgacggcgcgcatgaactgttaaccgatgccgatgcgctgattgagaaatcaatctggctgattggcggtgacggctgggcctacgatattggctttggcggtctggatcatgtgctgagcctgaccgagaacgtcaatattctggttctggacacgcagtgttattccaataccggcgggcaggcgtcgaaggcgacgccgcttggcgcggtcacgaagtttggcgaacacggcaagcgcaaagcgcgtaaggatctgggtgtgagtatgatgatgtacggtcatgtgtatgtcgcgcagatctcgctgggcgcgcagttaaatcagacggtgaaagcaatccaggaagcggaagcgtatccggggccatcgctgatcattgcgtacagcccatgtgaagaacacggctacgatctggcgctgagccacgatcagatgcgtcagttaacggctaccggcttctggccgctgtaccgctttgacccgcgtcgtgccgatgagggtaaactgccgctggcgctggactcccgtccaccgtcagacgcgctggcagagacgctgctcaacgagcaacgcttccgccgtctgaatgcacagcagccagacgttgctgaacagctctggaaggacgcgacggcggatctgcaaaaacgctatgacttccttgctcaactggcaggtaaagcggaaaagagcggtgctgaataa

SEQ ID NO: 73594 - DNA, 1140 bp, Citrobacter koseri
atgaaaagaaaagtactggctctcgtaatccctgccctgttagccgcaggcgcggcccatgccgctgaagtttataataaagacggcaataaattagatctctatggcaaagtagacggtctgcattatttctctgatgacgcaaattctgacggcgatcaaacatacatgcgtatgggtttcaaaggtgaaactcaggttaacgatatgatcacgggttacggccagtgggaatatcaggttcaggctaacggtaccgaaggtgataaaggtgactcctggactcgtctggcattcgcaggtattaaagtcggtgactatggttcattcgactacggccgtaactacggcgtactgtacgacgtggaaggctggaccgatatgctgccagaattcggcggcgactcttataccaaagcagacaacttcatgaccggccgtgctaacggcgtagcaacctaccgtaataccgacttcttcggtctggtggatggtctgagctttgcgctgcaatatcagggggcgaatgaaaaccaatccggcagcgaagacacgtattcccaggaggggacaaataacggcggcgaccgtgatgtgaaaaactccaacggcgacggcttcggtatctcctcaacttacgatctgggtatgggcgtaagcttcggtgcggcatataccacttccgaccgaacgaatcagcaagcaaatcactctactgctggcggtgataaagcagatgcgtggactgctggcctgaaatatgacgctaacaacatctatctggcgaccatgtattctgaaacacgtaacatgacgccatatggtggaaaagatagctggagtgatagcaccattgccaacaaaacccagaactttgaagttacagctcagtaccagttcgacttcggtctgcgtcctgccgtatctttcctgatgtctaaaggtaaggatctggccggcggtgaagataaagacctggttaaatatgctgacgtaggcgcgacctactacttcaacaaaaacttctccacttatgttgattacaaaatcaacctgctggatgaagatgacagcttctacactcgcaacgatatgtctaccgacgacgtcgttgctctgggtatggtttaccagttctaa

SEQ ID NO: 73595 - DNA, 219 bp, Citrobacter koseri
atgaaccatcatcccgttaaatcatcccgtattgcatccgtcggctatgacgaaacctccagcacgctggaaattcgttttcatcgaaccggtactctgcaatatctcggcgtcccgtcgcgtatttttcgtgattttcttgtcgtggtttctaaaggccgcttttatgacggcgtgatcaaagggaaatttccagagcagaaaccaaactcacgctaa

SEQ ID NO: 73596 - DNA, 435 bp, Citrobacter koseri
atgagcagaacgattcttgtgcccatcgatatttcagattcagaattaactcaacgcgttatcacccatgttgaagccgaggcaaaaatagatgacgcagaggtccatttcctgaccgttattccgtcactgccctattacgcctctttaggcctggcctactcagcagagttaccggctatggacgatctgaaagccgaagcaaaatctcaactggaagagattatcaagaagttcagtattcctgccgacagagtacagattcatatcgcggaaggttctccgaaagataaaattctggaaatggctaaaaaattaccggcagacatggtgattattgcttctcaccgcccggacatcaccacgtatctgctgggctccaacgccgcagcggtcgtacgccatgccgaatgttccgtcctggtggttcgctaa

SEQ ID NO: 73597 - DNA, 936 bp, Citrobacter koseri
atgtcgcaaaatcaagatattagcaagaaagaacagtacaacctgaacaaattacaaaaacgtctgcgtcgtaacgtgggcgaagcgattgctgacttcaatatgatcgaagaaggcgatcgcatcatggtgtgcctttccggcgggaaagacagctataccatgctggaaattctgcgtaatttgcagcaaagcgcacccgtcaacttttcactggtcgccgttaaccttgaccagaagcaaccgggttttcccgaacacattctgccggaatatcttgagaacctgggcgtagagtataagatcgttgaagaaaacacctatgggatcgttaaagagaaaattcctgaaggcaaaacgacctgctctctgtgctcccgactgcgccgcggtattctctaccgcaccgcaacagaactgggtgcgaccaaaattgcgttaggccaccaccgcgacgatatcctgcaaacgttattcctgaacatgttctacggcgggaaaatgaaagggatgccgccgaagctgatgagcgatgacggcaaacacatcgttatccgcccgctggcctactgccgcgagaaagatattgagcgtttttcagaagccaaagcgttccctattattccgtgcaacctgtgcgggtcgcagccaaacctgcaacgccaggtcatcgccgacatgctgcgcgactgggataagcgttatccagggcgtattgaaaccatgttcagcgcgatgcagaacgtggtgccttctcatctgagtgatattaatctttttgatttcaaaggcattaatcatgattccgacgtagtagacggtggtgatttagcctttgaccgcgaagagatccctctgcaacccgcaggctggcagccagaggaagacgataatcagctggatgaactgcgtctgaacgtcgtggaagtgaagtaa

SEQ ID NO: 73598 - DNA, 1374 bp, Citrobacter koseri
gtgaccgctttttctactctgaatgtcctgcctgccgcccaactcgagaatcttaacgagttgggttatcttgagatgacgcctgtccaggccgctgcgttaccggcgatcctggccggaaaagatgtgcgcgtgcaggcaaaaaccggcagcggaaaaacggctgcatttggtctcgggcttttacagcatattgatgccagtctgttccagacccagtcgctggtgctttgtcctacgcgcgaactggccgatcaggtggcaggggagctgcgtcgtctggcgcgttttctgcctaataccaaaatcctgacgttgtgcggcgggcaacctttcggcgcgcagcgagactctctccagcatgcgccgcatattattgtcgcgacgccgggtcgcctgcttgaccatctgcaaaaaggcaccgtttctctggatgccctgcaaacgctggtgatggatgaagccgacaggatgctggatatgggctttagcgacgctattgacgaggtgattcgctttgcgccgtcacgccgtcagactctgctgttttccgccacctggcctgaggccatcgcggcgatcagcggtcgggttcagcaaaatccactgacgattgaaattgattcggtggatgcgctgccatctatcgagcagcagttttttgaaacatcttcgcaggggaaaatcccgctgctgcaaaagctgctgagccagcatcagcctgcgtcatgcgttgttttctgtaataccaaaaaagattgtcaggcggtttgtgatgcgcttaattctgttgggcagagcgcattatcgctgcatggcgaccttgagcagcgcgatcgtgaccagacgctggttcgttttgcaaacggcagcgcgcgcgtactggtagcgacggacgtcgccgcgcgtgggctggatatcaagtcgctggagctggtcgtaaacttcgagctggcgtgggacccggaggttcacgtacaccgtattggtcgtaccgcccgtgcaggcaacagcggtctggcgatcagtttttgcgcgccggaagaggcgcagcgcgccaatatcctgtctgaaatgttgcagcttaaactgaactggctgacgccgctgggcaacgttccggttgcaccgctggaagctgaaatggcgacgctgtgcattgatggcggtaaaaaagcaaaaatgcgcccgggcgacgtgctgggagcattaacgggagatattggtctggatggcgctgatattggcaaaattaccgtacatccggcccatgtttatgtggcggttcgccaacctgtggcgcagaaagcctggaagcaattgcagaacggaaagataaaagggaagagctgtcgggttcgtttattgaaataa

SEQ ID NO: 73599 - DNA, 183 bp, Citrobacter koseri
atgaccagcctgttcacgttattgcaaatgcaaacacgccagtcggattccgtaccaaccgatccggtgccgattcccgatcctatcccgcgcccacaacctatgccagatccgccgccggatgaagaaccgattaaattgtcgcatcaagagcagagatctgcgaggatacgcgcctgctga

SEQ ID NO: 73600 - DNA, 984 bp, Citrobacter koseri
gtggaagccatcaagggatcggaagtcaatgtgccggatgccgtttttgcctggctactggatggtcgcggcggcattaaaccgcttgaaaatgacgatattatcgacagccagcatccctgctggttgcatctcaattacacccaccctgacagcgcgcagtggctggcgtcgacgcctttgttaccgaatcctgtacgcgatgcgctggctggcgagagttcgcgcccacgcgtcagtcggatgggggaaggcacgctgatcaccttacgctgcatcaacggcagtaccgatgaacgccctgaccagctagtggcgatgcgtgtatatatggatgaacgttttatcgtctcaacgcgacagcgaaaagttctggcgcttgatgaggtggttagcgacttgcaggaagggactggcccgtccgattgcggcggctggctggtcgacgtgtgtgacgccctgacggatcacgccagcgaatttatcgagcaattacacgataaaattatcgacctggaagacaatctgctcgatcagcagatcccgccgcgtggattcctggcgttactgcgtaagcaactgattgtgatgcgtcgatacatggcgcctcagcgtgatgtttatgcgcgactggcaagcgagcgtctggcctggatgaatgatgatcagcggcgtcgaatgcaggatatcgcggatcgtctgggaagggggctggatgagatcgacgcgtgtattgcgcgcacgggcgtgatggccgatgaaatcgcgcaagtcatgcaggagtccttagcgcgcagaacctatacgatgtcgctgatggcgatggtctttctgcccagcacatttttaaccggcttgttcggcgtgaatctcgggggaattccgggcggcgcatggcattttggattttctatgttctgtattctgttagttgtcctgattggtggtgttaccttatggttgcatcgtagtaaatggttgtaa

SEQ ID NO: 73601 - DNA, 1233 bp, Citrobacter koseri
atgattgctcacgaactcaatgctctggatttattaagttttcctgtctggattgttttaccacacacagaagagttagttttcgctaataccgccgcacgcgaactgacacaggaacagactttcagccgtctcagaaaggggatattttcaacttatgcgcaaaatgagctgcgcatgtacgttgctgatttacaccaccatcacgatattgttgaaattctgacggtctgtcgtgatggtaaagaaatcgccttaacctgccgcctctcggttaaaaccctgtcgacgcagggagacgttattatttttgaaggcatagagacacccacggcgcaaggtctcaaggccagccgttcggcaaactatcagcgtaaaaaacaagggttttacgcccgttttttcctgacgaactccgcgccgatgctgttgatagacccttcacgggacggtctgatcgtcgatgccaatctggccgcactcaatttctatggctacagccatgaagcgatgtgccagaaacatacatgggaaatcaacgtattaggccgccagatcttacccgttatgcatgagattgcccgtctgcccggcggtcataagcccttaaacttcgtccataaactctctgacggcaccacccggcacgtacaaacctatgcgggtccccttgagatatacggcgataagctcatgttatgcatcattcatgacattaccgagcaaaaacggctggaacaggagctggaacgcgctgccctgcatgatgcgctgaccggcttactgaaccgcaggcaattttatcttcttactgagcaaaaccatacgccccatctgtcgatgacaatggattacagcctgctgctcatcgataccgatcgcttcaaaagcattaacgatttgtacggtcatttgaaaggcgatgaagtgctgtgcgctctggcgcgaacgctggaagctcgcgcacgtaaaggcgacctggtctttcgctggggcggtgaagaatttgtcttgctgctgccgcgaacctcgctggaggttgcacttaatcttgcagaatcaatacgcgccgccgtggcgaaagtctgtattcctggcctgccccgttttaccgtcagcatcggcgtcgcacggcacgaatcgaatgaaagtattgatgaattatttaagcgagtggacgacgccctgtacaaagccaaaaacgacggcagaaatcgggtgctggcggcgtaa

SEQ ID NO: 73602 - DNA, 564 bp, Citrobacter koseri
atgaaccttgacgacaaaacgctgtttcttgacgccatggaggatgtccaaccgttgaaacgttgcgctgatgtacactggcagcccacgcgcaattcacgggcgccgcagcgtatcgatacgatccagctcgataattttctcaccaccgggtttctggatattcttcctttgggcgaaccgctggaatttcgccgggaagggttgcagcagggcgtgctcgacaaactgcgttcgggaaaatacagccagcaggcgagtctcaatttgcttcgtcagccggttgaggaatgtcgcaagatgctgtttagcttcatctgccaggcgcgtcaggatggtttacgcaacgtgctgatcattcatggcaaagggcgggaagataacgcgcatgccaatattgtgcgcagttatgtggcgcgttggctgacggaatttgacgacgttcaggcttactgtacggcgctgcctcatcatggcggcagcggagcgtgttatgttgcgttgcgtaaaacggcgcaggcaaagcaggaaaactgggagcgtcacgcgaaacgcagccgttaa

SEQ ID NO: 73603 - DNA, 516 bp, Citrobacter koseri
atgctgagattacttgaagacaatatcgcgaccccgctggggccgttatgggtgatttgcgatgagcaattccgcctgcgcgccgtcgaatgggagcaacacagcgaccgtatggaacagctactggacatacattatcgttcagaaggatacgagcgcatcgccgccaaaaatccgggtggcctgagcgataagctcaccgcttattttgagggaaatctcagcatcattgatacgctggagaccgccaccgggggaacaccttttcagcgggaagtgtggcaggcgctgcgcaccatcccctgcggtcaggttatgcattatggtcaacttgccgaaaaattaggccgtccgggagccgctcgcgccgtaggcgccgctaacggatctaacccggtcagtatcgttgtaccctgccatcgcgtaatcggacgcaacgggacaatgacgggatatgctggcggcgtgcagagaaaagagtggttattacgccatgaagggtatctgctgctgtag

SEQ ID NO: 73604 - DNA, 753 bp, Citrobacter koseri
atgatcccggaaaagcgaattatacggcgcattcagtctggcggttgtgctatccattgccaggattgcagtatcagccagctttgcatcccgttcacacttaacgaacatgagcttgatcagcttgataatatcatcgagcgtaaaaagcctattcagaaagggcaaacgctgtttaaagcaggtgatgaactgaaatcgctctatgctatccgctccggtacgattaaaagctacaccattaccgagcagggcgacgagcaaatcactggttttcatttagcaggcgacctggtcggctttgacgcgattggcagcgggcaccacccgagctttgcccaggcgctggaaacctcaatggtatgtgaaatcccgtttgagactctggacgatctctccggtaagatgcctaacctgcgtcaacagatgatgcgtctgatgagcggcgagatcaaaggcgatcaggatatgatcctgttgctgtcgaagaaaaatgcggaagaacgtctggcagcctttatctacaatctgtcccgtcgttttgcccagcgcggtttctctccgcgtgaattccgcctgacgatgacccgtggcgatatcggtaactaccttggcttaacggtcgaaacgatcagccgtctgctggggcgtttccagaaaagcggtatgctggcggtgaaaggtaaatacatcaccatcgaaaacagcgatgcgctcgcagtgcttgctggtcatactcgcaacgttgcttaa

SEQ ID NO: 73605 - DNA, 204 bp, Citrobacter koseri
atgatcacttatgatcgtaaccataatcctattactaatggcagtcgggttatgattaatgggacgggcagaacgggtaaaatcgttgccatacattctaacgggttaactccagcccagttacgccgcaacaaaaccgtcgaagtggaaggctgtgaaggccagttcgaacccgttgaactgatccgtcttggttcccactaa

SEQ ID NO: 73606 - DNA, 951 bp, Citrobacter koseri
atggctatgtatcaaaatatgctggtggtcatcgacccaaaccaggacgatcaacccgcattacgacgcgctgtttatttgcatcaacggattggtggcaaaattaaagcctttttgccgatctatgatttttcctatgaaatgactaccctgctctcgcctgatgagcgtaccgcgatgcgtcagggcgtcatcagccagcgaacagcctggatacgcgaacaagcgaaatactacatcgaagcaggtgttcccgttgagataaaagtggtctggcacaaccgtccctttgaagccattatccaggaagtgatcagcgacgatcacgatctggtgctcaaaatggcgcaccagcatgaccgcctggaagcggtaatctttacgccgactgactggcatttgttacgtaaatgcccaagcccggtatggatggtcaaggaccaaccgtggcctgaaggcggtaaagcgctggtggccgtgaacctggcaagcgaagaaccttatcacaatgcgctgaatgaaaagctggtcaaagaaacgctgcaacttgcagaacaggtgaaccataccgaagtccatctggttggcgcctaccccgtgacgcccatcaatatcgcaatcgaactgcctgaatttgatccgagcgtttacaacgacgcgattcgcggtcagcatttgctggcgatgaaggcgctacggcagaaattcagcattgatgagaaagtgacgcatgttgaaaaagggttgcctgaagaggttatcccggatttagccgagcacctacaggcgggtatcgttgtactgggtacggttggtcgtaccgggatatctgcggccttcctgggcaatacggcggaacaggttatcgaccatttgcgctgcgatctgctcgtcattaaacccgatcagtatcagacaccggtcgaactggacgacgacgaagacgattaa

SEQ ID NO: 73607 - DNA, 261 bp, Citrobacter koseri
atgatcatgacaaagctgaagacagcaaaggggaagaaatttctgttgggcctgctggcggtgtttattattgcggcatcagtggttacgcgggcgactatcggcggcgtgatcgaacagtatgatattccgttgtccgagtggacaacctcgatgtatttcatccagtcatcaatgatttgcgtctacagtctggttttcaccattctgctggccattccgctggggatctatttcctcggtggtgaggacaaacagtaa

SEQ ID NO: 73608 - DNA, 1032 bp, Citrobacter koseri
atgattgtagaattttttttcaaaaacgcgtttaatctggcaataatttttggcagtggcgccgccttacttctgatgagtattgtgtttcgtcgtggcgagaaaagaagaaaaggatttatatttcatgccgtacagttcttcgtttatgcccttatcatcggcacgctgggcagtatcgccaataatgttattgaaaactacgatctgaaattcatctctccaaatgccgttgattttatctgcacatctctgattgcgctgattctgacaataaaactgtttttactcatcaaccgctttgaaaaatcacagatcggtaaaggcagagacgtcaccagtgcgaagatcctgtctcgcattattaagatcaccattattatcgccatcgttttactctatggcgaacactttggcatgagtctgtccgggttgctgacttttggcggcattggcggcatcgctgttgggatggcgggtaaggacattctgagcaactttttctcggggattatgctctattttgatcgcccctttagcattggcgactgggttcgttccccggacagaaatattgaaggcactgtgactgaaatcggctggcgaatgaccaaaattaacaccttcgaccaccgccctttatatgtgccgaattcgattttctccgccattagcgtggagaatcccggcaggatgaccaaccgacgtattaaaacggtgatcgggttacggtatcaggatgccagtaaaacaggtgttattgttgatgcggtcagaacgatgctgcaaaaccaccctgatatcgatcagcgccagacactactggtctatttcaatgaattcggcgaatcatcgctgaatatcatggtctattggtttagcaaaaccaccgaatgggaagcctggcttgcggttcagcaggatgtttacctgaagattatcgacattgttcaggcgaacggcgcagattttgcgtttccaagccagacgctttatctggataacgccgcgtcaccgcaatccgcaaattaa

SEQ ID NO: 73609 - DNA, 1620 bp, Citrobacter koseri
atgaagcactctgtttcagttacctgttgtgcgctgttgattagcagcgtctccctgacacacgctgcggatgttcccggcggaacggtactggcagagaagcaagaactggtccgccatattaaagatgaaccggcgtcgttagatccggcaaaagcggttgggctgccggagattcaggtcattcgcgatttgtttgaaggtctggtgaatcagaatgagaaaggggaaatcattcccggcgtcgctacgcgctggaagaccaatgataaccggatctggacgtttaccctgcgcaataacgcaaagtggtcggacggcactccggtgaccgcgcaggattttgtctacagctggcaacgtctggttgatccgaaaaccctgtcaccgtttgcctggtttgccgcccttgctggcattaataacgcccaggcgattattgatggtaaagcgtcgccggatacgcttggggttagcgccgtggacgcccgcacgctaaaaatacagctggataaaccgctgccgtggtttgttaacctgactgccaactttgctttttacccggtacagaaagccaatgtagaaagcggtaaagactggacgaagcccggaaacctgatcggcaatggcgcctatgtgttgaatgatcgcgtggtcaacgaaaaactggtggtggtacccaatacccactactgggacaatgcgaagacggtgctgcaaaaagtgactttcctgccaattaatcaggagtcgtcagcgactaaacgttatctggctggcgatattgatatcaccgaatctttcccgaaaaatctgtatcagaagttgctgaaggatataccggggcaggtttacacaccgccgcagttgggcacctattattatgcgtttaacacccaaaaaggcccgacggcggattcccgcgttcgtctggcgctgagcatgacgattgatcgccgcatcatggcggaaaaagtgttaggaaccggggagaaaccggcctggcgcttcaccccggacgtgacggcaggctttactcccgatccttcgccatttgagcaaatgagccaggaagaactcaatgctcaggcaaaaacgttattgcttgcggctggctatggcccgcagaaaccgctcaaattgacgctgttatataacacatctgaaaatcatcagaaaatcgcgattgcggtcgcctcgatgtggaaaaagaatctgggcgtagaggtgaagctgcaaaaccaggaatggaaaacctatatcgacagccgcaacaccggtaattttgatgttatccgcgcctcctgggtgggggactacaatgaaccgtctactttcctgtcattgttaacctcgacccatacgggcaatatctcgcgcttcaataacccggcctacgataaaatcatgacgcaggcgacagtagaaaatacgacgaaggcgcgcaacgcggactataacgcggcagagaaaatcctgatggaacaggcgccgattgcgccgatttaccagtataccaacggacgtttgatcaaaccgtggctgaaaggttatcccattaataacccggaagacgtggcgtatagtcggacaatgtatattgtgaagcacgacaaataa

SEQ ID NO: 73610 - DNA, 729 bp, Citrobacter koseri
atgaccgttacccgtcctcgtgccgagcgcggcgcatttccgccaggaaccgaacattatgggcgttcattgctgggagcgccgttgatctggtttccggctccggctgccgatcgcgaaagcggcctgattctggccggaacgcacggcgatgagaacgcgtcggtggtgacgctctcgtgtgcgctgcgtacgctgaatccttcactccgccgtcatcatgtggtgctggcggtgaacccggacggttgccagcttggtctgcgcgccaatgccaatggcgtcgatttgaaccgtaattttccggcggcgaactggaaagcgggtgagacggtttatcgctggaacagtagcgccgaggagcgcgatgtggtgctgcttaccggcgaacatccggggtccgaacccgaaacccaggcgctgtgccaactgatacaccgggtgcatcctgcctgggtggtctcctttcacgatcctctcgcctgtattgaagatcccagacatagcgagttaggcgaatggctggcccgggcattcgaactgccgctggtctccagcgtaggttacgaaacgcccggttcgtttggaagctggtgcgccgacctcaatctgcactgtattaccgcagagttcccgccgatctcatccgatgaggccagcgaaaagtatctgatggcgatgtctactctgctgcgctggcaccctaaagatgaagttgcccggtcgtaa

SEQ ID NO: 73611 - DNA, 966 bp, Citrobacter koseri
atgagatctgttaaggtgtatgaggaggcctggccgctgcacacgccctttgtgattgcccggggaagtcgtaccgaagcgcatgttgtggtcgtggagctggaggaagagggcgtaaaaggcgtaggggaatgtacgccttatccacgttatggcgaaagtgatgcctcggtgctggcgcagatcatgagtatcgcgccgcaactggaacaggggctgacccgcgaagcactacaaaaattgctgcctgccggcgcggccagaaatgcggtcgattgcgcgctgtgggatctgagcgctcgccagcagcagcaaacgctggcggagtttgtggccgttgaattgcccgctacgctgacaacagcacagactgtcgtgatcggtacgcctgaacagatggcggccagcgcggcggcactgtgggaaaaaggggcgaaactgctcaaaattaagctggacgatcgcctgatcagcgaacgaatggtcgcgattcgctccgtcgtgcctgatgcgacgctaattgtggatgcaaacgagtcctggcgtacagaagggctggcggcgcgatgccagctgctggcggatttaggcgtcgcgatgctggaacaaccgttacctgcgcaggatgacgccgcgctggaaaattttgttcatccgctccctatctgcgcggatgaaagttgccatacccgcagtagcctgaaggcgttacaagggcgctacgatatggtcaatatcaaactggataaaaccggtggtctgacggaagcgctggcgctggccgccgaagccagagaacagggttttgggctgatgctgggatgtatgctgtgtacctccagggccatcagcgcagcgttgccgctggccccacaggtgcgttttgctgacctcgatggccccacctggctggcggtggatgtcgagcccgctttacggtttacgaccgggcaacttcatctttag

SEQ ID NO: 73612 - DNA, 507 bp, Citrobacter koseri
atgtcacaaaccgttcatttccagggcaatccagtcgccgtcgccaacaccattcctcaagctggtagcaaagcacaggcttttaccctcgtggcaaaagatctgtctgacgtcacactggctcagtttgcaggcaagcgcaaggtgctgaatattttcccaagtattgataccggcgtttgtgcggcatcggtacgtaagtttaaccaactggcgacagaaatcgacaacaccgtcgtactgtgcgtttctgcggatctgccgttcgcccagtctcgtttctgcggcgcggaaggtctgagcaacgtcattaccctttccactctgcgtaatcctgacttcctgaaagactacggcgttgaaatcactgaaggcccgctgaaaggtctggcggcgcgtgccgtggtggtcattgatgaaaacgacaacgtaattttcagccagctggtgaacgaaataaccaacgaacctgactatgctgctgcgctggacgtgctgaaagcgtaa

SEQ ID NO: 73613 - DNA, 876 bp, Citrobacter koseri
atgaatagtcagtgcggttctggaaaattagcgacactattggaagtgcttgaaattggtgagtcggcgatcgcttttaacaggatgaaaactatatctgccgattattatcacttccatgaatgtgcggaaattctgtttgtaacgcaaggtgtagggatcgccgttgtggaacataagcagtacaccgttaagcctggccggttatttgtttttccgccaggccgcgttcataaaatttatgtggagcatgatttacacaatcaatatcatcgtacaaccttacatttcagtagcgcaatgttgctgccattttttcgtgattttccgcgtcagcagatacaatttcgccaacttagcagttatggtgaagaggtgaggatctttgatgtttcagaaatacaaaattttattgaagcgctattctttcgttttgaacagctgagttcaaaaaatgtactaacaattaatgatagtgcttttttacttctgcaacttatcggtcttttgcctgaacatgatcagcaacaggcttcgctttcggggataaatacattctctgcatcaattatccgctggattgaggatcattttaaggagaattgttcactggagatattggctacggtatctggttgttcggaagggcatgcttccaggcgttttcgcaaggagaccggaggaaccattcaggaatatgtggttatgcgaaggattcgccatgcatgcgaattgctggtgcatacttctcttacggtcagagaggtgggtttagaatcgggatttgcagaatatgcctggttcataaccagcttcagacgattgatgggaaaaacaccgcttcagtaccgcagatcctacagtttaaggagataa

SEQ ID NO: 73614 - DNA, 717 bp, Citrobacter koseri
atgtctatgtcaaaaaaatgcctgttcacaggtgcggttatttttttctcttttacgccttttgtacatgcagttcagtttgatgtgcgtggtgggtataatatagaaaaccacagttatgagtcccgatttaaagtcagcaatagctggagcagtggttggtgggccagtatggaaaccgatagcaataatggttcaccttcattagatgatatgacttcctcttataatgagatggagactaactatacctggcatattaatgaccgtttcgctctggtacctggtggtgttattcattggagtaatagtggtacgcagttacgtccttatattcgactgaattacaaaatatctgaacgcttttcaagtggtatccgctatcgtcttgatcatcataattatgatgtcgtcgataatactggtgatactattcacgacaatgagcaccgtatagatttgtttctcggttataaaataaaccaggactggaattttatgtggcagggaacggcatatatgcatcaagatccagatctggaatataataacgggaaacgttgggcgacagaaaatgcattcactataaagtatcggtggaatgaatattttagcccttatttcgaatatgattatcttgacgagcaaagtaactataaaggcgagaagggtaaacctgactcgcgtattcgtgtgggggttacctttaatttataa

SEQ ID NO: 73615 - DNA, 1728 bp, Citrobacter koseri
atgcttgagcgtaatatgcttagagaaaatatcattgataaattatacgacgtgctggatagtgtcgtgaacagaacgattaacaaagagcaaagttttggtgttgtactgacgctggatgatgatccctacgctagcggtaagtttgctttggccctgagttttctgattgagcgtttcccggcacgcgctgaccagtggtctggagtatggcatgagctggttaaagcacccagtgaaaactgggggaaatattacttcttgcaggcgctgtggaaactgcactgtttggggttgctgaatactatttttagcgatcagcaattgcaaaggcttactgaaaaacttcgctggcaagaactggtggatgaggaatcgtggaaattaaacccaccttttccaactaattattatggtgtcgcatttagcatcgcccgattgcgctttttacttggttgggagacgcaatttgcatcacaaaaaatcctccagcaacttgtcgaacattatcgtacccattcgcaacatggatgtgtggatgaaactgagggaaaagggcgctttgaccgttatagcatattgctgattgcggaaatttgccaacgacatattgataccgggttagatatatgcgactggctcaaagacgcattgcgacaagtgtcgacactgatactggcaatgttgaatgatgagggtgtcgggttcctgtggggaagatcaattggcgcgtatggtgatagtgcatttaatgaaattctgactatcagtatgcgacttggtttgttggatcgacaagaatgcgcggcggctagcagatttacgcttgcctgtagcgaacgttttttaaacttttggtatgactcaaatgaacagagtgtgaatctatggttttatgggagacaaacagacgcgtatcgggctgagcatagactggttggtgaaaatatcagtttgtcttgtcagcatctttgtgtgcagcgagcctgggctgatgtctcctttgatgcaacgcctttaatgttaccagaacaaacgcttaaatttacgccattttgcaatgacaaatataccagaggactattccattggtatgacggcaagcggttatttgttttaccattaattaacggtgataaacattattttgccacatctccctatttcccggttcccttttctgccggactgattactggcgtagctcagggacatgcgccgctttgggtgcctggattagtggactctcgtggctgtatactgcgaccattagtgtggtttggtgactgtggttaccagaagacgaagaatggttgggaaattgagattaattattccgcacttaacgtagtaatggaaaatggggttctgctatcagaaccgaaaaaggattactcttgtcagtgtcgtacccgttattttattgaaccctcgactttgaccagagtggatacattttcttttttaaaacatagcgagatgtatctcgaactacaatgtgccgtctttccagaaaaaatgcgtatgatacattcggcggatagtttacatatagattatgaaagtaatggtattcaatctctcgaattaaatggatttgaagactattgtgtggaaagaacagcattgtgtagtccttatggcgcattaggacaacagattacaggaaggagagatgtttctggtgctaaagatgtgactgtcagttggcaaatacgttattgctaa

SEQ ID NO: 73616 - DNA, 1260 bp, Citrobacter koseri
atgaataaaagtgatagtgctgaaaagaacaggcgtaaaatttatattacgctcagtctctttatcctggtctacttcttctcatggaaagcgacacttgatacttattctttttggctatcagaaaagataggccttgatggtgttgcgattggtattgtttttgccgcaaacggcttttgtgcggtactaatcaaacctgtatatgggtttcttatcgatcggctagggttaaggaaagatctgttattctttatctcgcttatttcgataaccgttttcccctttttcttttatatatacaaaccactattgcagtctgcgttgtatgctggtattgcgttgggcggtatatttttaagtatgggatactacgcagggtgtgcagccgcagaatcataccttgatcgcttcggccgtttgtttgatcttgagtttggtcaaatccgcatgtggggcgcaattggttctgtattctctgccgcaagtacaggctatatttttaatattaacccaatgatcaattttgggttaagttccgcaggtgcgctgataattcttattattgtttttacgatgaagatcgaagtcaatgaagaggtaaaaaatcgcatcattgctaaagataaagcgacaatatacgatattatagcattatttagcacacgcaatttctggacgtttgttttatatgtttgtggtgttgtgtggattatttttgtcgcagaacaacaatatccacgtttctttatcacattttatgccagtaaagaaatcgggcatcaaatgtttggttatcttggtgctgccagtctgggagtagagtttctgttcatgatgattgcacctggcattgtcaaccgtctggggccaaaaaccggcttgctgattacaggctttgttgtggccgctagatttattggttctggtttggttacaagtgcaataacaattggaattatcaaattgtcgtgggggatagaaatgtcattcctgctggtttcaattttcaaatatctggaaattaactttgataaaaaagtaaatggttcaatgtatttattaggctatcaaagcgttaactatatcggaacagttatcttgtcgccgttgagtggttacttgtatgagcgattaggtttttcacatacatattttatgatgggatgtacagtattgtttttcactattatatccgcatttcttcttcaaaataacaaacgaacagaaccagtcattgcggagaatgcgcatgcttga

SEQ ID NO: 73617 - DNA, 1542 bp, Citrobacter koseri
atgcgtctggaagtcttttgtgaagaccgtcttggtctgacccgcgagttactcgatttgctggtgcttcgtagcattgatttacgcggtattgagattgaccccatcgggcgaatttaccttaattttgctgaactggagttcaccaacttcagcagcctgatggcggagatccgccgcatttccggcgtgaccgatgtccgtacggtgccgtggatgccgtctgaacgcgagcatctggcgctgagcgcactgctcgaagcgttgccggaacccgtcctctctctggatatgaaaagtaaaatagagatggcgaaccccgcgagctgtcagcttttcgcacaaaatcaggagcgtatgcgcaatcacactgccgcgcagttgatcaacggcttcaacttccagcgttggctggagagcaacccgcaggtctctcacaacgagcatgtggtgatcaatgggcagaacttcctaatggagattaccccggttcatttgcaaggggaaaatgacgagtacatgctcacgggcgctgtcgttatgttacgctccaccatccgaatggggcgtcagttgcagaatttgacgacccaggatttgagcgcgtttagccagattatcgccgtcagcgcgaaaatgaagcatgtcgtagagcaggctcgcaagctggctacgctgagcgcgccactgttgattaccggcgataccggaaccggtaaagatctcttcgcccatgcctgtcacctggcgagcccgcgtgcggcaaaaccgtatctggcattgaactgcgcctccattcctgaagatgcggttgaaagcgaactgtttggtcatgcgccggaaggtaaaaaaggcttctttgaacaggctaacgggggttcggtgctgctggatgagattggtgagatgtcgccacgcatgcagaccaaattgctgcgttttcttaacgacggcactttccgtcgcgttggcgaggatcatgaggttcacgttgatgtccgggtgatctgcgccacgcagaagaatctggtggaactggtgcaaaaagggctgttccgcgaggatctctactaccgtctgaatgtgctgacgctcaatctgccgccgctgcgtgattgcccgcaggatatcatgccgctcactgaacttttcgtggcgcgttttgccgatgagcagggcgtgccgcgtccaaaactctctgccgatctcagcaccgtattaacccgttatggctggccgggcaacgtgcgccagcttaaaaacgccatctaccgggcgctgacgcagcttgaagggtacgaattacgtccgcaggatatcttgctgccggattacgacgccacgaccgttgccgttggtgaagatgcgatggaaggctcgctggatgagatcaccagccgttttgaacgttctgtgctgacgcagctttatcgcaattatccgagcacgcgtaaactggcgaaacgcctgggcgtctcacataccgcgattgccaataagttacgtgaatacggtttgaatcagaagaaaagcgaagagtaa

SEQ ID NO: 73618 - DNA, 1062 bp, Citrobacter koseri
atgagcgaaccgttaaaaccgcgtatcgatttcgcaggtccactggaggtggagcaaaaccagacgcttaaaacgcaacagaccttcagcgagacgcaggcgcagacctttgcccccgcgcaggtggatgaacctctggaagacgagggacaagcggaagcggtcattgatgccgcgctgcgcccgaaacgcagtttgtggcgcaagatggtgatggggggactggcgttgtttggcgtcagcgttgtgggccagggcgtgcaatggaccatgaacgcatggcaaacccaggactgggtggcgctgggcggttgtgccgccggggcgttgatcattggcgcaggcgttggctcggtcgcgacagaatggcgtcggttatggcgattacgccagcgggcgcatgaacgggatgaagcgcgcgacctgttgcacagccacggtacgggaaagggccgtgcgttttgcgaaaagctggcgcagcaggccggtatcgatcagtctcacccggcgttgcagcgctggtatgcttcgattcacgaaacgcaaaacgatcgggaagtggtcagcttatacgctcaactggtgcaaccggtgctggatgcccaggcgcgacgtgaaatcagccgttcggccgccgaatccacgttaatgatcgccgtcagcccgctggcgttggtggatatggcatttatcgcctggcgaaatttgcggctgatcaatcgcattgcgacgctgtatggcattgaactggggtattacagccgtctgcgcctgtttcgtctggtgttgctcaatattgcgtttgcgggcgccagcgagttggtgcgtgaagtcgggatggactggatgtcgcaggatctggcggcgcgtttgtctgcccgtgcggcgcagggtattggcgccgggctgttaaccgctcgtctgggcattaaagcgatggagctgtgtcgtcccttaccgtggatcgacgatgataagccgcgtctgggggattttcgtcgccagcttatcgttcaggtcaaagagaccttgcagaaaagcaaaaccccgcgcgaaaattga

SEQ ID NO: 73619 - DNA, 1398 bp, Citrobacter koseri
atgaagcgactcaaaaacgaacttaactcgctggttaatcgcggtgtagacaggcatttacgtctggccgttaccggacttagccgcagtgggaaaaccgcgtttattactgcgatggttaaccaactgctcaacatccatgccggatcgcgactgccgctgctaagcgcggtgcgtgaggagcgtttgctgggcgtgaaacgcgttccacaacgtgattttggtattcctcgttttacctacgatgaagggctggcccagctttatggccagccgcctgcctggccgacgccaacgcgcggcgtgagcgaaatccgtctcgcgttacgctacaaatccaatgattctttgctgcgccattttaaagacacctcgacgttatacctggagattgtcgattatcccggcgaatggctgctcgacttgccgatgctggcgcaggattacctgagctggtcccggcaaatgaccggcttactgcaagggcagcggggcgaatggtcggccaaatggcgtcagctatgccaggggctggacccgctggcgcctgctgatgaaaatcgcctggcggagatcaccgcggcctggacggcgtatctgcaccaatgtaaacagcaagggctgcactttattcagcctggtcgctttgtgctgccgggcgatatggcgggcgcacctgcgttgcagtttttcccgtggccggatgtggatgcgcatggcgaatcgatactggcgcaggcggataaacacaccaacgccggaatgttgcgtgaacgctttaattactactgtgaaaaagtggtgaaagggttctataaaaaccatttcctgcggtttgatcgccagattgtactggtggattgcctgcaaccgttgaacagcgggccgcaggcgttcaacgatatgcgtctggcgctgacgcaattgatgcagagtttccactatggtcagcgaacgctatttcgccgactcttttccccggtgattgataaactgctgtttgcggcgaccaaggcagaccatgtgactgtcgatcaacatgccaatatggtctctttgctccagcaactgattcaggatgcctggcaaaacgcggcgtttgaaggcatcagcatggattgtctgggactggcgtccgtacaggcgacgaccagtggattgatcgacgtgaatggtgaaaagatcccggccttacgtggtaaccgtttaagcgatggaacgccgttaacggtataccccggcgaagtgcccgcacgcctgccgggacaagcgttctgggacagtcagggtttccagtttgaagcgtttcgcccgcaggtgatggatgtggataaaccattgccgcacattcgtctggatgccgcgctggaatttttaataggagacaaattgcgatga

SEQ ID NO: 73620 - DNA, 222 bp, Citrobacter koseri
atgaatactcgctggcaacgcgccgggcaaaaggtgaagccgggctttaaacttgcagggaagctggttctcctgaccgcgttacgctacggtcccgcaggcgtagcggggtgggcggtgaaatccgtggcccggcgtccgctgaagatgttgctggcgttggcgcttgagcctttactgagccgggcagcggctaaattatcccggcgttatgggcgatga

SEQ ID NO: 73621 - DNA, 360 bp, Citrobacter koseri
atgggaggaattaacctgaacaagaaattatggcgtatgccgcagcaagggatggtgcgaggggtgtgtgccggtatcgcgcagtaccttgatgtaccggtgaaactggtgcgtatcctggtggtgttgtcgatcttctttggtctggcgtttttcaccctggtggcttatatcattctctcttttgtactggacccgatgccggacagcatggcaacgggcgagcaacagccttccagcggtgaactgttagatgcggtggatcgtgaactggccgcaggcgaaaaacgtttacgcgaaatggagcgctatgtgacctctgataccttcacgttacgcagccgcttccgtcaattgtaa

SEQ ID NO: 73622 - DNA, 225 bp, Citrobacter koseri
atgagcgcgttatttctggccataccgttaaccattttcgtgctgttcgtgttaccgatttggttatggctgcattacagcaaccgttccggtcggggcgaactgtcgcaaagcgaacagcaacgtttaatgcagctaaccgacgaagcgcaacgcatgcgcgagcgtattcaggcgctggaagccattcttgacgccgaacatccgaactggagggatcgctaa

SEQ ID NO: 73623 - DNA, 669 bp, Citrobacter koseri
atgggtattttttctcgttttgccgacatcgtgaacgccaacattaatgcgctgctggaaaaagcggaagatccgcaaaagctggtgcgcctgatgattcaggaaatggaagatacgctggtggaagtccgttctaattccgcgcgcgcgctggcagaaaagaaacagttatcccgtcgcattgagcaggccgccgcgcaacaggcggagtggcaggagaaagccgagctggcgctgcgtaaagacaaagaggatctggcgcgcgccgcgctgattgagaaacaaaaactgacggatttgatcgccaccctcgatcaggaagcggcactggttgacgacacgctggtgcggatgaagaaagagattggcgagctggaaaataaactcagtgaaacccgtgcccgtcagcaggcattgacgttgcgccaccaggcggcaagctcttcccgtgatgtccgtcgtcaactggacagcggcaaactggatgaggctatggcgcgttttgaatcgtttgaacgccgtatcgatcagatggaggcggaagcggaaagccaaaactttggcaagcagagaaccctggatcagcagtttgccgatctgaaagcagatgatgaaatcagcgaacaactggcgcagttgaaagccaaaatgaagcaagataaccaataa

SEQ ID NO: 73624 - DNA, 975 bp, Citrobacter koseri
atggcagaatacaaagataaccttctcggcgaagccaacagctttcttgaagtgctggagcaggtttcccatctggcgccgctggataaacccgtgcttatcattggcgaacgcggaacagggaaagagctgatcgccaaccggctgcattttctctcaacgcgctggcaagggccattcatctcccttaactgcgccgcgctcaatgaaaacctgctcgactccgagttatttggtcatgaagcaggcgcatttaccggcgcgcaaaaacgtcatcccgggcgctttgaacgcgccgatggcggtacgctctttttggatgagctggcgaccgctcccatgctggttcaggaaaaactgctgcgggtgatcgaatacggcgaactggagcgcgtcggcggcagccagccgttgcaggttaatgtgcgtctggtctgcgcgacaaatgccgatttgccgcaaatggtgagcgaagggacatttcgcgccgatctgctggaccggctcgctttcgacgtcgtgcagcttccccctttacgccagcgtcaaagcgacatcatgttaatggccgaacactttgccattcagatgtgccgtgagattcatctgcctctcttcccgggttttaccgcgcgggcgagagaaaccctgcttcagtaccgctggccgggaaatattcgtgagctgaaaaacgtggttgagcgttcggtttatcggcatggcagcagcgattatccgttagatgaaattatcatcgacccgtttaagcgtgacattcccgaaccgacgccgccggaaacgcccgtttctgcgccatcattgccgctggatttacgcgaatttcagcaacagcaggagaaagactttctgcaaatcagtctgcaacaggcgaaatttaatcaaaaacgggcagcagaattgctgggtctgacctaccaccagttgcgcgcattgctcaaaaaacatcagatttag

SEQ ID NO: 73625 - DNA, 501 bp, Citrobacter koseri
atgaattgggataaacacgcaaccgtagaatacgcacgcagacacgctatgatgggtgcgagcctggctggcttgttaatcagctcttctgcttttgcggcgttgtctcccggcggacccgaagctacagctttaacatttaatcgctggtacatatcccagttaatacaggagaaaaatccactggctgattatgagggactccagccctacgttacagcaaacaccattgctgcgttaaagacctcaaatacagcagacccaggctccgaagatgtacccgattctgatatgttcatcaaagcccaggattttgacgatgactggcagcaaatagagatcgtctcatcagacttagatcccgtatgtacacaggtctatgtctctttcggcgctgaacagaaacacacagtaatagactgcatggtgaaagaaaacggtacctggaaagtacaatctgtcgcaggccagaaaatattgcgaaacgtaagcctgaagtaa

SEQ ID NO: 73626 - DNA, 1644 bp, Citrobacter koseri
atgcgcctggttttatcgtctctgatcgtgatggctggactcctgagtggtcaggctgcggctgcgcctgaaccgactacgcacgctgatattcgcgacagcggctttgtctattgcgtcagtgggcaggtcaacaccttcaatccacaaaaagcgagcagcggcctgatcgttgatacacttgccgcccagctgtatgacagactgctggatgtggacccttatacttatcgtctggtgtcggaactggcagaaagctgggaagtgctggacaacggcgcgacctaccgtttccacctgcgtcgcaacgtctctttccagaagaccgcctggttcacccctacccgcaagctgaacgcggatgacgtggtgtttaccttcgagcgcatttttgatcgcaaacatccctggcataacgttaacggcggcagctttccctatttcgacagtttgcagtttgccgataacgtccagagcgtgcgtaagctggacaacaatatcgtcgaatttcgcctgacccaaccagacgcctccttcttatggcatctggcgacgcactatgcgtcggtcatgtcagcggaatatgcggcgcagctgacaaagcaggatcacccggaactgattgaccgccagccggtcggcaccggcccgttccagctctcggaatatcgcgccggacaatatattcgtctgcaacgtcatgagggattctggcgtggtaaaccgctgatgccgcaggtggtggttgacttaggctccggcggcacaggccgtttatcgaaattgctcaccggcgaatgcgatgtgctggcctggcccgccgccagtcagctcacgattctgcgcgacgatccgcgcctgcgtttgacgctgcgccccggtatgaacatcgcctacctggcctttaataccgataagccgccgctgaataatcccgccgtgcgccatgcgctggcgttgtcgatcaacaaccagcggctgatgcagtcgatctactacggtacagcggaaaccgccgcctctattttgccgcgcgcctcgtgggcctatgacaacgaggctaaaattacagaatacaatccggctaaatcccgcgagcagttgaaagcgctggggctggaaaacttaacgctacagctgtgggtgccgaccagttcccaggcctggaaccccagcccgctgaaaaccgccgagctgatccaggcggatatggcgcaggtcggcgtaaaagtggtgattgttccggtagaaggtcgtttccaggaggcgcggttaatggacatgaaccatgatctgacgttgtccggttgggcaaccgacagtaacgatccagacagtttcttcaggccgttgctgagctgcgccgccattaactcacaaaccaactttgcacactggtgccatcctgagtttgacggcattctgcgaaaagcgctctcgtcccagcagcttgcggcgcgtattgacgcgtatgatgaagcgcaaaatattctggcaaaagagctgccgatactgccgctcgcctcctcgctgcgtttacaggcttatcgctatgatattaaagggctggttttaagtccctttggtaacgcctcgtttgccggtgtttcgcgggaaaaagaagatgaggtgaaaaaaccatga

SEQ ID NO: 73627 - DNA, 966 bp, Citrobacter koseri
atgattattttcaccctgcgtcggtttctgctgctgttggtcacgctgttctttctgacctttatcggctttagcctgagctatttcacgccccatgcgccattacagggcgcatcgttgtggaacgcctgggttttctggtttaacagcctgatccactgggattttggcgtttccagcattaacggccagctgatctctgaacagctcaaagaggtttttcccgccacgatggagctgtgcattctcgctttcggctttgccctgatggtcggaatccccgtggggatgctggcaggcgtaacgcggaataaatggccagaccgtttcatcagcgccctcgccttagtgggattttcgattccggtcttctggctggcgctgctgttgacgctgtttttctcgctcacgctcggctggctgccggtatcaggtcgttttgatctgctttacgaagtgaagccggtcaccggtttcgccattattgatgcctggatttccgactcgccctggcgcgatgagatggtgatgagcgcagtgcgccatatggtattgccggtgctgacgctggccgtcgcccccaccacggaagtgattcgtctgatgcgcatcagcactattgaagtgtatgaccagaattacgtgaaggcagcggcgacgcgcggtctgtcacggctgacgattctgcgtcggcatgtgctgcacaacgcgctgccgccggtgatcccgcgtctcggcttgcagttttccaccatgctgacgctggcgatgatcaccgagatggtctttagctggccggggctgggacgctggttgatcaacgctatccgccagcaggactacgccgctatttccgcaggcgtaatggtggttggttcgctggtgattatcgtcaacgtgatctctgatattttgggtgctatggctaaccctctgaaacataaggaatggtatgccttacgatag

SEQ ID NO: 73628 - DNA, 891 bp, Citrobacter koseri
atgccttacgatagtgtgtacagcgaaaagcgcccaccgggaacgctgcgcactgcctggcgcaaattttatggcgacgcttctgcgatggtcggtctttacggctgcgcaggtctggtggtgctgtgtatttttggcagttggtttgctccctacggcatcgatcagcagttcctcggctaccagttgctgccgccgtcctggtcgcgctatggcgaagtctcattttttctggggacggacgatctggggcgtgacgttttaagtcgcctgctgagcggcgcggcgcccaccgtcggcggcgcgtttatcgtcacgctggcggcaacgctgtgcggcctgattctgggcgttgtcgccggggctacgcacggcttacgctccgccgtactcaaccatattctggacaccctgctctctattccgtcgttgctgttggcgattatcgttgttgcctttgccgggccgcatctgagtcacgcaatgtttgccgtctggctcgcactgctgccgcgtatggtgcgctcggtctacagcatggtgcatgacgagctggaaaaagagtatgtgatcgccgcgcgcctcgatggcgccaccacgctcaatattctctggtttgctattctgcccaatattaccgccggtctgattaccgaaatcacccgcgcgttgtcgatggcgatcctcgatatcgccgcgctcggttttctcgacctcggcgcgcaactcccttctcctgaatggggcgccatgcttggcgacgcgctggagttgatatatgtcgcgccgtggacggtgatgttacctggcgcggcaattatgatcagcgttctgctggtgaacctgcttggcgacggcatccggcgcgcgattatcgcgggggtggaataa

SEQ ID NO: 73629 - DNA, 993 bp, Citrobacter koseri
atgccgttactggatatccgcaacctgaccattgaatttaaaaccggcgaagactgggttaaagccgtagatcgggtcagcatgacgttaaatgaaggggaaattcgtggactggtcggcgaatccggctccgggaaaagcctgatcgcgaaagccatttgcggtgtggcgaaagacaactggcgcgtcaccgccgaccgtatgcgctttgacgatatcgacctgctgcgtctttccgcgcgcgagcgccgcaaactggtcggccataacgtgtcgatgatctttcaggaaccgcagtcgtgccttgatccttcagagcgcattggccgtcagctgatgcagaatattcccgcctggacctataaaggtcgctggtggcagcgtattggctggcgaaaacgccgtgccattgaactgttgcaccgggtcggcattaaagatcacaaagacgcgatgcgcagttttccgtatgagctgacggatggcgaatgtcagaaagtcatgatcgccattgcgctcgccaatcagccgcgcttgctgattgccgacgaaccgaccaacgcgatggaacccaccacccaggcgcagattttccgcctgctgacgcgcctgaaccagaacagcaataccactattttgctgatcagccatgacctgcaaatgctcagccagtgggcagacaaaattaacgttctgtattgcgggcagacggttgaaactgcgcccagtaaggatctggtggcgacgcctcaccacccttatactcaggcgctcatccgcgcgataccggattttggcagcgccatgccgcataaaagccgcctgaataccatgccaggggcaatcccgctgctggaacaattaccgataggttgtcgtctggggccgcgttgcccgtatgctcaacgagaatgcattgaaaccccgcgtctgaccggggcgaagaatcatctctacgcctgtcatttcccgctgaatatggagaaagagtga

SEQ ID NO: 73630 - DNA, 807 bp, Citrobacter koseri
atggtggaaactctgctcgaagtgcgtaacctgagtaaaaccttccgctaccgtacaggatggttccggcgtcagaccgtcgaggcggtaaagccgctcagcttcaccttacgcgaacgccagacgctcgccattattggcgagaatggctccggcaaatccacgctggcgaaaatgctggcaggaatgatcgcgccgaccagcggcgaactgctgattgacgatcatccgctgaaatacggcgactactcgtttcgcagccagcgtatccgcatgatttttcaggacccgtcaacgtcactcaatccgcgacagcgcatctcgcagattctggatttcccgctgcggttgaacaccgatctggaaccggagcagcgacgtaagcagattattgaaaccatgcggatggtcggccttctccctgaccacgtcagctattatccgcacatgctggcgccagggcagaaacagcgtctgggattagcccgcgccctgattttacgcccgaaggtgatcatcgccgacgaagcgctggcttcgctcgatatgtcgatgcgctcgcagctcatcaacctgatgctggaactccaggaaaaacaggggatttcgtatatctacgtcactcagcatctggggatgatgaaacacatcagcgatcaggtgctggtcatgcaccagggcgaagtggtcgaacgcggcagcactgctgatgttctcgcctctccgttacatgaactcacccgccgtttgatcgcaggacacttcggcgaagccctcaccgccgacgcctggcgaaaagatcgctag

SEQ ID NO: 73631 - DNA, 834 bp, Citrobacter koseri
atgagaaaatattcctggctgatcctgtgtctggcgctggctgtgctactggcgtccgctttcgcattcactcgcgctgacaaccagactgaaccggcattcggctacactctggacttcaaaaaaccgttgtccgggatcgacaatttatcctccctgagctacgtgcccgaagaagatgtttttgtcgccaccctcaacagacccgccaccatcctcaaactgtctaaaaatggagaaatactcgccagaaaaagcatcgcagatcggattaaagatgctgaatcaatcgaatacgcgggtaacgggacatacttactggtcgatgaagcagactccgcgatgtatgtttaccagctcagccagaatctggacgtcaggtcagtgagaaaaatagaaacagacctgtttgagaacgcgcgcaatcggggaatcgaaggcattgcctggatggccggacgaaatgaactctatttcgccaaagaacgtaaaccggtcatgctgtaccgaacccaaagcgacggcggccttactcatttttctgagatcgtcccactggatgatctgattaaaaatctggacgtagacgatatctccgtccttcacatccacggtgaacatctgctgatcttatctgatgagtcacgcagcctgacagagatagacctgaacggcaatgtgctgcgccggatgtcattaacgcagggcgaaaatggtcttgaggaagatatcccgcaacctgaaggcgtgtcgatggataaggctggcaacatttatattatgagtgagccgaacctgttttatcgatttgaaaaggtctcgactggcaggtaa

SEQ ID NO: 73632 - DNA, 789 bp, Citrobacter koseri
atgggttttctttccggtaagcgcattctggtaacgggtgttgccagcaaattgtccatcgcctacggtatcgctcaggcgatgcgccgcgaaggagctgaactggcgttcacctaccagaacgacaaactgaaaggccgcgtggaagagtttgccgctcaactggattccagcatcgtgttgcagtgtgatgtggctgaagatgccagcatcgacgctatgtttgccgagctgggtaaagtctggccgaaattcgacggtttcgttcactctatcggcttcgcgcctggcgatcagctggatggcgactatgtgaatgccgttacccgtgaaggctttaaaatcgcgcacgacatcagctcttacagctttgtggcgatggcaaaagcttgccgtaccatgctgaatccgggttccgccctgctgaccctgtcttatctgggtgctgagcgcgcaatcccgaactacaacgtcatgggtctggcaaaagcgtctctggaagcaaacgtgcgttacatggctaacgcgatgggcccggaaggtgttcgtgttaacgcaatctccgcaggtccgatccgtactctggccgcgtccggcatcaaagatttccgtaaaatgctgtcgcattgcgaagcggttacgccgattcgccgcaccgttaccattgaagatgtgggcaactctgccgccttcctgtgctccgatctgtctgccggtatctccggtgaagtcgttcacgtcgacggcggtttcagcatcgcagccatgaacgaactggaactgaaataa

SEQ ID NO: 73633 - DNA, 1158 bp, Citrobacter koseri
atggaacaacgccgaattgaaggcaaaagccactggtatcatgaaacccagtccagcacttatccgcaagaggttctcccgctggtgccggaagccgcgaacgtcgaggacagttttctgctggatttagcgatcgccgaagacgtgcttttaccctttcagtcctggttgcaccctgcccgtcaacttgctcaacgcctctttcccgagcgcgtcacacagaatcgtctccacacgttcagcgcctatgaacggatgagtaccgcattgaccgttgcccaggtctatggcgtacagcggctctgtaaccattacgccgcgcgactgaccccgcttcccggcccggactcttcccgggagagtaaccaccgactggcgcaaatcacgcaatacgcgcgtcaactggccagttcccctgcggtcattaatgcccgcgaccgccagcaccttgacgatgtgggtctgacgacctgcgacatcattctgataaaccagattattggttttgtgggttttcaggcgcgcgtcgtggcgatatttcaggcttatcatggacaccccgttcgctgggtgccgggcctggatatacagcaattcgccgatgcgcagcttttccaggaaaaggacgcgcaatggcacccggctcaggaaggcgtggaaatacgttacgccagcgccgaacagctggagtgcctgtctcaccatcagccggttgcagaactgctgacgctcgcgccagtcctggttcacgaacccgccctgctttctttgcttggcacactgctcaccagcgccctgcgtacggatgcgccaccggcgtcgctctcgctcgccacgctgctcacgtcgcgcatcaatggcagcgtcgcctgttttaatgaacagtcacgccacgcgggcgaatgggcagagacaatttcggtgttccgccggggtgaacgggagatacagcactgggaaagccaacatccggttgagcgtcctgtcacgcaagcgatacaatggctgaccagggcgcccgatcgttttagcgctgcgcaattcacgccgttactcgaacaaggggcgtcactggaacaggccgtcaacttgctgggctggtgcggattgtgcggttggttgaaccgtttaaaaatcgcgttgggcgaaacacattaa

SEQ ID NO: 73634 - DNA, 1935 bp, Citrobacter koseri
atgtttcaggacaacccgctgctagcgcagcttaaacagcaactacattcccagacgccgcgtgctgaaggggtggtaaaagccacggaaaaaggctttggcttcctggaagtcgatgcacaaaaaagttatttcatcccgccgccgcagatgaaaaaagtcatgcacggcgaccgcattgtcgcggtgatccatacggaaaaagaacgcgagtccgccgagccagaagaactgatcgagccgttcctgacccgcttcgtgggcaaaatccagggtaaaaacgatcgtctgtccatcgtaccggatcatccgttgctgaaagacgctatcccatgccgtgccgcccgtggcgtggaacacgaatttaaagagggtgactgggccgttgctgaaatgcgccgtcatccgctgaaaggcgaccgctctttctacgccgagttaacccagttcatcaccttcgccgacgaccacttcgtaccatggtgggtcacgctggctcgccataatctcgaaaaagaagcgccgaacggcgcggcgacagaaatgcttgatgaaggtctggtacgccaggatctgaccgcgctggattttgtcactatcgacagcgccagcaccgaagacatggatgacgccctttatgcgcaagagttgggcgaaggtaagctgcaactgacggttgcgattgctgacccgaccgcgtggattgcggaaggcagcaagctggataacatcgcaaaaatccgggcgtttaccaactatctgccgggcttcaacatcccgatgttgccgcgcgaactgtctgacgacctctgttccctgcgcgcgcaggaagttcgtccggcactggcctgccgcatgaccattgccgccgacggcactattgaagatgacatcaccttctttgcggccacgatcaagtcgaaagccaaactggcctacgacaatgtctccgactggctggaaaataccggcagctggcagcctgagagtgacgctatcgcccaacagatccgcctgctccagcgtatttgcctgagccgtggcgaatggcgtcacaaccatgcgctggtgttcaaagatcgcccggactatcgctttattcttggagagaaaggcgaagtgctggatatcgtcgcggaacctcgccgcattgcgaaccgcattgtggaagagtccatgatcgcggcgaacatttgcgccgcccgcgtgctgcgcgacaaactgggctttggtatttacaacgttcatatgggctttgacccggccaacgccgacgcgctggcagcgttgttgaaaacgcatggcctgcacgttgacgcaggagacgtattaaccctggaaggtttctgcaaactgcgccgcgagctggatgcccaaccgtccggtttcctggacagccgtattcgtcgcttccagtcattcgcagagatcagcaccgaaccgggccctcactttggactgggtctggaagcgtatgcaacctggacctctccgattcgtaaatacggcgacatgattaaccaccgcctgctgaaggccgtcatcaaaggcgaaaccatcgcgcgtccacaggaagagacaacgcagcagatggctgaacgccgccgcctgaaccgtatggcggaacgtgacgtcggagactggttatatgcgcgtttcctgaatgataaagctggtacagaaacacgctttgcggcggaaatcgttgatatcagccgcggcgggatgcgcgttcgcctggtcgataatggcgcaatggcctttatcccggcgccattcctgcatgccgtacgtgacgagctggtttgcagccaggaaagcggcaccgtgcagatcaaaggtgaaacggtatacaaagtgacggatgtgatcgatgtaacgatcgcggaagttcgcatggaaacccgtagcattatcgcccggcctgtcgcctga

SEQ ID NO: 73635 - DNA, 1992 bp, Citrobacter koseri
atgaaagacgttctggagcctgtttcattgtttagcgatttgggaacccatagcccttactggcgtttatcggatgactgcgacaccctgcgtttatccgcgactgaggctgccgacgctgaccagaccgttgcgttatcttccgagcaggctgaccgcatccgggagatgaccgtcatcacgtcaagcctgttactcacccttcccggtgaacataatgccgttcccgtgcaacttgtcgggcgaaaaatcaacaagcgcgaatgggcaggaaacgtatcggtctggcatgatgcgccctcagatacgcaggaggccgttctgggactctcctttgccgagcaggtggtatcagaggccaactcagcgatcgtgatccttgacagccgcgggaatatccagcgttttaaccgtctttgcgaagaatacaccgggttaaaagaacatgacgtcattgggcaaagcgtcttcaaattatttatgagccggcgcgaagccgcggcctccaggcgcaacatcagcggttttttccgcaacggcaactcttatgagatcgaacgctgggtaaagacccgcaaaggccagcgcctgtttctgtttcggaataaatttgtccatagcggcagcggtaagaacgaaatctttttaatctgttcaggcaccgacattaccgaggagcggcgtacgcaggagcgtttacgcgtactggcgaatacggacacaatcaccgggctgcctaaccggaatgccattcatgagctgattaacgatgccattgaaaacgcgggcgacaatcaggtcggtatcgtctatctggacctggacaacttcaaaagggtgaacgacgcctacgggcatatgtttggagaccagttgctacaggccgtctcgctggcgatcctgagttgccttgaggagaatcaactgctggcccgcctcggcggcgatgaattcatcgttctcgccacgcagacttcgcaagggtcgctggaggccatggcatcgcgaattctcacacgcttacgtcaaccctttcgcattggccttatcgaggtgtataccggctgttctatcggtatcgcccttgcgccgcagcatgggcatgacagcgaaagcgtgattcgtaatgcggataccgcaatgtacaccgcgaaagaaggcggacgtggacagttttgcgtgttctctcctgagatgaaccagcgcgtctttgagtatctttggctggatacaaatctgcgcaaagcgctggaaaacgatcagctcctgatccactaccagccgaagatgacctggcgcggcgaagtccgtagcctcgaagcgctggtgcgctggcaatcaccggaacgcgggttaattcccccgctggagtttatctcctacgccgaagagtctgggctgattgtcccgctggggcgatgggtgatgatggatgttgtacggcaggtcgccaaatggcgcagcaaaggcatcaacctgcgcgtcgcggtgaatgtatccgcccgccagctcgcggatcaaactatttttaccgacctgaagcaggtgcttcatgaactgaacttcgaatattgcccgattgatgtcgaactgacagaaagctgtttgattgaaaacgaagagctggcgctgaccgtcatccagcaattcagccagcttggcgcgcagatacatctggacgattttggcaccggctactcgtcgctttctcagcttgcccgcttccccattgatgcggtcaagctggatcagacgtttgtcagagacattcataagcggtcggtttcgcaatcgttagtacgcgcgatcgtcgccgtagcgcaggcgttaaatctacaggtgattgcggaaggcgtcgaaagcgcaaaagaagatgcgtttttaaccaagaatggcgtcaacgagcggcaggggttcctgtttgccaaacccatgcccgccgccgcttttgaacgctggtataaacgctatctgaataaaaagatgcgctga

SEQ ID NO: 73636 - DNA, 183 bp, Citrobacter koseri
atgtctgatatcgacgcccaacgtgttgccgaacgcattgataccgtgctggatatccttgttgctggcgattaccactctgccatccacaaccttgaaattcttaaagcggagttgttaagtcaggtgaaagaagataccgacgcctcctcgacgaaaccccgggctccgtgggagatctaa

SEQ ID NO: 73637 - DNA, 723 bp, Citrobacter koseri
atggtcattgataaaggccagatgagcgtggctgagctggcgaaaatcaccggcgtctctgaagtcacgatccgacaggatcttaacaccctggaaaaacagagctatctgcgccgtgcgcatggttttgccgtctcgctggacagcgatgacgtcgaaacgcgcatgatgaccaattacacgctcaaacgcgaactggctgaatttgccgcatcactggtcagccccggcgaatcggtgtttattgaaaacggcagcagcaatgccctgctggccagaacgttagcggaacaaaaggatgtcaccattattacagtgagtagctatatcgctcacttgctcaaagagacgccgtgcgaagtgatcctccttggcggaatctaccagaaaaaaagtgaaagtatggtcgggccattgacccgccagtttatccagcaggttcacttcagtaaggccttcatcggtatcgatggctggcagtcggataccggttttaccggacgggacatgatgcgatcggatgtggttaatgccgtactggaaaaaggctctgaagccattgttctgacggacagctctaaattcggcgcagtacatccttatacgctggggccgttaacacgttttagccgcgttatcaccgattccagaataagtgcggaccatcaaatgcaactggaacgcaccgggctgacggtgaacatcatcgaacctcgcgcctga

SEQ ID NO: 73638 - DNA, 219 bp, Citrobacter koseri
atgtttatgacgagcaaaaaaatgaccgccgctgttctggcaattaccctggcgatgtctctgagcgcttgctctaattggtctaaacgtgaccgtaacactgcgatcggtgcaggggctggggcgttgggcggtgccattttaactgatggtagcacgctgggtacacttggcggggctgcggtaggtggtgttatcggccatcaggtaggtaaataa

SEQ ID NO: 73639 - DNA, 327 bp, Citrobacter koseri
atgaacaattctgacagccgtctggtctattccacggaaacgggccggattgacgaaccgaaagcggcggttgaacgcccaaagggggatggtatcgtccgtattcagcgccagaccagcgggcggaaaggtaagggtgtgtgcctcgttaccggcattgatatggatgatgctgaactgaccaaactggccgctgagctgaagaaaaaatgcggctgcggtggggcggttaaagagggaataattgaaattcagggcgataagcgcgatctgattaaatcattactggaagccaaaggaatgaaagttaaactggctggcggctaa

SEQ ID NO: 73640 - DNA, 738 bp, Citrobacter koseri
atgacgtttactgcttcatcttcttcccgcgctgttaccgattctcctgtcgttgttgctctggattataataatcgtgataacgcgctggctttcgtcgacagaatcgacccgcgtgattgccgcctgaaagtcggcaaagagatgttcacgctgttcggcccgcagttggttcgtgatttgcagcagcgcggcttcgatatctttcttgacctgaaatttcatgatattccaaataccacggcacatgccgttgcggcggcggcagatctgggcgtatggatggttaacgtccatgcgtcgggtggggcgcgaatgatgaccgcagcgcgcgaagccttactgccgctgggtaaggatgcgccattgctgattgcggtgacggtactgaccagcatggaagccagcgatctggcggatcttggcgtgacgttgtcaccggctgagcatgcggaacgtctggcgcgcctgacgcaaaattgcgggctggatggcgtggtctgctcggcgcaggaagcggtgcgctttaagcaggaatttggcgcagagtttaaactggtaacgccgggtatccgtcctcaggggtctgacgctggcgatcagcgccgtatcatgacgccggaacaggcgctggcggcgggcgtggactatatggttataggacgaccggttacgcagtctgctgaccctgcgcaaaccctgaaggccattaatgcatcactgaaacggggagcctga

SEQ ID NO: 73641 - DNA, 1170 bp, Citrobacter koseri
atgctggagttgttgtttctgcttttacctgtagcggcagcctatggctggtatatgggtcgcagaagtgcgcaacaaacaaaacaggacgaagctaaccgtctttctcgcgactatgtggcgggggttaacttcctcctgagtaaccaacaggataaagcggtggatctgttcctcgatatgctgaaagaggataccggcaccgttgaggctcatctcactcttggaaacctgtttcgttctcgcggtgaagtagaccgcgccatccgcatccaccagaccttaatggaaagcgcgtcgctgacttatgagcagcgtctgctggctgtgcagcaactggggcgtgattacatggcggccgggttgtatgaccgggcggaagatatgttcaaccagctcacggatgaaacggatttccgcgtaggggcgttgcagcagctgttgcaaatttatcaggcgaccagcgactggcagaaagcgattgatgtggctgagcggctggtgaagctcggcaaagacaaacagcgcattgagatcgcacatttctattgtgagctggcgctgcaacagatgggctgcgatgatatggatcgcgccatgacgttgctgaaaaaaggcgccgccgcagacaaaaacagcgcccgtgtttctatcatgatgggccgtgtgtttatggcaaagggggaatacgccaaagcggtggagagcttacagcgggttatctcccaggataaagagctggtcagtgaaacgctggagatgttgcagacgtgctatcagcagcttggtaaaaatgatgaatgggcggagttcttacgtcgggccgtggaagaaaacaccggcgccgccgctgagttgatgcttgccgatattctggaagcgcgggaagggcacgacactgcgcaggtctatatcactcgccagttacagcgccatccgaccatgcgggtgtttcataagctgatggattatcacctcaatgaggcagaagaagggcgcgcgaaagagagcctgatggtgctgcgtgatatggtcggtgagcaggtacgcagcaagccgcgttatcgctgccagaagtgcgggtttaccgcctataccatgtactggcattgtccttcctgccgggcgtggtcgacgattaaacctattcgcggccttgacgggcagtag

SEQ ID NO: 73642 - DNA, 309 bp, Citrobacter koseri
gtgaaatatttactcattttcttactggtgttggcgatttttgttatttcggtgacattgggtgcgcagaacgatcaacaggtaacgtttaattatctgctggctcaaggggagtaccgtatttctacgttgcttgccgttttatttgccgcaggctttgctattggttggctaatttgcggcctgttctggctgcgtgttcgcgtctccctggtgcgtgccgaacgtaaaatcaaacgactggaaaaccagctttcgcctgcgaccgacgttgcggtatctgccgattcgtcggttgtgaaggaataa

SEQ ID NO: 73643 - DNA, 765 bp, Citrobacter koseri
atgctttcgattgcgaagcgcacaaccgtaggcgctgctctgttgcttgtgatgccggttagcgtatggatttcaggctggagctggcaacccggacactcggtctggtggttaaaatccttatactgggtgacagaaacggtgacgcagccgtggggaattattacgcatgtgcttctgtgcgcctggtttctttggtgcctgagatttcgcctgaaagccgcaatgatgctttatgctattctggccggtgcgatcctgctggggcagggggtaaaatcgctggtgaaggagcgggtgcaggaaccccgaccttttgttatttggctggaaaaaacgcaccatattcccgttgatgagttctacactttaaaacgtaaagaacgcgggcacttagtcaaagaacaactgtccgggcagcaggatattccggcttttctgcgtcaacactggcaaaaagagaccggattcgcgtttccttccgggcataccctgtttgccgcaagctgggcgttgttggcggtaggactattatggccgcgcaggcgtacccttacgattgcgattttgttagtctgggcgacaagtgttatgggcagtcgcctgttgttgggtatgcattggccgcgcgatttagttgtcgcgacgttgatatcctggcttctggtgacgctggcgacctggcttgctcagcgcatttgcgggccgcttacgccacccgttgaagaggctcgcgagatagcgcagcgggagcaagaacgttga

SEQ ID NO: 73644 - DNA, 591 bp, Citrobacter koseri
atgcagcttaaacgagtggcagaagccaaactgccaaccccatggggcgatttcctgatggtgggatttgaagaactggcaaccggacacgaccacgtcgcgctggtttatggcgatatctctggtcaaacccctgtcctggctcgcgtccattcagaatgtctgaccggcgacgcattgtttagtctgcgctgcgattgtggttttcagttagaggcggcgctgacgcatatcgcggaagaaggtcgcggtattctgctctaccaccgtcaggaaggacgtaatattggcctgctcaataagattcgcgcctacgcgttacaggatcagggctacgataccgtagaagccaaccatcagctggggtttgccgccgatgagcgtgatttcaccctgtgtgccgatatgtttaaactgctgggcgtcgatgaagtccgtctgctgaccaataacccgaagaaagtcgaaattctgacggaagcaggtatcaatattgttgagcgcgtaccgctgattgttggccgtaacccaaataacgaacactacctagataccaaagccgctaagatggggcatttattgggtaaataa

SEQ ID NO: 73645 - DNA, 2676 bp, Citrobacter koseri
atgtcgtcaaccctacgagaagccagtaaggacacgttgcaggccaaagacaaaacctatcattactacagtctgcccctggctgccaaaaaactgggcgatattacccgcttgcccaagtcgctaaaagttctgcttgaaaatctgctgcgttggcaggacggtgactctgttaccgaagaagatattcaggcgttagccgggtggctgaaaaaagcccatgccgaccgcgaaattgcctatcgacccgcccgtgtattaatgcaggattttaccggtgtcccggcggtggtggatctggccgccatgcgcgaagcggtcaaacgcctcggcggggatactgcgaaagtgaatccgctatccccggtagaccttgttattgaccactcggtaacggttgatcgctttggcgatgatgacgctttcgaagagaacgtgcgtctggaaatggaacgcaaccatgagcgctatgtgttcctgaaatgggggcaacaggcttttagtcgcttcagcgtggtgccgccaggaaccgggatctgccaccaggtgaacctggagtaccttggcaaggccgtctggagcgaattgcaggcaggagagtgggtcgcatacccggacacgctggtcggtaccgactcccacaccacgatgatcaacggccttggcgtgctgggatggggcgtcggggggattgaagcggaagccgcgatgctgggccagccggtctcaatgctcattcccgatgttgttggcttcaagttgaccggtaagctgcgtgaaggtatcaccgcgaccgacctggtgctgaccgtgacccagatgctgcgtaaacacggcgtcgttggtaaattcgttgaattctacggcgacggtctggactccttgccactggccgatcgcgcgacgatagcaaacatgtcgccggaatatggcgcgacctgcggcttcttcccgattgacggcatcaccctcgaatatatgcgtttaagcggccgtagcgaggagcaggttgagctggtcgaaacctatgccaaagcgcaggggatgtggcgaaaccctggcgatgaacctgttttcaccagttcgctggaactggatatgggggatgtcgaggcgagccttgccgggccgaagcgcccgcaggatcgggttgcgctggcggatgtgccgaaagctttcgccgcgagcacggagctggaactgaacaccgcgcaaaaagaccggcagccaatcgattatgttatgaacggccatcaataccagctcccggacggcgctgtcgtgattgcggctatcacctcctgtaccaatacttcaaaccccagcgtgctgatggccgccggtttgctggcgaaaaaagcggtaacgctgggactgaaacggcagccgtgggtgaaagcctcgctggcgccgggatcgaaagtggtctcggattacctggcgcaggcgaaactcacgccttatcttgatgagcttggctttaatctggtggggtatgggtgcaccacctgtattggtaactccggcccactgccggagcctatcgaaacggcaatcaaaaagggcgacttgacggtaggcgcggtactttccggcaaccgtaactttgaaggccgaatccatccgctggtgaaaaccaactggctggcgtcgccgccgctggttgtcgcctatgcgctggcgggcaatatgaatattaacctggcgaaagagccgctgggccacgatcgcaaaggcgacccggtttatctgaaggatatctggccttccgcgcaggagatcgcccgcgccgttgaactggtgtcgtcggaaatgttccacaaagagtatgccgaggtttttgaagggacgccggaatggaaagcgatcaatgttgatcgctcagacacctatggctggcaggatgactccacctatatccgcttgtcgccgttctttgacgaaatgcaggttcaacccgatccggtggaggatattcatggcgcccgtattctggccatgctgggtgattccgtcaccactgaccatatctccccggcgggcagcataaaggcggacagcccggcagggcgctatttgcagaatcatggcgttgagcgtcgggacttcaactcctacggttcgcgccgtggaaaccatgaagtgatgatgcgcggtacgtttgcgaatattcgtatccgcaacgaaatggttcccggcgttgaagggggaatgacccgacatttgccggggacggaggtgatctccatctatgatgcagcgatgctgtatcagcaggagaaaacgccgctggcggtgattgcgggtaaagagtacggttccggttccagccgtgactgggcggccaaaggcccgcgtttgctgggtattcgcgtcgtgattgctgagtcgtttgaacgtattcaccgttcaaacctgattggtatggggattctaccgctggagttcccgcagggcgttacgcgtaaaacgctcgggttaaccggcgaggagacaattgatattgccagtctgcaaaacctgaagcctggcgccgccattccggtgacgttaaccaaagtggatggcagcacagaggtgatttcgtgccggtgccgtatcgataccgcaactgaattaacctactaccagaatgacggcattctgcattatgtgattcgtaatatgttgcattaa

SEQ ID NO: 73646 - DNA, 129 bp, Citrobacter koseri
atgccttctggaaaccaggaaccccgcagggaccccgagcttaaacgcaaagcatggctggcggtattcctcggctctgcgctgttctgggttgtgattgcgctggttatctggcaagtgtgggggtaa

SEQ ID NO: 73647 - DNA, 975 bp, Citrobacter koseri
atgaaattacagcagcttcgctacattgttgaggtggttaatcacaaccttaatgtctcttccaccgccgaagggctttacacctcccagccgggcatcagtaagcaagttcgtatgctggaagatgagcttggcatccagattttcgcgcgcagcggtaaacacctgacgcaagtgacgccagccgggcaggaaattattcgtattgcgcgcgaagtgttgtccaaagtcgatgccatcaagtccgtggcgggcgaacacacctggccggataaaggttctctgtatattgccaccacgcacactcaggcgcgctatgcgctgccaaatgtgatcaagggctttattgagcgctatcctcgcgtttcattgcatatgcatcaggggtcgcccacgcaaatcgcagaagcggtttcgaaagggaatgccgacttcgctatcgctaccgaagcgctgcacctgtatgacgatctggtgatgctgccatgctaccactggaatcgctctatcgtcgtcacgccagagcacccgctggccgctaaatcatcggtgacgattgaggaactggcacagtatccgctggtgacctacacctttggctttaccgggcgctccgagctggataccgcgtttaatcgcgccgggctgacgccgcgtattgtctttacggcaaccgatgcggacgtgataaaaacatacgtccggcttggcctgggggttggggtgattgccagcatggccgtcgatccgatttccgacccggacctggtgcgtgtcgatgcgcatgatattttcagccatagcaccacgaaaattggttttcgccgcagcacgtttttacgcagctatatgtacgactttattcaacgctttgcgccgcatctgacgcgcgatgttgtggataccgccgtggccttgcgttctaacgaagaaattgaagccatgtttaacgatattaaattaccggaaaagtaa

SEQ ID NO: 73648 - DNA, 2598 bp, Citrobacter koseri
atgggtaaagctcttgtcatcgttgagtccccggcaaaagccaaaacgatcaacaagtatctgggtaatgattacgtggttaagtccagcgtcggtcatatccgtgatttgccgaccagtggctcagcagctaaaaagagcgccgactctacctccaccaaaacggctaaaaagcccaaaaaggatgaacgtggcgctctcgtcaaccgaatgggggttgacccttggcataactgggatgcgcagtatgaagtgctgcccggtaaagagaaggtcgtctctgaactgaaacaattggctgaaaaagccgaccacatctatctcgcaaccgaccttgaccgcgaaggggaagccattgcctggcacctgcgggaagtaatcgggggtgatgacacgcgctatagccgcgtggtgtttaacgaaataaccaaaaacgcgattcgccaggcgtttgataagccaggcgaactgaatatcgaccgtgttaacgcgcagcaggcgcgccgctttatggaccgcgttgtgggctatatggtgtcgccattgctgtggaaaaaaattgcgcgaggcctgtcggcaggccgcgtacagtccgttgccgtgcgtctggttgttgagcgcgaacgtgacatcaaagcgttcgtaccggaagagttctgggaagtgaacgccagcacgacaacgccttctggcgatgccttgccgctcgacgttacgcaccagaatgataaaccgttccgcccggttaaccgcgagcaaacgctggcggcggtcagcctgctggaaaaagcgcgttacagcgtactggagcgtgaagataaaccgaccagcagcaagcctggcgcgccgtttatcacgtcgacgctgcaacaggcggcgagcacgcgtctgggctttggcgtgaaaaaaaccatgatgatggcacagcgcttgtacgaagcgggctacatcacctacatgcgtactgactccaccaacctgagccaggatgcggtaaacatggttcgcggttatatcagcgatagcttcggcaagaaatacctgccggagaacccgaaccagtacgccagcaaagaaaattcacaggaagcgcacgaagcgatccgtccttctgatgtcgcggtgatggccgaagcgctgaaggatatggaagcggacgcgcagaaactgtatcagctgatctggcgtcagtttgtcgcctgtcagatgacgccagcccagtacgattccaccacgctgacggtcggtgcgggtgatttccgcctgaaagcgcgtggccgcattctgcgtttcgacggctggacgaaagtcatgcctgcgctgcgtaaaggcgatgaggatcggacgttgcctgcggtgaataaaggcgatgtgttgacgctggttgaactgaccccggcgcagcacttcaccaaaccaccggcgcgcttcagtgaagcatcgctggttaaagagctggaaaaacgcggtattggtcgtccatccacctatgcgtcgatcatctcgaccattcaggatcgcggttatgtccgcgtggaaaaccgtcgcttctatgctgaaaaaatgggtgagattgtcaccgatagactggaagaaaacttccgtgagctgatgaactacgatttcaccgcccagatggaagacagcctcgacaaggtggccagtcacgaagccgagtggaaaaacgtgcttgataacttcttcagcgattttactcagcagcttgataaagcggagaaagatcctgaagagggcggcatgcgtcctaaccagatggtgctgaccagcattgactgcccgacatgcgggcgcaagatggggattcgcaccgccagcaccggcgtgttcctgggatgttccggctatgcgctgccgccgaaagagcgctgcaaaaccaccatcaacctggtgccggaaaatgaagtactgaacgtactggaaggcgatgatgcggaaaccaacgccttgcgtgcaaaacgtcgttgccagaagtgcggcaccgcaatggacagctacctgatcgatccgaaacgcaagctgcatgtctgcggtaataacccgacctgcgacggttacgaaatcgaagagggcgagttccgcattaaaggttatgacggcccgatcgttgagtgcgaaaaatgtggctctgaaatgcacctgaagatggggcgttttggtaagtacatggcctgtactaacgacgaatgtaaaaatacccgtaagattctgcgtaacggtgaagtcgcgccgccgaaagaagatccggtgccgttgccggaactgccgtgcgagaaatcggacgcgtatttcgtgctgcgtgacggcgccgcagggatcttcctcgcggcgaataccttcccgaaatcgcgtgaaacgcgtgcgccgttagtggaagagttgtaccgcttccgcgaccgtctgccggaaaaactgcgttatctggccgatgcgccgcagcaggacccggagggcaataagacgctggtgcgttttagccgtaagacgaaacagcagtatgttgccgctgaaaaagacgggaaagcgacgggatggtccgcattcttcgttgatggcaagtggatagaaggtaagaaataa

SEQ ID NO: 73649 - DNA, 252 bp, Citrobacter koseri
atgcataaagacacccaacctatcgatcgtgaaacactgctgattgaagccaacaaaatcattcgtgagcatgaggatacgctggcggggattgtcgccaccggtgtgacgcagcgaaacggcgtgctggtcttcagcggcgattattttttagacgagcaaggattaccgacgcccaaaagcaccgccgtgtttaatatgtttaaacatctggcgcatgtgctttctgagaagtatcacctgatcgattaa

SEQ ID NO: 73650 - DNA, 1047 bp, Citrobacter koseri
gtggaattgttgtctgaatatgggttgtttttggcaaaaatcgtcactgtcgtggtggcaatcgccgtcattgtgatgctgatcgtgaatgctgcccagcgtaaacgccagcgtggggagctgcgggtaacgaatctcagcgaacaatataaagagatgaaggacgatctggcgacggcgctgatggacggtcatcaacaaaaactctggcataaagcgcagaaaaagaagctgaagctggaggcaaaagcggcgaaagcgaaagcaaagcaggggggaaatgccgcgacggagaaacctcgtgcctgggtgctggattttaaaggcagtatggatgcccacgaagtcagcgcgctgcgtgaggaggtgacggcggtgttagcggcgtttaaaccgcaggatcaggtggtcgtgcgtctggaaagtcccggcggcgttgtgcatggctatggcctggcggcttcgcaattgcagcgtctgcgcgataagcagatcccgttgacggtaacggtggacaaagtcgccgccagcggcggttacatgatggcctgtgtggccgacaaaattgtttcggcgccgtttgcgattgtcggctctattggcgttgtggcgcaaatccctaactttaatcgcttcttgaaagggaaggatatcgatattgagctgcacacggcgggccagtataagcgcacgctgacgctgcttggtgagaacacggaggaagggcgtcagaaattccgtgaagatctgaatgaaacccatcacctgtttaagcattttgtgcagcagatgcgtcctgtgctggatatcgaacaggtggccacaggcgagcactggtatggccaacaggcgctggagaaaggtctggtggacgaaatcaacaccagtgatgacgtcattctccgcttgatggacggttatgaggtgttcaacgttcgctttatgcagcgtaagaaattgatggatcggtttacgggtagcgccgcagaaagcgccgatcgtttgttgctacgctggtggcagcgcggacaaaaaccgctgatataa

SEQ ID NO: 73651 - DNA, 762 bp, Citrobacter koseri
gtgcattaccaacctaaacaagatctactgcaaaatcgcattattctggtcactggcgccagtgatggcattggccgcgaagccgcgctcacctatgcgcgctacggcgcaaacgtcattttgctgggtcgaaatgaagaaaaactgcgtcaggtcgcacagactgtcgccgaagatacaggcgcattgccacagtggtttacgctggatctactgacctgcaccgctgaagaatgccaccagttaggccagcggattgcggcgcactatccacgactggatggcgttctgcataacgccgggttactgggcgatatctgcccaatgagcgaacaaaatccgcacgtctggcaggatgttatgcaggttaacgtcaatgcgacattcatgctgactcaggcgctgcttcctttattacttaaatccgacgccggttcgctggtctttacctcatcaagcgtcggtcgtcagggacgcgccaactggggcgcttacgccacctctaaattcgccaccgaaggcatgatgcaggtactggcggacgaataccagaaccaccccttacgtgtaaattgcatcaacccaggcggcacgcgcacgagtatgcgcgccagcgccttccctacggaagatccgcagaagttaaaaacgcccgccgatatcatgcccctctatttgtggctgatgggcgacgacagccgccgtaaaaccggtatgacttttgatgcccagccgggccgtaaaccaggaatcgcccaatga

SEQ ID NO: 73652 - DNA, 591 bp, Citrobacter koseri
atgactgaagaacgctatcaacaacgccagcagcgtgtgaaagaccgggtcgacgcccgcgttgcggcggcgcaggacgaacgcggcatcatcatcgtgtttaccggcaacggtaaaggcaaaaccacggcggcattcggtaccgcaacgcgcgccgtcggccacggtaaaaaagtgggcgtggtgcagttcattaaaggcacatggcctaacggtgagcgcaatctgctggagccccacggcgtggagtttcaggtgatggcgaccgggttcacctgggaaacgcaaaatcgcgaaaccgacaccgcagcctgtatggctgtctgggaacatggcaaacgtatgctggcggacccaacgttggatatggtcgtgctggatgaactgacctacatggtggcgtatgactatctgccgcttgaagaggtcatcaatgccttaaatgcccgtccacagaatcagacggtgattattactggtcgcggttgtcatcgcgatattctggaactggccgacacggtcagcgagctgcgtccggtcaaacatgcttttgaagcgggcgtgaaggcccagatgggaattgattattag

SEQ ID NO: 73653 - DNA, 876 bp, Citrobacter koseri
atgagcgaaaagttacaaaaagtgctggctcgcgctggccacggttctcgccgtgaaattgaatccattattgaagcaggccgcgtaagcgttgacggcaaaatcgccacgcttggcgatcgcgttgaaatcacgccgggtctgaaaatccgtatcgacggtcatctgatctcggtgaaagagtctgcggaacaaatttgtcgcgttctggcctattacaaaccagaaggtgagctgtgtacccgtaacgacccggaaggtcgtcctaccgtttttgatcgcttaccgaaactgcgcggcgcacgctggattgccgtaggtcgtctggatgtgaatacctgtggtttgctgttgttcacgacggatggcgaactggcgaaccgtctgatgcacccgagtcgtgaagttgagcgtgaatacgccgtgcgcgtatttggtcaggttgatgacgccaagctgcgtgacctgagtcgtggcgttcaactggaagatggcccggcggcgtttaagaccatcaaattcagcggtggtgagggcattaaccagtggtacaacgtcacgctgaccgaagggcgtaaccgtgaggtacgtcgtctgtgggaagcggttggcgtgcaggttagccgactgatccgcgtgcgctatggtgatattccattgccgaaagggctgccgcgcggtggctggactgaactggatctggcgcagaccaactatctgcgtgaactggtgcagctggcgccggaaaccacctccaaagtggccgtcgagaaagaccgacgtcgtatgaaggcgaaccagattcgccgtgcggtgaagcgtcacagccaggttggcggcggtcgtcgttcaggcggtcgtaacaacaacggttga

SEQ ID NO: 73654 - DNA, 621 bp, Citrobacter koseri
atgagccagtttttttatattcatcctgaaaacccgcaacaacggctgatcaatcaggcggttgaaattgtgcgtaaaggcggggtgattgtttatccaaccgattccggctatgcgctgggttgtaaaatcgaagataaaggggcgatggagcgcatctgccgcattcgccacctgccggacgggcataacttcacgctgatgtgtcgggatctgtctgagttatcgacctattcgtttgtcgataacgtcgcctttcgcttaattaaaaacaatacgccgggcaactacacttttatcctgaagggaacgaaagacgtgccgcgccgcctgttacaggaaaaacggaaaacaatcggtctgcgcgtgccgtcgaacccgatcgcgctggcactgctggaagcgctgggcgaaccgatgctctccacctcgctgatgctgcccggcagcgaatttaccgagtccgacccggaagagatcaaagaccgcctggaaaaacaggtcgatttgatcattcatggcggttacctcggccagcaaccgaccacggtgattgatttaaccgatgattccccggttgtcttgcgcgaaggcgttggtgacgttaaacctttcttataa

SEQ ID NO: 73655 - DNA, 870 bp, Citrobacter koseri
ttgagcgacacgaattacgcagtgatttacgacctgcacagtcatacaacggcgtccgatggtcggttaacgccagaagcgttagtacatcgtgcggtagagatgcgagtcggcacactggcgatcaccgatcatgacaccacagccgctattccggcggcaagagaagaaatttcacgttccgggcttgccctgaacctgattcctggcgtggaaatttcaactgtctgggaaaatcatgagatccatattgtgggtctgaatatcgacattgcgcatccggcgatgtgcgcgttcctggcggagcaaaccgaacgtcgtcagcagcgtgcgcgtctgattgccgagcgtctggagaaagcgcatattcctggagcgtgggaaggcgctttgcggcttgccgacggtggggccgtgacgcgcgggcatttcgcccgctttctggtggagtgcggcaaagccgggagcattgccgatgtttttaaaaaataccttgcgcgtgggaaaaccggatacgttccgccacagtggtgtacaatagaacaagctattgatgtgattcatcattctggcggtaaggcagtattggcccatccgggccgctatgaccttagcgctaagtggctgaaaaggttgattgcgtattttgcgctgcatcgcggtgatgcgatggaagtggcgcaatgccagcagtcgcccaatgagcgaacccaactggcgacctatgcgcgccagcaccatttatgggcatcacaaggctctgattttcatcagccgtgcccgtggattgaactgggtcgcaagctctggctgccagcaggcgtcgaaggcgtatggcagttgtgggaagagccacaaacaccacagtga

SEQ ID NO: 73656 - DNA, 1563 bp, Citrobacter koseri
atgcaaatacaaaaaccaacactcgaattgctttcctgcaatgccgcctaccgtgagaacccgacggcgttgttccatcaggtttgtggcgaccgcccggcaacgctgctgctggaatccgctgatatcgacagtaaaaatgatctgaaaagcctgctgttggtcgatagcgcgctgcgcattaccgctttgggtgacactgtcactatcgaagcgttaacggataacggcgcatccctgctcccgctgctggatgccgcgctgcccgcaggcgttgaaaatacagcgctgcccggcaaccggaagctgcgctttcccgcagtaagtccgctgttagatgaggatgcgcgtctgtgttcgctgtcggtatttgacgcattccgtctgttgcagaacctggtgaatgtgcctgctgaagagcgcgaagccatgtttttcggcggtttgtttgcctatgacctggtggcgggatttgaagcgttaccgcaactggaagccggtaatcgctgcccggattactgtttctatctggcggaaacgctgatggtgattgaccatcagaagaaaagcacccggattcaggcaagcctctttaccgataatgaagcggaaaaacagcgtctgacggcgcgcctcgcgcagctgacgcagcaattaaccgaacccgcgccgccgttgcccgttacgccagtgccgcaaatgcgctgcgaatgcagccagagcgacgaagagtttggcgccgttgtgcgtaccatgcagaaagcgattcgcgcaggagagattttccaggtggtgccttcccgccgcttcttattaccctgcccgtcgccgctggcggcctattacgtactgaaaaagagcaacccaagtccatacatgttctttatgcaggataacgatttcaccctgtttggcgcctccccggaaagctcgctgaagtacgacgcgaccagtcgccagattgagatttaccccatcgccggcacgcgcccgcgcggtcgccgtgccgacggctcgctggatcgcgatctcgacagccgcattgagctggagatgcgcaccgaccataaagagctgtctgaacacctgatgctggtcgatttggcgcgtaatgatctggcgcgcatttgtactcccggcagccgctacgttgccgacctgacgaaagtcgatcgttattcgttcgttatgcacctggtgtcccgcgtggtgggtgaattacgcagcgatctggatgtgctgcatgcttaccgcgcctgtatgaatatgggcacgctgagcggcgcgccaaaagttcgcgccatgcagcttatcgccggtgccgaagggcgtcgtcgcggcagttatggcggtgcggtgggctatttcaccgcgcatggcgatctcgatacctgcattgtgattcgctctgctctggtggaagacggcatcgccaccgtacaggccggtgccggaatcgtgctggattctgttccgcagtctgaagccgacgaaacccgtaataaagcgcgcgcggttctgcgtgctattgccaccgcgcaccatgcacaggagattttctaa

SEQ ID NO: 73657 - DNA, 1596 bp, Citrobacter koseri
atggctgacattctgctgctcgataacatcgactcttttacttacaacctggcagatcagctacgggccaacggccacaatgtggtgatttaccgtaaccatatcccggcgcagaccttaatcgaccgtcttgcgacgatgaaaaacccggtgctaatgctttctccagggcctggcgtccccagcgaagccggttgtatgccggagttgttgacccgtctgcgcggcaagttgcccattatcggcatctgcctcggacaccaggcgattgttgaagcctacggtggttacgtcggtcaggcgggcgagattctccacggcaaagcgtcgagcattgaacatgacggacaggcgatgtttgccggccttgtgaacccgctgccggtcgctcgttatcactctctggtgggcagcaacgtgcctgcggggctgacgattaacgcccattttaacggcatggtgatggcggtacgtcacgacacggatcgcgtctgcggttttcagttccacccggagtccattcttactacgcaaggtgcgctgttgctggaacaaacgctggcctgggcgcaacaaaaactggagccgaccaatacgctgcaaccgattctggaaaaattgtaccaggcgcaaaccatgacccagcaggaaagccaccagcttttctctgccgtggtccgtggcgaactgaagccagaacaactggcggcggcgctggtcagtatgaaagtgcgtggcgaacatccgaacgaaatcgctggcgccgctaccgcgctgctggaaaatgccgcgccgttcccgcgcccggactatctgtttgccgatattgtcggcaccggcggtgacggcagcaacagcatcaatatttccaccgccagcgcctttgtggcggcggcctgcggactgaaggtggccaaacatggcaaccgcagcgtctccagtaaatccggttcgtccgatctgctggcagcattcggtatcaatctggatatgaacgccgataaatcgcgtcaggcgctggacgacctgggcgtctgcttcctgttcgcaccgaaataccataccggtttccgtcatgcgatgccggttcgccagcagcttaaaacccgcaccttgttcaatgtgctggggccgctgatcaacccggctcacccgccgctggcgctgattggcgtctacagcccggagctggtactgcccattgccgaaaccctgcgggtactgggttatcagcgtgcggcggtggttcacagcggcggtatggatgaagtgtcgctgcatgcgccaaccattgtggctgaactgcacgacggcgaaatcaagagctaccagctcacggcggaagacttcggcctcaccccgtatcaccaggaacagctggcaggcggcacgccggaagaaaaccgtgacattctcacccgcttgttacaaggtaaaggtgaagccgctcacgaggccgctgtcgctgcgaatgtcgccatgttaatgcgcctgcatggtaaggaagatttaaaggccaatgcgcaaactgtgattgatgtactgcgcagtggcgcagcttatgaccgggttaccgcactggcggcaagagggtaa

SEQ ID NO: 73658 - DNA, 1359 bp, Citrobacter koseri
atgcaaaccgttttagcgaaaatcgtcgcggataaggcgatctgggtagaagcccgtaagcaacaacaaccgttagccagtttccagaatgaggttcagccaagtgcccgccatttctacgatgcgctgcaaggcacgcgtaccgcatttattctggagtgtaaaaaagcgtccccctccaaaggagtgattcgtgatgacttcgaccccgcgcagattgccggtgtttataaacattacgcgtcggcgatttccgttctgaccgatgagaaatatttccaggggagttttgactttctcactgttgtcagccgtatcgcgccgcagccggttctgtgtaaggacttcatcatcgatccttaccaaatctatctggcgcgttactaccaggccgatgcctgtctgctgatgctctccgtactggatgacgagcaatatcgccagctttccgccgtcgcccacagtctgaaaatgggcgtgctgacggaagtcagtaacgaagaagaactggagcgcgccatcgcactgggtgcgaaagtcgtcggcattaataaccgcgacctgcgcgatctgtcgattgaccttaaccgtacccgtcagcttgcgccgaaactggggcacggcgtgaccgtgatcagcgagtccgggattaacacctatgcacaggtgcgcgagctaagccacttcgctaacggttttctgatcggttctgcgctgatgtcccatgacgatctgcacgccgccgtgcgtcgcgtgctgcttggcgagaacaaagtctgcggcctgacgcgcgggcaggatgcaaaagccgcttacgaagcaggcgccatttatggcgggctgatttttgttccctcgtcgcctcgcgtcgtaaatctcgaccaggcgcgcgaggtgatagccgccgcccccctgcaatatgtcggcgtattccgcaataccgctatcaccgaggtatgtgaaaaagcgaccaccttgtcgctcaaggccgtgcaactgcatggcagcgaagaccaggcttatgtcgatgctctgcgcgccgcattaccggaacaggtacaaatctggaaagcgcttagcgtgggcgacacactgcctgctcgtgattaccagcacgttgataagtacgttctcgataacggtcagggcggcagcggccaacgttttgactggtcgttattgaacggtgaaacgctggacaacgtattgctggcgggtggattaggcgcagacaactgcgtggaagcggcaaaaaccggctgtgccggtctcgattttaattctggtgtagagtcacagccgggcatcaaagatgcacaccttctggcctcggtctttcagacactgcgcgcatattaa

SEQ ID NO: 73659 - DNA, 1194 bp, Citrobacter koseri
atgacaacattactcaatccctactttggtgaatttggcggcatgtatgtcccgcagattctgatgcctgccctgcgccagctggaagaagcgttcgtcagcgcgcagaaagatccacagtttcaggcccagtttgccgatctgctgaagaactatgcaggccgtccaaccgcgctgaccaaatgccagaatatcaccgccggcaccaaaaccacgctgtatctgaagcgtgaagatttactgcacggcggcgcgcacaaaacaaaccaggtactgggtcaggcgctgctggcgaaacgcatgggtaaaacagagattatcgccgaaacgggcgcaggtcagcatggcgtggcttccgcgctcgccagcgccctgctcggtctgaaatgccgtatctatatgggcgcaaaagacgtcgagcgtcagtcgccaaacgtctttcgtatgcgactgatgggcgcggaagtgatccctgtacacagcggctccgccaccctgaaagacgcctgcaacgaagcgcttcgcgactggtccggcagctatgaatccgcgcactatatgctcggaactgcggcaggcccgcacccgttcccgaccatcgtccgtgaatttcagcgcatgatcggggaagagacgaaagcgcaaatcctcgaaaaagaaggtcgtctgccggatgccgtgattgcctgcgtgggcggcggctccaacgcaatcggcatgtttgcggacttcatcaacgaaaccagcgtgggtttgattggcgtcgaacctggcggccacgggattgaaacaggcgagcacggcgcgccgctgaagcatggccgcgtgggcatctatttcggcatgaaagcgccgatgatgcaaaccgaagaagggcaaattgaagagtcctactccatttccgccgggctggatttcccgtccgttgggccgcagcacgcgtatctgaacagcattggtcgcgccgattacgtgtcgatcaccgatgacgaagcgctggaagcctttaaaacgctctgtctgcatgaagggattatcccggcgctggagtcgtcccacgccctggctcacgccctgaaaatgatgcgtgaaaatccagaaaaagaacaattgctggtcgttaacctttccggtcgcggcgacaaagacattttcaccgtacacgatattctgaaagcgcgaggggaaatctga

SEQ ID NO: 73660 - DNA, 807 bp, Citrobacter koseri
atggaacgctatgaaaacctgtttgcacagctgaaggatcgcaaggaaggcgcatttgtccccttcgtgaccctgggcgatccttccgttgaacagtcactgaacattattgatacgctgattgaagctggcgccgatgcccttgaactcggcattccgttctccgatccgctggcagacgggccgaccatccaggaagccacgctgcgcgcgtttgccgcaggcgtaacgcctacgcaatgctttgagatgctggcgctgattcgtcagaaacacccgacgattccgattggtctgctgatgtacgccaacctggtgttcagcaaagggatcgacgaattctacgcgcagtgcgagaaagtcggcgtggattccgtactggtggcggatgtgcctgttgaggagtctgcgcccttccgtcaggcggcattacgctacaacgtggcgccgattttcatctgcccgcccaatgccgatgacgatctgttgcgccagatagcctcttatggccgcggctatacctatctgctttcgcgggcaggcgtgacgggcgcagaaaatcgcgccgcattaccgctgcatcatctggtagaaaaactgcaagagtataacgccgcgcccccgttgcagggctttggcatatcttccccggaacaggttacaggtgccattgaagccggcgccgccggggcgatttccgggtcagcgatcgttaagcttatcgagaaaaacgtcgcaaaccccgggcagatgctgaccgagctgaaagcgtttgtcacggcaatgaaagccgcgacccgcgcataa

SEQ ID NO: 73661 - DNA, 1425 bp, Citrobacter koseri
atgtcagcgcttatcactttactttttacttcactgtatctctttattatttatgaacaacgacaggccgttgtgaatgaagggatgagtcgtctgcaaacgcggatgatggatattttcaacgataacgaactcatcgccgatgcgacaggggttcgctatcaccagatcaaaaatgccgggcagtgcggcaacctctcaaggttttcccccagggatgcggattcatggggaatcaatgccgaccgggcgcggatccattccgcaacgggcactattgtttcccgtcagcccaatattaacgctttatgtatgtttgcggcggcggagtttattcgggatcggatgaacacccttaatccgggggattatgccgcgcatcgctacattatcgccaaagatgccagctatttttattggttcacgccagcagatgcaaaacccttctattttagcgactctaaaatggcgggcgatatcaccgactttttcttaccgcccgtgggcttttatacgcgtctgctgcaaaagaatgtcaaatccaagtcgctcagttcaacggacttttatacggacaaaatcacgaatgaaaaagcgtacagcgtagtcagttatatttacgatctttctggaaaagagatctccgatcatatcgttgcgtatctggtgtatgaccattctaaacctgagctacaggaggcgctgacggaggcctttgaacatcatattccacccggccttaatgtggctctggtgcatacgcccacgcaggaaaatctctgcctgagcggtgattgccagcctgtcgccggggagtccatccgtgcaatgtccgcaaaatatgcgttccattcttcactctctctgcatcggttcgtcagatacgacacgcaggccgggattgcgattctgctggcgccattcttctttatcctgatctttctcggcttaaaattctggctgaacgcgagcgacctgaaggtgtatatcgactcgctgacgggctgctttaaccgcaagatccttgatattgtgaagcgcagggacttaacgcgcagctgcgtggtgctgctggattgtaataagtttaaagccatcaacgacacctgggggcatgtggcgggagaccgggcgttgcaaatcatcgccaacagaatgctctctaacacccgcaccagtcatgacctggtgattcgtaccggcggcgatgagttcgttattttgctttaccgtgcgcagatcggtgacgcgatagccatcgcggagcggataaccggccagataaatgattatgcatttatggttgatggtcatgttgtaccgctgtcggtgtcatggggcgtcgcagaagtaacccgcgatctggatacggctattcagcatgcggataacgaaatgtacaaaatgaagcagatgagggaatga

SEQ ID NO: 73662 - DNA, 276 bp, Citrobacter koseri
atgatagtaactcaaacccttctgcaacaaaaaatcgcgaccctggaatcgatagtcagagatgaagaggctgagttcactttacaggcgctgcgtatgctgctggatgcaatgcataagattgatgcgctggaagagaatattgctacgcccgtccgtttaccttattgcagttcgagtccggtttgtgagattgaagccgggtacgccgctggcgtcagtgactgccgtgaggctattcgcagggcgggatacccgattgaaggagatgattaa

SEQ ID NO: 73663 - DNA, 639 bp, Citrobacter koseri
atgaaaaagttaacagtggcagccctggcagtaagtactcttctctctggtagtgcgcttgcgcatgagagcggtgagttttttatccgtgcgggctcggcgaccgtgagaccgacggaaggggcaggcggaacgctggggcatctgaacggttttgacgtcagtaacaatacgcaactcggtttgacttttacttatatggcaaccgacaacattggtattgaactgctggcggcgacgccgttccgccataaaattgggacaggggataccggtgatatcgctaccgtgcgtcacctgccgccgacattaatggcgcagtggtactttggcgacgccagtagcaaactgcgcccttatattggcgcgggtgtaaactacaccaccttctttgacgaaggtttcaacaacaatggtaaagagacagggttgtccgatctgagtctgaaggattcctggggaatggccgggcaggtgggtatggattacctgattaaccgggactggttaattaacatgtcggtctggtatatggatatcgatactaccgcaagctataaactcggtggtgcccagcagcatgacagcgtccgcctcgacccgtgggtatttatgttctctgccggttatcgtttctga

SEQ ID NO: 73664 - DNA, 744 bp, Citrobacter koseri
atgtctatcacggcgaagtccgtttaccgtgacacggggaactttttccgtaatcaatttgtaaccatcttgctggtttcgttgctgtgcgcatttattacggtggttttaggtcatgccttttcccccagcgatgcccaaatcgcgcaactcagtgaaggggaccatctgaccggtagcgttggcctgttcgatctggtgcagaacatgacgccggaacagcagcaaatattattacgggcttcagcggcatcaacattttcaggactcattggcaatgcgatcctggcagggggcgttttgctgatgatccagctgatttccgccggtcatcgggtcagcgcattacgtgctatcggtgccagcgcgccggttttacctaaattgtttgtcctgatttttctgactaccctgttagtgcaaatcggtattatgctgattgtcgtaccggggattttgatggcgattctgctggcgcttgcgccggtgatgctggttcaggacaagatgggcgtatttgcctccatgcgcaacagtatgcgtctggcgtggtctaatatgcgactggtcgctccggcggtgatcggctggttactggcgaaaacgctcttgctgctgtttgcccccagctttgcagcgctgacgccgaatgttggcgcagtgttggcgaatacgctgagcaatttgatttccgccatattgctcatctatttgttccgcctgtatatgttgattcgccaataa

SEQ ID NO: 73665 - DNA, 540 bp, Citrobacter koseri
atgaagcagtttcttgattttttaccgctggttgtcttttttgctttttataagctgtacgacatctatgcggcgacctccgccctgattgtcgcgacagccattgtgttgatctacagttgggttcgctatcgcaaggtcgaaaagatggcgttgatcactttcgttctggttgccgtgtttggcggcctgaccattttcttccacaacgatgagtttattaagtggaaggtgacggtgatttacggcctgtttgccggtgcgctgctgataagccagtgggtcatgaaaaagccgctgattcaacgcatgttagggaaagaactgacgttgccgcagccggtctggtctaagctgaacctggcatgggccgtatttttcatcctctgcgggctcgccaatatctacatcgcgttttggctgccgcaaaacatctgggtcaacttcaaagtgttcggtttaaccgcgctgacgctgatttttacccttctgagcggggtctacatttaccgccatctgccgcaggaagataaatcctga

SEQ ID NO: 73666 - DNA, 402 bp, Citrobacter koseri
atgacaacaacaaataacgctcctcagggcgaactggttttacgcacgctggccatgcccgccgataccaatgctaacggcgatatttttggcggctggctcatgtctcaaatggatattggcggcgcgattcaggctaaagaaattgctcatggtcgcgtagtgaccgtgcgcgttgagggaatgagttttctgcgccctgtcgccgtaggcgacgtcgtatgctgttatgcccgctgcgttaaacgcggcacaacgtctgtcagcattaatattgaagtgtgggtgaaaaaggtggcgtcagagccaatcggccagcgttataaagcaaccgaggcgctgttcatctatgtggcggtagacagtgacggtaaacctcgcccgctgccggttcaggcatga

SEQ ID NO: 73667 - DNA, 711 bp, Citrobacter koseri
atgacccttgatttacctcgtcgctttccctggccgacgttactttccgttggcattcatggtgctgtagtggcgggtctgctgtatacctcggtacatcaggttattgaactgcctgcgcccgcgcagccgatctcaatcacaatggtcgcgcctgtcgatcttgagccaccacaggcggttcagccgccgccggaacccgtcgtcgaacctgagccggaacctattcctgagccgccaaaagaggcgccggtggtgattgagaagccgaaacctaagccgaagccaaaacctaaaccggtgaaaaaggttcaggagcagcctaaacgtgatgttaagcctgctgaaccgcgcccggccgcaccgtttgaaaatacggcgccgtcacgtccgacaacgaataccgcagcggcaaccagcaaaccggccgtcagtgttcctgcggggcctcgcgcattgagccgcaaccagccgcagtatccggcacgagcgcaagcgttgcgtattgaaggccgcgtgaaagtgaaattcgacgtcacctcagacgggcgagtggagaatgttcaggtgctttccgctcagccggcgaacatgtttgagcgtgaagtgaaaaacgcgatgcgcagatggcgctatgaagcagggaaaccggggtcgggcttagtggttaatatcatcttccgtctgaacggcaccacgcagatcgagtaa

SEQ ID NO: 73668 - DNA, 297 bp, Citrobacter koseri
gtgctgtatgtcatttacgctcaggatatcgccgattctcttgaaaaacgtctttccgtccgccctgcccatctggcacgcctgcaactgctccatgatgagggccgactgttgaccgcaggccctatgccagccgttgacagcaacgatcccggtgccgccgggtttaccggctcaaccgtgattgcacaattcgaatcgctggaagaagcgcagtcctgggcagacgcagacccgtatgtggctgcgggcgtgtatgcgcaagtctctgtaaaaccgtataagaaagtcttttaa

SEQ ID NO: 73669 - DNA, 1461 bp, Citrobacter koseri
atgacaaccttctacacagtggtgagttggctggtcattctggggtactggatacttattgccggtgtgacgttacgtattttaatgaaacgacgcgccgttccctccgcgatggcctggctcttaatcatctatattctgccgctggtagggattattgcttatttatcattcggcgagctgcatttagggaaacgccgcgccgaacgcgccagagcaatgtggccgtccaccgctaagtggctgaacgatctcaaagcctgtaaacacattttcgccgaagaaaacagcagcgtcgcttcgtcgctgtttaagctgtgcgagcgacgccagggaatcgctggcgttaaaggcaatcagctgcaactgctgaccgactctgacgatgtgatgcaggcgcttatccgcgacattcaactggcgcgccataacattgagatggtgttctacatctggcagcccggcggcatggcggatcaggttgcagagtcgctgatggcggcggcgcgacgcggcattcattgccgtctgatgctggactccgccgggagcgtggcctttttccgcagcccgtgggcggccatgatgcgtaacgccggaattgaagtggttgaggcgctgaaggtcaatctgatgcgtgtctttctgcgccgtatggatttgcgccagcaccgcaagatggtgatgattgataactacatcgcctataccggcagcatgaatatggtcgatccgcgtttcttcaaacaggacgccggcgtgggacaatgggttgatctgatggcgagaatggaaggcccggtagcgaccgcgatggggattgtctactcctgcgactgggaaatcgaaacgggtaaacgcatcctgccgccgcctccagacgtcaatatcatgccgtttgagcaggccagcggacacaccattcatactatcgcctcagggcctggcttcccggaagatctgattcatcaggcgctgctgacggcagcctattccgctcgtgaatatctgatcatgacaacgccctatttcgtccccagcgacgatttattgcacgcgatctgcacggcggcgcagcgcggcgtggatgtcagcatcatcctgccgcgtaaaaatgactccatgctggtcggctgggccagccgcgcctttttcactgaactgctggccgccggagtcaaaatctatcagtttgaaggtggattgttgcacaccaagagcgtgctggtggatggcgagctgagtctggttggcaccgtgaacctggatatgcgcagcctgtggttaaattttgaaatcacgctggtgattgacgacgccggattcggcggcgatctggctgcggttcaggatgattatatttcacgttctcgcctgcttgatgcccgcctgtgggtaaaacggccattatggcagcggattactgagcgactgttttacttcttcagtccgttgctgtaa

SEQ ID NO: 73670 - DNA, 330 bp, Citrobacter koseri
atggaaatggatctgaacaatcgcctgactgaagacgaaacgcttgagcaggcttatgatatttttctcgaactggcggcagataatctcgatccggcagatattattctgttcaatttacagttcgaagagcgcggcggcgcggagttattcgatccgtcagaagactggcaggaacacgttgattttgacctcaaccctgacttttttgccgaagtcgtgattggcctggcggatagcgaagacggtgaaattaacgatatttttgcccgcgtgctgttatgccgcgaaaaagatcacaaactttgccatatcctttggcgtgaataa

SEQ ID NO: 73671 - DNA, 1005 bp, Citrobacter koseri
atgaatgctgtgacccaggagagaaaagtgctcctcgaaattgccgatctcaaagtgcatttcgatatcaaagatggcaaacagtggttctggcagccggcgaaaaccctgaaagcggtcgatggcgttacgctgcgattgtatgaaggtgaaacgctgggggtggttggggaatccggctgcggtaaatcgacctttgcgcgggcgattattggtctggtgaaagcgaccgatggccgcgtggcgtggttagggaaagatctgctggggatgaaacctgatgaatggcgggacgtacgcagcgatattcagatgattttccaggacccgctggcgtcattgaacccacgcatgaccattggagaaatcatcgctgaaccattacgcacctatcatcccaaattgccgcgccaggaagtgcgcgatcgggtgaaagcgatgatgatgaaggtggggctgctgccgaatctgattaaccgttacccgcatgagttttccggcggccagtgccagcgtattggtatcgcgcgtgctctgatcctggagccaaagctgattatttgcgatgagccggtttcggcgctggacgtgtcgattcaggcgcaagtggtgaatctgctgcaacagctacagcgtgaaatggggttatcgctgatcttcatcgctcacgatctggcggtggtgaagcatatttccgatcgtgtgctggtgatgtacctgggtcatgcggtggagttgggaacctacgatgaggtgtatcacaatccgctgcacccttataccaaagcgctgatgtccgccgtgccgattcccgaccccgatctggaaaagaacaagacgattcagttgctggaaggggaattaccgtcacccatcaatccgccgtcggggtgtgttttccgcacgcgttgcccgattgccgggccggagtgcgcgaaaacccgaccggtgctggagggcagtttcagacatgcggtttcctgcctgaaggtggacccgctataa

SEQ ID NO: 73672 - DNA, 1014 bp, Citrobacter koseri
atgagcgtaattgaaacctcaaccgcgccactcgcgcaacaacgggctaacgcactgctggacgtgaaagatcttcgcgtgacgtttagtacacccgacggcgatgtgacggccgtaaacgacctgaactttacgctgcgtgccggggagaccttaggcattgtcggcgagtcaggttcaggcaaatcgcaaacggcgtttgcgttgatggggctgctggcggcgaatggccgcattggtggttctgcgacgtttaacggccgcgaaattctcaacctgccggagcgtgaactcaacaggctacgcgctgaacaaatctcaatgatttttcaggacccaatgacctctcttaacccgtacatgcgggttggcgagcagttaatggaagtgctgatgctgcataaaggtatgagcaaggccgaagcgtttgaagagtctgtcagaatgctggacgcggtgaaaatgccggaagcgcggaaacggatgaagatgtatccgcatgagttttccggcgggatgcgccagcgtgtgatgattgcgatggcgctgctgtgtcggccgaaattactgattgcggatgaaccgacaaccgcgctggacgtgaccgttcaggcgcagatcatgacgttgcttaatgaactgaaacgcgaatttaacacggcgattatcatgattacgcacgaccttggcgtcgtggccggtatttgcgataaggtgctggtgatgtacgccggtcgtacgatggaatacggcaaggcgcgcgacgtcttttaccagcctgttcatccgtattccatcggtttgctcaatgcggttccgcgtctggatgccgaaggggaaacgatgctgaccattccgggcaacccgccgaacttgctgcgcttgcctaaagggtgtccattccagccgcgttgtccgtatgcgatggagatttgcagttcaactccacccctggaggagttcagtccggggcgtttgcgcgcctgctttaaaccggtggaggagctggtatga

SEQ ID NO: 73673 - DNA, 909 bp, Citrobacter koseri
atgatgttaagtaagaaaaacagcgagacgctggagaatttcagtgagaagctggaggttgaagggcgcagcctgtggcaggatgctcgccgtcgttttatgcataaccgcgcggcggtggccagccttgtcgttctggtcattatcgcgctgtttgtcacattggcgccgatgctgtcgcagttcacctatttcgatacggactggggcatgatgtccagcgcgccggatatggagtcgggccactattttggtacggactcctccggtcgcgatctgctggttcgcgtggcgataggcgggcgaatctcgctgatggtcggcattgctgccgcgttggtggcggtggttgttggtacgctgtacgggtcgctgtccggctatcttggcggcaaaattgactccgtaatgatgcgtctgctggaaatcctcaactcctttccgtttatgttcttcgtcattttgctggtgaccttcttcggccaaaacatcctgctgatttttgtggcgatcgggatggtctcctggctggatatggcgcgtatcgttcgcgggcagacgttaagcctgaaacgcaaagagtttatcgaagcggcgcaggttggcggggtttcaacggtcagcattgttgtgcgtcatattgtgccgaacgtgctgggcgtggtggtggtttatgcatcgctgctggtgccgagcatgatcctgtttgaatccttcctcagctttctgggtttagggacgcaggagccgctgagcagttggggcgcattgttgagcgatggtgcgaactctatggaggtctctccctggttgctgctgttcccggcgggttttctcgttgtgaccttattctgttttaactttatcggcgatggcctgcgtgacgccctcgacccgaaagatcgttaa

SEQ ID NO: 73674 - DNA, 921 bp, Citrobacter koseri
atgttaaaatttattttacgtcgctgtctggaagcgattccgacgctttttatacttattacgatttcgttctttatgatgcgtctcgcaccgggaagccctttcaccggagagcgcgcattaccgccggaagtgctggcgaatatcgaagcgaaataccatcttaatgatcccatcatgacgcagtacttcagctatctgaaacaactggcgcatggcgattttgggccttcgtttaaatataaggactatacggtcaacgatctggtggcgtcgagtttcccggtttcggcgaagctgggtgcagccgcctttttccttgccgttattattggcgtgagcgcgggcgtgattgcggcgctgaaacaaaatacgcgctgggattatacggtgatgggggtggcaatgaccggggtcgtgattcccagtttcgtggtcgcccccttattagtcatgatatttgccatcaccttaaaatggctgcccggcggcggctggaatggcggggcgctgaaatttatgattctgccgatggtcgcgctgtcgctcgcctatatcgccagtatcgcccgtattacccgtggctccatgattgaagtgttgcactccaactttatccgtaccgcgcgcgcaaaaggtttgccgatgcgccggattatcttccgtcatgccttaaaaccagcgttgttacccgtactgtcttatatgggcccggcctttgtcggtatcattacgggttcaatggttatcgagacgatttatggtttgccggggatcgggcaacttttcgtgaacggggcgctgaaccgcgactattcgctggtgctgagtctgaccattctcgtcggtacgctcaccattctgtttaatgcgattgtcgatgtgctgtacgccgttatcgacccgaaaattcgttactga

SEQ ID NO: 73675 - DNA, 1632 bp, Citrobacter koseri
atgtccaacatcacaaaaaaaagtttgctggcggcggggattttaactgcgctaatcggcgggaatgtcgcaatggccgcagatgtcccggcgggtgttcagctgtctgacaagcagacgctggttcgcaataatggttctgaagttcagtctctcgacccacataaaattgagggtgtcccggagtcaaacgtcagtcgcgacctgtttgaaggtttactgatcagcgatgttgaaggccacccgtcaccgggcgtcgctgaaaagtgggaaaataaagattttaaagtctggacattccatctgcgtaaaaacgcaaaatggtcagacggcacgcctgttaccgcgcacgattttgtatatagctggcagcgcctggcgaatccgaacaccgcatcaccgtatgccagctatttgcaatacgggcacatcgcgaatatcgatgacattattgcgggcaaaaaaccggcgaccgatctcggcgtaaaagccatcgacgataatacgttcgaagtgacgctgagcgaaccggtgccttatttctacaaactgttagttcacccgtccgtttctccggttcctaaagcggctgtggaaaaatttggcgagaaatggacccaacctgcgaatatcgtgaccaacggcgcgtataaactcaaaaactgggtcgtcaacgagcggattgttctggaacgtaatacccagtactgggataacgataaaacggttatcaaccaggtgacttatctgccaatctcttctgaagtaactgatgtgaaccgctaccgcagcggtgaaatcgacatgacctataacaacatgccgattgagttattccagaagctgaaaaaagagatcccaaatgaagtgcgcgttgacccgtatctgtgcacttactattacgaaattaataaccagaaagcgccgtttaacgacgtgcgcgttcgcaccgcgctgaaactggcgatggatcgcgacattatcgttaataaagtgaagaaccagggcgatttgccagcctacagctacaccccgccgtataccgatggcgcgaaactggttgagcctgagtggttcacatggtcacaggaaaaacgtaacgaagaagcgaaaaaactgctggcggaagccggttataccgccgataagccgttaacgtttgacctgctgtacaacacctccgatctgcataaaaaactggcgatcgcggtcgcatcaatctggaagaaaaacctgggcgccaacgtgaagctggaaaaccaggagtggaaaaccttccttgatacccgtcatcaggggacgtttgatgttgcgcgtgcgggctggtgtgcagactacaatgaaccgacgtccttcctgaacaccatgctgtccgacagttcaaacaacaccgctcactataagagcccggagtttgacaagctgattgccgacacgctgaaagtgaccgacgaagcgcaacgcaccgagttgtatgccaaagcggaacagcagcttgataaagattctgcgattgtgccgctctattactatgtgaacgcgcgtctggtgaaaccgtgggtaggcggctataccggtaaagacccgatggataatatctacgttaagaacttgtatattatcaagcattaa

SEQ ID NO: 73676 - DNA, 738 bp, Citrobacter koseri
gtgaaatatgctgacaaaaggcgtatcttcagcgcgtttttcaccatttttatcgacatcatttatccggctaacgtttcggagctaaccgtgacccaaacgctttttgattttcctgtttattccaagtttttcatagggttatttgcgctggtaaacccggtggggattatccccgtctttatcagcatgaccagctaccagacggcagcggcgcgcaacaaaacaaatctcacggcaaacctgtcggtagccatcattttgtggatttcgctctttctcggagatggcattttgcaactcttcggcatttcgatcgattcgttcagaattgctggtgggattctggtagtgacgatcgcgatgtcgatgatcagcgggaagctgggtgaagataagcaaaacaaacaggaaaaatcagagaccgccattcgcgaaagtattggcgtggttccgctggccttaccattaatggcagggccgggggccattagttcgacgattgtgtggggaacgcgttaccacaccattatgcatttaatcggcttctctgtggccatcgctctgtttgcgttctgttgttggggagtgttccgcatggcgccctggctggtgcggttattggggcaaacgggcatcaacgtcattacgcgtattatgggcttgttgctgatggcattgggcattgaattcattgttacggggattaaagcgattttccccggtttactgaattaa

SEQ ID NO: 73677 - DNA, 2676 bp, Citrobacter koseri
atggctgttactaatgtcgctgaacttaacgcactcgtagagcgtgtgaaaaaagcccagcgtgaatatgccagtttcactcaagaacaggttgacaaaatcttccgcgccgccgctctggctgccgcagatgctcgaattcccctcgctaagatggccgttgccgaatccggcatgggtatcatcgaagataaagtgattaaaaaccacttcgcctccgaatacatctataacgcctataaagatgaaaaaacctgtggtgtgctgtctgaagacgacaccttcgggactatcaccattgctgaaccgattggtatcatctgcggtatcgtaccgaccactaacccgacgtctactgcgatctttaagtctctgattagcctgaagacgcgtaacgcaatcatcttctctccgcatccgcgtgccaaagatgcaacgaacaaagcggctgacatcgttttgcaggcggctatcgctgcgggcgcgccgaaagacctgattggctggatcgatcaaccttccgttgaactgtctaacgcgctgatgcaccaccctgatatcaacctgatcctggcgacaggcggtccgggcatggttaaagctgcatacagctctggtaaaccggctatcggcgttggtgcaggtaacacgccggttgttatcgacgaaacagcagatatcaaacgtgctgtggcttccgtactgatgtccaaaaccttcgataacggcgtaatctgtgcatctgaacagtccgttgttgttgttgactccgtttatgacgcagttcgcgaacgtttcgccagccacggcggctacctgctgcaaggcaaagagctgaaagccgttcaggacgttatcctgaaaaatggcgcgctgaacgcggctatcgttggtcaaccggcatataaaattgctgaactggcaggcttcaccgtaccagaaaccactaagattctgatcggcgaagtaacggctgttgatgatagcgaaccgttcgctcacgaaaaactgtctccgacgctggcaatgtatcgcgctaaagacttcgaagacgctgttgataaagcagaaaaactggttgcaatgggcggtatcggtcatacctcctgtctgtacaccgaccaggacaaccagccagaacgcgttgcttacttcggtcagatgatgaaaaccgcgcgtatcctgattaacaccccggcttctcagggtggtatcggcgacctgtataacttcaaactcgcaccttccctgactctgggttgtggttcctggggtggtaactccatctctgaaaacgttggtccgaaacacctgatcaacaagaaaaccgttgctaagcgagctgaaaacatgttgtggcacaaacttccgaaatctatctacttccgccgtggctctctgccaatcgcgctggatgaagtgattactgatggccacaaacgtgcgctcatcgtgaccgaccgtttcctgttcaacaatggctatgctgaccagatcacctccgtgctgaaagcggctggcgttgaaactgaagtcttctttgaagttgaagctgacccgacgctgactatcgttcgtaaaggcgcagagctggcgaactccttcaaaccagacgtgatcatcgcgctgggcggcggctccccgatggatgcggcgaaaatcatgtgggtcatgtacgaacatcctgaaacccacttcgaagaactggcgctgcgctttatggacatccgtaaacgtatctacaagttcccgaaaatgggcgtgaaagcgaaaatggtcgcaatcactaccacttccggtaccggttctgaagtaacgccgtttgctgttgttaccgacgatgcgaccggtcagaaatatccgctggcagactatgcgctgacgccggatatggcgattgtcgatgcgaacctggttatggacatgccgaagtctctgtgtgcattcggtggtctggatgcggtcactcacgctctggaagcctacgtttccgtactggcatctgagttctctgacggtcaggctttgcaagcactgaaactgctgaaagaaaacctgccagcgtcctaccacgaagggtctaaaaacccggtagcgcgtgaacgcgttcacagtgcagcgactatcgccggtatcgcgtttgcgaacgccttcctgggtgtgtgccactctatggcgcataaactgggttctcagttccacattccgcacggtctggcaaacgccctgctgatttgtaacgttatccgttacaacgcgaacgacaacccgaccaagcagactgcgttcagccagtatgaccgtccgcaggctcgccgtcgctatgcagaaatcgccgaccatctgggtctgagcgcaccgggcgaccgtactgccgctaagatcgagaaactgctggcatggctggaaagcgtgaaagcggaactaggtattcctaagtctatccgtgaagctggcgtgcaggaagctgacttcctggctcatgtagacaagctgtctgaagatgcattcgatgaccagtgcaccggcgctaacccgcgttacccgctgatctccgagctgaaacagattctgctggatacctactacggccgtgaattcactgaaggtgaagttgctgcgaagaaagaagctgccgcaccgaaagctgacaagaaagcgaagaaatctgcttaa

SEQ ID NO: 73678 - DNA, 528 bp, Citrobacter koseri
atgcgtaccgttgtatatacagcggaaattgatgaccgcttcggcgccggtaaagtcagttcgcgtatcggtctctcctcgccagcaaaattgtttaaccaaaattcatcgttgtttgaagagattcgcgccgagaatgcgcaacagacaatacattgcgttctggttgatgagtgtcagtttttgactcgccagcaggtgtacgaattatctgaggttgttgaccaactggatattccggtgttgtgttacgggttgcgtactgattttcgtggcgagttatttggcggcagccaatacttactcgcgtggtcagataaactcgtcgaattaaagacaatctgtttttgtggccgtaaggcaagcatggtattgcgtcttgatcaggctggcagaccttataatgaaggggagcaggttgtgattggtgggaacgagcgttatgtctccgtatgccgcaagcattacaaagaagcccttgccgaaggctccctgacgtcgattcaggagaaacaccgccacgcgtga

SEQ ID NO: 73679 - DNA, 414 bp, Citrobacter koseri
atgagcgaagcacttaaaattctgaacaacatccgtactcttcgtgcacaggcaagagaatgtaccctggaaacgcttgaagaaatgctggaaaaattagaagttgttgttaacgagcgtcgcgaagaagaaagcgccgccgcagctgaagttgaagagcgtacccgtaaactgcaacaatatcgtgaaatgctgattgccgacggtattgatccgaacgaactgctgaatagcatggctgccgttaaatctggcactaaagctaaacgcgctgctcgtccggctaaatatagctacgttgatgaaaacggtgaaacgaaaacctggactggccagggtcgtacaccggcagtgatcaaaaaagcgatggaagaacaaggtaaacaactggacgatttcctgatcaagggataa

SEQ ID NO: 73680 - DNA, 909 bp, Citrobacter koseri
atggctgccctaaattcgaaagtcaaaaaagccgttatcccggtcgcgggattaggaaccaggatgttaccggcgacgaaagcgatcccgaaagagatgctgccgctggttgataagccattaattcagtatgtcgtgaatgaatgtattgctgcgggcatcactgaaattgtgctggtgacgcactcttccaaaaactcgatcgaaaaccatttcgataccagcttcgagctggaagctatgctggaaaaacgtgttaagcgtcagctgctggaagaggtgcaatctatttgccctccgcacgtaacgattatgcaggtgcgtcaggggctggcgaaaggcctgggtcatgccgtattgtgcgcgcatcctgttgttggtaatgagcccgtcgcggtgattctgccggacgttattctggatgaatacgaatccgatctgtctcaggataaccttgctgaaatgattcgtcgttttgacgaaaccggctgtagccagattatggttgagcctgttgaagatgttaccgcgtacggcgttgttgattgcaaaggcgcggcgttagcaccgggcgaaagcgtgccgatggttggcgttgtagagaagccgaaagcggatgtcgcgccgtctaatctcgcggtagttggccgttatgtcctgagcgcggacatctggcctctgctggcgaaaacccctccgggagcgggcgacgaaattcagctgaccgacgcgattgatatgctgatcgaaaaagaaacggtcgaagcctaccatatgaagggcaaaagccacgactgcggtaataaattaggttacatgcaggcgttcgttgaatatggcatccgtcataattctctgggcgctgaatttaaagcatggcttgaagatgagctgggtattaagaagtaa

SEQ ID NO: 73681 - DNA, 1014 bp, Citrobacter koseri
atgacgcagccattggtcggaaaacagattcttattgtggaggacgagcctgtatttcgctcgcttctggattcgtggttttcctctttgggagcgacaacggcactggcgggcgatggtcttgacgccctggagttactgggaagttttacgcctgatctgatgatctgcgatcttgcgatgccaaggatgaacggtctcaaactggtagagcatttacgtaatcggggcgatcagacccccattctggttatctcggcgacagaaaatatggcagatatcgccaaagcgctgcgactgggcgttgaggacgtcctgctaaagccagtgaaagatctcaatcgtctgcgggaaaccgtcttcgcctgcctctatcccaatatgtttaattctcgggttgaagaagaagaacgcctgtttcgggactgggatgcgatggttgataacccggtggcggcagcaaagctgttgcaggagttgcaacctccggttcagcaggttatctcgcattgccgaatcaattaccgccaacttgttgcggcagacaaacccggtctggtgctggatattgcgccgctgtctgataacgatctcgctttttattgcctcgacgtgacgcgggcaggggataatggcgtactggccgcgttattactgcgggcgctatttaatggcttattgcaggaacagctcgctcatcagaatcagcgtttgccggaactgggggcgttattgaaacaggtcaatcatctgcttcggcaagcgaatttgccgggacagtttccgctattagtgggttattaccacagcggtcttaaaaatttgatactggtttcagcaggcctgaatgcgacgttaaataccggttctcaccaggtacagatcagtaatggcgttccgctgggcacattgggcaatacctacctgaaccaattaagccaacgctgcgagtcatggcagtgccaaatttggggcgcgggcgggcgtttgcgtcttatgttgtctgcggaatga

SEQ ID NO: 73682 - DNA, 906 bp, Citrobacter koseri
atgagaaaaattaaaatagggctggcgctaggttccggcgccgcaagaggatggtcgcatattggtgtcatcaaagccctgaaacacatgggcattgatatcgatatcgtggcgggatgttcaattggttcgctggttggcgccgcatatgcctgcaataaactgcccgcgcttgaacagtgggtgtgttcgttcagttactgggatgtcctgcgcctgatggatctctcctggcgcagaggagggttgctgcgcggcgagcgcgtcttcaatcagtaccggaacgttatgccggtactggattttgaacaatgcacccgacgttttggtacggtggcgaccaacctgagtacagggcgagaattgtggtttaccgaaggcgacctgcaccttgcggttcgcgcgtcttgcagtatgcctggcctgatgtctccggtggcgcataacggctactggctggtggatggcgccgtcgttaaccctgttcctgtctctctgacgcgtgcgatgggcgccgatattgttattgcggtcgatcttcagcacgatgcgcacctcatgcagcaagatcttttgtctttgaatgtcagcaatgataacgacgagagtgatgattcgctctcctggcatgcgcgtttgaaagaacgcctcagcagcatgacttcacgccgtgcggtcaccgcgccaacggcgatggagattatgacaacgtccattcaggtgctggaaaaccgccttaaacgcaaccgaatggcaggcgacccgccggatattctgattcaaccgttctgtccgcaaatatccacgttggacttccaccgtgccagtgccgctattgctgcgggacaactggcggtagagaaaaagatggacgaacttttgcctttggtgcgtaccgacgtttaa

SEQ ID NO: 73683 - DNA, 456 bp, Citrobacter koseri
gtgtctcagctttgtccctgcggtagcgctgtcgagtatagcctatgttgcggccctattgtgtccggtgagcgagttgcacccgatccgtcacatctcatgcgttctcgctactgcgcttttgtgatgaaagacgcaaattacctgattagaacctggcatcccgcatgtggtgcaaccgcctttcgggacgatattgtcgcggggttcgcccatactgagtggcttgggttgaccatttttgaagagagcgggtcagacgcggaaaacacagggtatgtcagttttgtggcccgttttatcgaacagggaacacccggcgcgattattgaacgttcgcgtttcttaaaagaaaacggtcagtggtactatattgacggtacgcgcccccagtttggtcgaaacgatccctgcccctgcgggtccggcaaaaaatttaaaaagtgctgcggctaa

SEQ ID NO: 73684 - DNA, 843 bp, Citrobacter koseri
atgcactcactacaacgaaaagttctgcgtactatctgccccgatcagaagggcctcatcgcgcgtattacaaatatctgctacaagcacgaactcaatatcgtgcaaaacaacgaatttgttgaccaccggaccgggcgcttctttatgcgcacagagctggaaggcatttttaatgatgtcacgctgcttgccgatctcgacagcgcattaccggaaggttcggtacgcgagttaaatcctgccgggcgtcgccgcgtcgtcattctggtcaccaaagaagcgcattgtctgggcgatctgttaatgaaagccaactatggcgggctcgacgttgagatttccgccgtaatcggcaaccacgaaaccctgcgacctctggttgaacgtttcgatattcctttcgagctggtcagccacgaagggttaacgcgcgacgagcacgataaacagatggcggacgccattgatgcgcaccagcctgattatgtcgtgctggctaagtatatgcgcgtcctgacgccggaattcgtttcccgcttcccgaataagattatcaatattcaccattcgttcctgccggcttttattggcgcacgtccttaccatcaggcttatgagcgtggcgtgaaaattatcggcgctaccgcgcactacgtgaacgataatctggacgaaggcccgatcattatgcaggacgtaattcatgtcgatcacacctatacggctgaggatatgatgcgagcagggcgtgatgttgaaaagaatgtgttaagccgcgcattgtataaggtgctggcccagcgtgtgtttgtttacgggaatcgcaccatcattctgtaa

SEQ ID NO: 73685 - DNA, 678 bp, Citrobacter koseri
atgcacttcctgaatatgttcttctttgatatctatccgtacattgccgggtcagtgttcctgattggcagctggctgcgctatgactacggtcagtacacctggcgtgcggcttccagccagatgctggatcgcaaagggatgaacctggcttcgaacctgttccacttcggtattctggggatcttcgcgggtcacttcctggggatgctgacgccgcactggatgtacgaagcgttcctgccgattgaagtgaagcagaaaatggcgatgattgccggcggcgcctgtggcgtgatgacgctggtcggtggcgtactgctgcttaaacgccgtctgttcagcccacgcgtgcgtgcaacgaccacgggagcggatattttgatcctttctctgctggtgattcagtgcgcgctgggactgctgactattccgttctctgcgcaacatatggacggtagcgaaatgatgaaactggtgggatgggcacaatctgtggtgacgttccacggcggcgcgtctgagcatttagagggcgtagcgttcattttccgcctgcacctggtgctggggatgacgttgttcctgctgttcccgttctcgcgcctggttcacatctggagcgcgccggtcgaatacctgacgcgtaaataccaggtcgtgcgcgcccgtcgctga

SEQ ID NO: 73686 - DNA, 711 bp, Citrobacter koseri
atgattgaactcgtcattgtttcgcgtctgctcgagtacccggatgctgccttatggcagcatcaacaggaacttttcgatgcactcgcgtcatccgaaaacctggataaagaagatgcccagagtctggcggttttcctgcgcgatctcactgcgcaggagatgctggatgtacaggcaaactacagcgaactgtttgatcgcggtcgcgccacgtcgctgttgctgtttgagcatgttcatggcgaatcccgcgatcgcggccaggcaatggtcgatttgatggcgcagtacgagcagcacggcctgcaactcgacagtcgtgagttgcctgaccatttgccgctgtatctggagtatctggcgcagttgccgaaaaacgacgcgcttggcggcttgcaggacatcgcgccgattctggcgttgctgggcgcacgtctgcaacagcgggaaagtcgctatgcggtgctgttcgatctgctgctgaagctggctaataccgttatcgacagcgacaaagtggcagagaaaattgcggatgaagtccgtgacgataccccgcaagcactggatgccgtctgggaagaagaacaggtgaaattctttgctgagcagggttgcggcgagtcggagatttccgctcaccagcgtcgttttgccggggctgtcgctccgcaatatttgaatatcaccaccggaggacagcaataa

SEQ ID NO: 73687 - DNA, 1536 bp, Citrobacter koseri
atgaaaattcgttcacaagtcggcatggtgctgaatctcgataaatgcatcggctgccacacctgttcagtgacctgtaaaaacgtctggaccagccgtgaaggtatggaatacgcctggttcaataacgtggaaagtaagcctggcgtcggtttcccgaacgactgggaaaatcaggaaaaatggaaaggcggctgggtccgtaaaattaacggcaaactgcaacctcgcatgggcaaccgcgcgatgctgctgggtaaaatcttcgctaacccgcatctgccgggcattgatgattactacgagccgtttgattacgactaccagaacctgcataccgcgccggaaagcaagcatcagccgattgcgcgcccgcgctcgctgatcaccggtcagcggatgaacaaaatcaccagcggtccgaactgggaagaaattctgggcggtgaatttgaaaaacgcgccaaagaccagaacttcgaaaacatgcagaaggcgatgtacggccagttcgaaaacaccttcatgatgtatctgccgcgtctgtgcgagcactgccttaacccggcgtgcgtggcgacctgcccgagcggcgccatctacaagcgtgaagaggacggcatcgtcctgattgatcaggacaaatgccgcggctggcgtatgtgcatcaccggttgcccgtacaagaagatctacttcaactggaagagcgggaagtccgagaagtgtattttctgctatccgcgtattgaagcgggtcaaccgaccgtatgttccgaaacctgcgtgggtcgtatccgttaccttggcgtgctgctgtatgacgccgatgcgattgaaagcgcagccagcacggagaacgagaaagatctgtatcagcgccaactggatgtgttcctcgatccgaacgatccggcggtcattgaacaagcgctgaaagacggcgttccgcagagcgttatcgatgcggcgcagcagtccccggtttacaaaatggcgatggactggaagctggcgctgccgctgcacccggaataccgtacgctgccgatggtctggtacgtgccgccgctgtcaccgattcagtctgcggcggacgccggcgaactgggcagcaacggcatcctgccggacgtggaaagcctgcgtattccggttcagtacctggcgaacctgctgaccgcaggcgacacccagccggtactgctggcgctgaaacgtatgctggcgatgcgtcactacaaacgtgcggaaaccgttgacggtaaactggatacccgcgcgttggaagaggtgggtctgagcgaagcgcaggcgcaggaaatgtaccgttacctggcaattgcgaactatgaagatcgtttcgttatcccgagcagccatcgtgagctggcgcgtgaggcgttcccggagaaaagcggttgcggctttacgtttggtgatggttgccacggttcagataccaaattcaacctgttcaacagccgccgcattgatgccatcgatgtgagcagcaaaacggagccgcaccaatga

SEQ ID NO: 73688 - DNA, 3744 bp, Citrobacter koseri
atgagtaaattcctggaccggtttcgctacttcaaacagaagggcgaaacctttgccgatgggcacggccagcttctcgaaacaaaccgggactgggaggatggataccgccaacgttggcagcatgacaaagtcgtgcgttcaacccacggggtaaactgtaccggctcttgcagctggaaaatttatgtgaaaaacggtctggtcacctgggaaacccagcagacagactacccgcgcacccgcccggatatgccgaaccatgaacctcgcggctgcccgcgcggcgcgagctactcctggtatctctacagcgcaaaccgcctgaaatatccgctgatgcgtaagcgcctgatgaaaatgtggcgtgatgcgaaaaaactgcacagcgatccggtagaagcctgggcttccatcatcgaagacgccgataaagcaaaaagcttcaaacaagcgcgtggtcgtggtggcttcgttcgttcttcctggcaggaagtgaacgaactgattgcggcatccaacgtttataccatcaaaaattacggtcccgatcgcgtggcgggcttctcgccgattccggcaatgtcgatggtctcttacgcatccggtgctcgttacctgtctctgatcggcgggacttgcctgagcttctacgactggtactgcgacctgccgcctgcgtctccgcagacctggggcgagcagacggacgtaccggaatccgctgactggtacaactccagctacatcatcgcctggggctctaacgttccgcagacccgtaccccggatgcccacttctttactgaagtgcgttacaaaggcaccaaaacggttgccgttacgcctgactacgctgaaatcgccaagctgtgcgacctgtggctggcgccgaagcaggggactgacgccgcgatggcgctggcgatgggccacgttatgctgcgtgaattccaccttgataacccgagccagtatttcaccgattacgtccgtcgctataccgacatgccgatgctggtgatgcttgaagaacgcgacggttactatgccgctggccgtatgctgcgcgccgccgatcttattgacgcgctgggtcaggaaaacaacccggaatggaaaaccgttgccatcaacacccgcggcgatatggttgcgccgaacggttctattggcttccgctggggcgagaaaggcaaatggaacctcgaacagcgtgacggtacgtcaggcgaagaaaccgaactgcaactcagcctgctgggtagccaggacgatatcgcagaagtgggcttcccgtactttggcggtgaaggcactgaacacttcaacaaagtcgagctgcaaaacgttctgctgcacaagctgccggtgaaacgcctgcaactggcagacggaagcaccgcgctggtgactaccgtttacgatctgacgatggcgaactatggcctggaacgcggtctgaacgacgaaaactgcgcaaccagctacgacgacattaaagcctatactccggcgtgggcagagcagataaccggcgtaccgcgtgcgcaaatcactcgtatcgcccgtgaatttgcggacaacgccgataagacgcatggtcgttcaatgatcatcgtcggcgccggcctgaaccactggtatcacctcgatatgaactatcgtgggcttatcaacatgctggtgttctgcggttgtatcggtcagagcggcggcggctgggcgcactatgtcggccaggaaaaactgcgtccgcagaccggctggcagccgctggcgtttgctcttgactggcagcgtccggcgcgtcacatgaacagcacctcctatttctataaccactccagccagtggcgctacgagacggttaccgcgcaggaactgctgtcgccgatggcggataaatcccgctacagcggtcatctgatcgacttcaacgtgcgtgctgaacgcatgggctggctgccgtctgcgccgcagttgggcaccaacccgctgtacatcgcgcgtgaggcggaaaaagccgggatgacggcggtggattacaccgtgaaatcgctgaaagaaggctcgattcgttttgcggcggaacagccggaaaacgggaaaaaccacccgcgtaacctgtttatctggcgctcgaacctgctgggttcatccggtaaagggcatgagtacatgctgaagtacctgctgggtacggaaaacggtattcagggcaaagatctgggtatgcagggcggcgtgaagccggaagaagtggaatggcaggataacggtcttgacggcaaattggacctggtggtgacgctggacttccgtttgtcgagcacctgcctgtactccgacatcgtgctgccgaccgccacctggtatgaaaaagacgacatgaatacctcggatatgcatccgtttattcacccgttgtctgccgccgttgacccggcctgggaatcgaaaagcgactgggaaatctataaaggcatcgcgaagaaattctctgaagtctgcgtgggacaccttggcaaagaaaccgatgtggtgacgctgccgattcagcacgactccgctgccgaactggcgcagccgctggacgtgaaagactggaaaaaaggcgaatgcgacctgatcccaggtaaaaccgcgccgcacatcattccggtggaacgcgactacccggcgacgtatgagcgctttacctctattggcccgctgatggagaaaatcggcaacggtggcaagggtatcgcctggaacactcagagcgaaatggatttgctgcgcaagctcaattacaccaaagctgaaggcccggcaaaaggccagccgatgctgaataccgcgattgatgccgccgagatgatcctcacgctggcgccggaaactaacggccacgtagcggtgaaagcctgggcggcgctgagtgagttcaccggtcgtgaccatacgcatctggcgaccaataaagaagaagagaaaatccgtttccgcgatattcaggcgcagccgcgcaaaattatctccagcccgacctggtctggcctggaagatgaacacgtctcttacaacgccggttataccaacgttcacgagctgattccgtggcgtacactgtctggccgccagtccctgtatcaggatcatcagtggatgcgtgactttggcgaaagcctgctggtttaccgtccgccaatcgacacgcgttcagtgaaagcggtgatgggtgagaaatctaacggcaacccggaaaaagcgctcaacttcctgacgccgcaccagaagtggggtatccactctacctacagcgacaacctgctgatgctgacgctgtcgcgcggtgggccgattgtctggatgagcgaaaccgatgccaaagatctgggtattgaagataacgactggatcgaggtctttaacagcaacggtgcgctgacggcacgcgcggtggtaagccagcgtgttccggccgggatgaccatgatgtaccacgcgcaggaacgtatcgttaacctgccgggttcagaaattacccagcagcgcggcggtattcacaactcggtaacccgtatcacgccgaagccgacccacatgatcggcggctatgcgcagctggcctacggctttaactactacggtacggtcggttcaaaccgcgatgagtttgttgtggtgcgtaagatgaagaacattaactggttggatggcgaaggcaatgaccaggtacaggagagcgtaaaatga

SEQ ID NO: 73689 - DNA, 1392 bp, Citrobacter koseri
atgagtcactcatctgcccccgaaagggcatctggagctgtaatcacagaatggcggccggaagatcccgctttctgggaacagcgtggtcatcgtgttgccagccgcaacctgtggatttccgtcccctgtttgctgctggcgttttgtgtatggatgttattcagcgctgtcgcggtgaatttaccgaaggtcggttttaacttcaccaccgatcagctgttcatgctgaccgccttgccgtctgtttctggcgcattactgcgtgtgccgtactcctttatggttcctctgtttggcggccgccgctggacggcgttcagcaccgggattctggtcattccttgcgtatggttaggttttgccgtgcaggacacctccacgccgtttagcacctttattctgatttctctgctgtgcggttttgccggcgcgaactttgcctccagcatggctaacatcagcttcttctttccaaaacagaaacagggcggcgcgctgggtctgaacggcggtttaggcaacatgggcgtgagcgttatgcaactggtcgcgccgctggtggtctcgttgtctgtctttgccgtatttggcagtcacggtgtggaacagccggacggttcgcagctgtatctggcgaatgccgcctggatttgggtgccgttcctggccattttcaccctggccgcctggttcggtatgaatgagctggcgacctcgaaggcttcgctgaaagatcagttgccggtacttaaacgtgggcacctatggatgatgagcctgctgtatctggcgacgttcggttcattcatcggcttctccgccgggtttgcgatgctgtctaaaacgcagttcccggaagtacagatcctgcattatgccttcttcggcccgttaatcggcgcgctggcccgttctgcgggcggggcaatttccgaccgtctgggcggaacgcgggtgacgctggttaactttgtgctgatggcgattttcagcgccttactgttcctgaccttgccttctaacggccagggcggcagctttatcgccttcttcgttgtcttcctggcgctgttcctgactgccgggctgggcagtgggtctactttccagatgatctccgttattttccgtaagctgacgatggacagggttaaagcggaagggggttctgaagagaaagcgctgcgtgaagccgcgaccgataccgcagccgcattgggctttatctctgcgattggcgcaatcggcggtttctttattccgaaagcattcgggacatctctggcattaaccggctcaccggtcgatgcgatgaaagtgttcctgattttctatatcgcctgcgtagtcatcacctgggcggtatacggacgtcattctaaaaaataa

SEQ ID NO: 73690 - DNA, 222 bp, Citrobacter koseri
atgaatgacgattctgccgggatgctcaccgaggggcgtttcgacagtgacgttattctcagccataccctggagtatacccatacctataacgagttacctcttaattgctggtggtgggaggggatcgcgaagccggggggtagggttatacagcaccgtgaaaaaccacatcttttttgtcgacaaagcctactcactaaggggcatgataatttttag

SEQ ID NO: 73691 - DNA, 1797 bp, Citrobacter koseri
atgtttaaacgttgtctctctccactcacgctggtcaaccaactggcgcttattgttctcctgtccaccgctatcggtgtggcgggcatggctatctctggctggctggttcagggcgtacaaggcagcgcccatgcgatcaacaaggccggttcgctgcgtatgcagagctatcgcctgctggcagcagtgccgctgagcgcccacgaccaaaaactgctggatgagatgaaacagacggcgttcagccctgaactgacccgcgctgcggaacgcgacgggcaacaagagcagcttcgcgcactacaggactactggcatacggaactggcgccagggctgcaacgcgcgcaggacagaaacgccgttgccggcgatgttatgcgttttgtcaccggtctggatcggttagtcaccgcctttgatcacacgaccgagctgcgcattgaacgcgtggtgatggtgcatcggttaatggccatctttatggcgttgctgttcgtctttacgatcatctggctacgggcgcgcctgctgcaaccgtggaaacaactgctttcgatggcgcgagccgtcagccagcgcgacttcacccagcgggcgcatatcagcgggcgcaatgagatggcgatgttaggctcagcgctcaacaacatgtcggaagagctggccgaaagttacgccgtactggaacaacgcgtgcaggaaaagacagccgggctggagcataaaaaccagatcctctcattcctgtggcaggccaaccgccgcctgcattcccaggtgccgctgtgcgagcgcctctccccggtgctgaacggcctgcaaaacctgacgctgctgcacgatattgaactgcgggtttatgacctggaagatgaagataatcatcaggagttcacctgccagtccgacagcagttgtgatgacaaagggtgccacctctgcccgcgcggcgcgctgcccgcgatcaacggcggcaccacgctgaaatggcgacttaccgatgcccatacgcaatacggcattctgctggcgacgctgccgcacgggcgccatctgagtcacgatcagcagcagatgattgatacgctggtcgagcaattgaccgctacgctggcgctggacagaaatcaggaacgccagcaacagttgattgtgatggaagagcgtgccaccattgcccgcgaacttcatgattctattgcacaatcgctctcctgcatgaagatgcaggtcagctgtctgcaaatgcagggcgcgacgttgccggaaagcagccgcgagttgctcagccagatccgcaacgaactaaatacctcctgggtacagctacgtgaactgttgaccaccttccggttacagttgaccgaacccggcctgcggcctgcgctggaggcgagctgtcaggaatatagcgcccgatttggttttacggtgaagctggattatcagctcccgccgcgacgggtgccgtcgcatcaggctatccacctgttgcaaattgcccgcgaagcgttaagtaacgccctcaagcattcccatgccgatgaggtggccgtcgccgtggtgcaaaatggcaatcaggtcaaactgacagtaaaagacaacggctgcggcgtaccagaaaacgccgagcgcagtaaccattatggcatgattattatgcgtgaccgcgcgcagagcctgcgtggcgattgtcgtgtacgccgtcgtgagacgggcggtacggaagttgctgtcacctttattcccgaaacaaacttcacagaagtccaaggagatacccatgagtaa

SEQ ID NO: 73692 - DNA, 651 bp, Citrobacter koseri
atgagtaatcaggaaccggctaccatcctgctgatcgacgatcatccgatgttacggaccggtgttaaacagcttgtcagcatggcgcccgatattagcgtgatcggcgaagccagtaatggcgagcagggtattgagctggcagagtctcttgatcccgatctgatcctgctggatctgaacatgccgggcatgaacggtctggaaaccctggataagctgcgtgagaaatcactgtcaggccgtatcgtagtattcagcgtgtccaatcatgaagaagacgtggtgacggcgctgaagcgcggcgcagacggctatctgttaaaagatatggagccggaagatctgctgaaagccttacagcaagcggccgctggcgaaatggtgctgagcgaagcgttaacgccggttctggccgccagcctgcgggcgaaccgcgcgacctctgaccgcgacgtgacccaactgacgccgcgcgaacgcgatatcctgaagctgatcgcccagggactgccgaataaaatgatcgcccgccgcctggatatcaccgagagtacggtcaaagtgcatgtgaaacatatgctgaagaagatgaaactgaagtcacgcgtcgaagcggcggtatgggtgcatcaggaacgcatcttctga

SEQ ID NO: 73693 - DNA, 1407 bp, Citrobacter koseri
ttgagccgtattgtttatcgccctctttccctttgcatactcttgctgctggcaggcggtactgccagcgcgcaatcctcgtttattcaacaggcggaaaatcccttcgataacaaccaggatggtttacctgatttgggcatgacgcctgagtcacacgaaggtgaaaaacagtttgctgagatggtgaaagcctttggcgaagcgagcatgaccgacaatgggctggataccggcgagcaggcgcgtcagtttgcgtttggccaggtgcgggacgccgtgagtgaacaggttaatcatcaactggagtcctggctttcgccctgggggaatgcgagtgtcgatctcaggattgataacgaagggagctttaccggcagtcgtggaggctggtttattccctggcaggacaacacgcggtatctgacctggagtcaactcgggctgactcagcaggacgatggcctggtcagtaatgtcggcatcggccaacgctgggcgcgcgacggctggctgttagggtacaacactttttatgacaacctgctggatgaaaatctgcaacgggcgggatttggcgcggaagcgtggggcgaatacctgcgattatccgccaattactaccagcctttcgcttcctggcatgaacagaccactgccttagagcagcgtatggcgcgcggctacgatgttaccgcgcagatgcgcatgccgttttatcaacacctcaacaccagcgtcagcgtggaacagtatttcggcgaacgggtggatctgtttgactcaggcacgggataccataatccggtagcggtaaaactggggcttaattacacgccggtgccgctggtgacggtaacggcgcaacataaacagggcgagagcggggtgagccagaataatctggggttgaacctgaactaccgttttggcgtgccgctgaacaaacagctgtcggccagcgaggtggcggagagtcagtcgttgcgcggcagtcgctatgataacccgcagcgcaataatctcccgacgatggagtaccgtcagcgtaaaacgctcactgtttttctggcgacgccgccgtgggatctccagcctggcgagacggtgccgctgaaggtgcagattcgcagtcggcatggcgttcgtcatgtaacatggcagggcgatacgcaggcgctgagtctgacggcaggagcgaaggcggacagcgcagagggctggaccattatcatgccggcctgggacagcagcgaaggggcgacaaatcgctggcggctgtcggtcgttgttgaagatgagcagggccagcgtgtctcctccaatgagatcacgctatcactgactgaaccgtttatggcgatgcccgataacgatccgcgctggaagctgctcccggaggagtaa

SEQ ID NO: 73694 - DNA, 2613 bp, Citrobacter koseri
atgaatgaaacccggacaacgtgcccttactgcggcgtcggctgtggggtgatcgcccgcgtcagcgaacagggcgtcacggttcagggcgatcccgatcacccggccaattttgggcgactgtgtgtgaaaggcgctgcgctgggagaaaccactggcctgaccggacggttattacatccgcaggttaacggtgaaacggtaagctggcagcaggcgctgaacacggcgggcgagcgcctgcgcagcatcatcgcgcaatatggcccaacgtcggtggctttctacgcctcggggcaactgctgacggaagactactatgcggcgaataagctgatgaagggattcatcggtgcggccaatatcgataccaattcgcgcctgtgcatgtcgtcagccgttacgggctacaaacgcgcgtttggcgcggatgtggtgccatgcagctacgaagatatagagcgcagcgatctggtgattctggtcggctcgaacgcggcgtggacgcatccggtgctctatcagcgcctggtgcaggcgcgaaaagagaacccgtccatgaaagtggtggtgattgatccccggcgcaccgccacctgtgatattgcggatatgcacctggctctgacgcccggcagcgatggcgggctgtttgtcgggctgctgcacgccatcgcgacaagcggcgaacatgacgtcgattttgatgatgcgcaggcggcgtttgcccgcgccagtcgctggcctgttgagcgagtcgcgcaattttgtggtctggaacccgcggaaatccgccggttttatgatggctttctgaccgcgccgcgcgcaatcaccctttacacgatggggattaaccagtccgccagcggcagtgataaatgtaacgcgatcattaacgtacaccttgccagcggtaaatacgggcgggaaggctgcgggcccttttcgctgaccggacagccaaatgcgatgggagggcgtgaagttggcgggctggcgacacagctggcggcgcacatgaattttgagccgcaggatctgtcgcgggttgcccgtttctggggcacggagcggctggcgcagacgccggggttgatggcggtggatctgttcgacgctatcgcgcgcggcgaggtgaaggcggtgtggatcatgggcacgaatccggcggtatcgctgccggacactcatgccgtctgtcaggcgctgtctgcctgcccgttggtcattgtctcggaggtggtagccgataccgataccagtcgactggcgcatatccggtttccggcgttggcctggggggagaaaaacggcaccgtcaccaactctgaacggcgcatctcgcgtcagcgcgcatttttaaccgcccccggcgaggccagggcagactggtggattgtcgcgcagatggcgaaacaactcggctttggcgaggcattcgcctggcaggatgcgtgggatgtctttcgggaacacgctgcgctgtcggggtttgagaatgacggcgaccgcgcgtttgatattggcgcgctggcggatctgaaccgcgcggcgtgggatgaaatggcgcctgtccgctggccggtcagccgtcaccacggagcgctggacctggcttgcggctggcatcgcaataagcgtctgcggctggtgcccgttgaaccggagggcatgagaacgcgctgtgacgcgctctatccgcttattttaaacagcggtcgcctgcgcgatcagtggcacaccatgacccgaaccggaacggtggttcggcttatgcagcacattagcgaaccgattgttgaggtttcaccgtccgatgccgcccgttttcacctggtggatggcgcatttggccgtatcagctcttcgcgtggggtaatggtcgccagagtggtgattcaggccggcttgcgggaagggacggcgtttacgccgatgcactggaataatcgctttgcccggcagggaagggtgaatgcgctggtcgcgcccgtctgcgatcctcaatcagggcagccggagagtaaacaaacggcggtgcgcatcacgccgtggcagccgcgctggcagggggaactgttcatccgcgaggagataacctttcctccttttgttcactggtggcgtaaagcggcggaaagcgtggcgcgtttcaccctcgcaagcgatcgtgacgatcgcgactggttgctggcgatgtgccgcgaacagcgctggcaattgcagaccgcgcagacgccgcaggggctgaatattctggcctggcaggcgggacaattaatgctggggttctggtcagatgcgataaaacccgaaacagacgatgcggcggtgattgccgcgttccgccatccgccggaaaacgcccctgaacggcatggcctgttgagtggcaaaccgggcggcgggatgcccgaccagggacgcattatctgtagctgctttagcgtgggggagtgtgctattcagcaggctatcgtacaagggtgcgactccgttcaggcgctgggcaaaacattacgctgcggcaccaactgcggctcatgtgtaccggagctgaaagcgctgctggcgcaaacggcatccgccggaagcctgggattctcctga

SEQ ID NO: 73695 - DNA, 4068 bp, Citrobacter koseri
atgacgcagcgactggtcattatcggcaacgggatggccgccacccgtctggtggaggcgctgctggcgcgggcgccgcaggccttcacgataaccgtggtgggggaagaaccgcagcatgcgtataaccgcattcagctttcgcccgtactgggcggcgaaaagcgctttgcgcagacgctgctgcatccgcctgagtggtatcagcgccacggcgtcacggtgctgacgggggaagccgtcatcgccgttgacgcgatagcgcgtaccgccactaccaccggtcgaacgctggcgtgggatgcgctggtgtttgccaccggctcggttccgtttattccgccgatccccggcgctgatttaccccatgtgcatgcttttcgcacgattaacgatgtggacagcatcctgcatggctgcgggccggttgccgtgctgggcggcggtgtacttggcgtcgaggcggctgccgcgctgcgactaaaaggtgacaatgtcacgttaattcatcgcggcaatcggttcatggagcaacagcttgatgagcaggccggggaactgctggcggaacaccttaacgcacgcgggattgactgcgtgctgtcgtccggtatcgacaggattacgcctgatgacgtcacgttgacgaacggttgcgtgctgtctgcaacgcgcgtggtgattgccactggcgtaaaacccaatacggcgctggcgcaggcaagcggggtgccctgtcagcgtggaattgtggtggacgggcaactgcgcacggcggtggcggggatcagcgcgataggcgagtgctgtgaaatcgacgggcagacctgggggctggtcgcgccctgtctggcgcacgcggaggtgctggcggcccgcctggcgggaatccccggcgctgattttcactggcaggacagcggtacgcgtttgaaggtgacgggcatcgatctgttcagcgccggggaggtaaacgctacggcaggtgatgacctgctgcgcacatttgacccgctgagcggccattaccgtcgtctgctgatccgcaatggacggttacagggggtgctgctgatgggcgattgccgcagcgccgcgccgttgactgatttgctggcgcaggctgcgtcggcgaatcctgactggttattcgacagatttgatacgcagcctgcggctgcaggacaggtgactatgacaaaacccacgttggctgttgttggacacggtatggttggccaccattttcttgagcaatgcgttagccgcaatctgcatcttgactatcagattgtggtctttggcgaagagcgttatgccgcctatgaccgtgttcatctgtcggagtatttcgccgggcgcagcgcagaatcgctctcgctggtggaaggcgatttttttgcccgctacggtattgaactgcggttgtcgcaatgcgttacggcgatcgatcgggatgcccgcgttattcgcaccgccagcggacatgaaacgcactgggataaactggtgctggcaaccggatcatatccctttgttccgccggtgaaaggcggtgattcggcggcgtgtttcgtctatcgcacgttggacgatctggatgcgattgccgcgaaggcaaaacactctcgccgtggggtggtgattggcggcgggctgttggggctggaggcggcgaacgccttgcggcaattagggctggagacgcatgttgtcgagttcgcgccatctttaatggcggttcagcttgataacgctggcgcggcgatgctgcgtgaaaaaatcgaggcgctgggcgtgagcgtgcatacctcgaaatccactgcggaaattgactccaccccgcaagggttacagttggtgtttacggatggtgagcgtctggagacggatatggtggtgttttctgccggtattcgcccgcaggatgcgctggcgcgcggcgccggacttcgtatcggagaacgcggcggggtgtgtattgataaccactgtctgacctctgacgcggatgtttttgccatcggtgaatgtgcgctctgggacggcagggtgttcgggctggttgcgccgggctaccagatggcgcgcgtggcggcagcgcagctggccggtgaagatgcggcgttcagcggggcggatatgagcaccaaactcaaattactgggagtggatgtggcctcgttcggcgatgcgcaggggcgcacgccaggcgcgcaaagctatcagtggacgcatggcccggagcaaatctacaaaaaaattgtggtcagcgcggacggcaagacgctgctgggcggcgtgctggtgggggatgcggcggattacgccacgttattgcaaatgatgcttaacggtatggcgctgcctgggcagccggaatcgctgattttacctgcactggcgggcagcgcgccgaaagcgttgggcgttgcggcattaccggacagcgcacaaatatgctcttgtcataacgtcagcaaggcagacatttgccaggcggtcagcgcgggcgcaacggagatgggcgcaatcaagcagtgcaccaaagcggcaaccggctgcggtgggtgcagcgcgctggtgaaacaggtgatggagttccagctggcggcacagggcgtggaggttaaaaaggatatctgcgaacactttgcgtactcgcgacaggagatttaccacctggtgcgggtgaaccgcatccacacctttgagcaactgattagccgctatggtcgcgggcatggttgtgagatttgcaaaccgctggtgggctcggtgctggcctcctgctggaatgagtatctgctaaaacctgcgcatctgccgttgcaggacaccaacgatcgttattttgccaatatccagaaagacggttcgtattccgtcgtaccgcgtatggcggcaggcgaggtgacgccggatgggctgatcgccattggcgaaatcgccaaacgttatcagctctacagcaaaattaccggcgggcagcgtatcgacttgtttggcgcgcgcctcgaacaactgccggatatctggcgcgatctggttaccgccggttttgaaaccgggcacgcctacgggaagtcgttgcgcacggtgaaatcctgcgtcgggtcaacctggtgtcgctatggcgttcaggattcaaccggtctggccgtcacgctggagaaccgctacaagggactgcgcgccccgcacaaaatcaaaatggcggtctccggctgtacccgcgagtgtgccgaagcgcaggggaaagacgttggcgtgatcgccaccgataagggctggaacctgtatgtctgcggaaacggcggtatgaagccgcgtcatgcggatctgttcgccagcgatctggatgatgccacgctgattaaattcgtggatcgcttcctgatgttctatatccgtaccgccgatcgcctgcaacgcaccagcacctggatggataatcttgaagggggcatcgactatctgcgtgaggtggttatacacgacagtctgggtatcggcgacgagcttgaacaggagatggcgcggattgtggaaacataccagtgtgaatggcaaaccacgctgaacgatccgcagcgtctggcgctgttccgcaccagcgtgaacggcgacgaaccggatgaagccgtagcgcgccagatgctacgtgggcaaccgcagctggcgaaaccggcggcgccagcgagaaccatcctgccgacaaaaccctggcaggaggtttgtcaactggaggagattcccgagcaggcgggcattggcgcccgtctaggcaacctgcaaattgcgctgtttcgctttggtcagacgatttacgcccttgataaccatgaacccggcagcgacgcaaacgtgctttcccggggaatcctgggggatgcaggcggtgagcccgttgtcatttcgccgctctacaaacagcgtattcgcctgcgcgatggtcggcagtatgacagcggtgagcccgttgtgcgcgcctggccggtgaaagtcgaagcgggcaaggtatgggtagggaatcaggcgctactgctgcgtgcggaggcgtcatga

SEQ ID NO: 73696 - DNA, 789 bp, Citrobacter koseri
atgaaaccgttaattcaggtacaggccgtcagtcagcgtttttctaccgccagcggcgaatttctggcgttgcaaaacgtctctttcgacattcatgaaggtgaaaccgtcagccttattgggcattccggctgcgggaaatcgacgctgttgaatctgattgccggaattacgctccctaccgacggggggcttatttgcgacaaccgggaaatcgccgggccggggccggaaagggcggtggtctttcagaatcactcgctgctgccgtggctgacctgcttcgataacgttgcgctggcggttgatcgggtttttcgccgcacgatggggaaaacagagcgtcgggaatggattgaacacaatcttgaacgggtgcaaatggggcacgccatgcacaagcatccgggagaagtgtccggggggatgaagcagcgcgtcggcatcgcccgggcgctggcgatgaaacccaaagtgctgctgatggatgaaccgtttggcgcgctggacgccctgacgcgcgcgcatttgcaggacacggtgatgcaaatccagcagtcgctcaataccaccattgtgttgattacccatgatgtggatgaagcggtgctgctctccgatcgcgtgctgatgatgaccaacggcccggcggcgacggtaggcgacattttgcccgtcacgctcccccgcccgcgtaatcgcgtgcagctggctgacgacagccgataccaccagttgcgccagcagattcttcacttcctctacgaaaagcagccgaaggcggcgtag

SEQ ID NO: 73697 - DNA, 882 bp, Citrobacter koseri
atgaaaacagtacaaaacgcgcaaagacgcattcctgaacccgccgccggtgaagtgattacgctgccgcccgttacggtgcgcaggcgtaatccgccgctgtcgcatctgatgcgaacgctggcgcagcgaaccgttcccgcattgctggggctggcgctgctggtggtgggctggcaactggcggccattaacagcaaaggcttcccgacgccgctcagcacccttgattccgcgctgacgctgtttgccgacccgttttataacggtgggcctaatgatatggggattggctggaatgtgctggcgtcgctacagcgtgtggcgattggttttgggctggcggcgctggtgggtatcccgcttggcttcctgatcggccggttcacctttttctcgcgcatgtttaccccgctgatcgcgctgctgcgaccggtcagcccgctggcctggttgccaattggcttgctgctgtttcagaaagcggaaccggcatcaagctggactatttttatctgctctatctggccgatggtgatcaacaccgccgaaggcgtgcgccgcatcccacaggattaccttaacgttgcccgtgtcctgcaactcccggaatggacggtgatgcgccgtattctctttccggcggttctgcctgcggtgctgaccggcgtgcgcctgtctatcggcatcgcctggctggtgattgtggcggcggaaatgctcaccggcggccttggcattggcttttggatctggaacgagtggaacaacctcaatgtggaaaacattctcatcgctatcgtcatcatcggcgtggttggtctgctgctggagcagggcttaatgctggtggcgcgtcgttttagctggcaggaaaaataa

SEQ ID NO: 73698 - DNA, 1260 bp, Citrobacter koseri
atgggtgacaggtctgtttcattgacgcgacgtcgattattgcaggcaggggccgcgatgggcggggcgctgctggtgcccggtttgatgcagtccgtgtgggcggcaggatcggacaaacccgaacttgaaattgtcagagtcggctttattccgctcaccgactgcgcgccgctgatcatcgccgcgttgaaagggtttgataagaaatacggcattaccctcgtgccgaccaaagaggccagttgggcggcggtgcgcgacaaactcgtttccggtgaactggacgcggcgcatgtgctgtatggactgctctatggtcttgagcttggtattgccagtaagccgcagccgatggcgaacctgatgacgttaaatcagaacggacaggcaatcacgctgtcgacggcgctccaggagaaaggcattaccgacgctggcggattgaaaaacatgatcgccggacaagcgcccggcacttacacctttgcgcatacctttccgaccggaacgcatgcgatgtggctctattactggctggccagcgcgggtattaacccgttctctgatgtccgaatggtcgtcgtgccgccgccgcaaatggtgatgaacatgcgtattggcaacatggtgggtttttgcgtcggtgaaccgtggaatgcccgtgcgattaatgatcgcattggttttaccgccacgacctcacaggccatctggcccgatcacccggaaaaaatcctgggaacgcgccgtgactgggtcgaacagcatccaaacaccgccagagcgctggtcagcgcggtactggaggcggcgcgctggatcgacgcctcagtggaaaaccgacgcgaaaccgcacaaatactggcccgtcgcgcctggcttaataccaaagagcagtacctgaccggacgtatgttgggcgagtacgacaacggcgcagggcatcgctggcaggacgcgcacgccattcgtttttatcacgatgcggaagtgagttttccgtggcattccgacgggatgtggttcctgacgcagttccgtcgctgggggctgctcaaggacgcgccggattataacgccatcgccgcccggattaaccgcacggacatctggcgggacgccgccgcagcggtaggcggcatcacgccgccttctcagctgttacgcaccagcaccctcatggatggttccgtatggaccgggcgggaccccgaacgttacgccaacagcttcactctccatcatcaaggggcctga

SEQ ID NO: 73699 - DNA, 1197 bp, Citrobacter koseri
atgatgacgaatatggaaagccgccccggcgccacccaatggtttcattatgcgcgccagcttgagaatacgcagcttcgccaactggcgcagtcagggaagctggtgtcccggattagccatctggtgcatatgctacagtgcgaacgcggcgcatccaacatctggttgtgttccgcagggcaactttatgggccggagatacgcgccagccgcgcgctggtggacgaagaacacgtccggttgcagtccctgttgcaggagatgaggccgatggcgaacagcgcgctctgtcatcgcatcgccggggctgtctggtgtctggagcagttgccgcagctgcgcgaagcggtcagtggacggcatagcgatgcgccacaggcgatggatcagtacagccgcacgttgcgccacctgctaagtattgtgccgcagcttaacgataacatcgaccatccccacatcgccggagggatggtcgcgctgtacagctttatgcagggtaaggagctggtggggcaagagcgggcgctgggggcgatagggtttacgcaaggggcgttcagccacgagatgcgacaggaactggtggatcgcattgacggacagcagctctgctttgacacctttatatcgctggcgtctccgacggtggttcacgcatttcgccagcagtgcgaagcggaagccgctatcgaacagtggcgccgtctggcctgtacgcgccagcctgcgcccgataagggcgaaagcgctttacgctggttcacgctccagacgcaacggctggagcaactgcgcagcatcgaggagatgctgatcgccgagttaatgtctgcggtggagcgccgtctggcgcaggatgagacaacgttgccgctcgccagctggctggatgatgccaccgacgatacgttctcattgcgccgggataagcagttgctgctggttgtgcggcaacaggcgcgggagctggagcagctcagcgggcaactggcgtcgctacaggatgcgctggaggagcgaaaggttattgataaggctaaatatgtgctgatgcatcaccagaatctgtctgaagagcaggcctggcagtcgctgcgcaaaatggcgatggataagaaccagcggatggtggacatcgcgcgtgcgctgctcacggtgaaatcgctctggcaggtgacaaccaaaggatag

SEQ ID NO: 73700 - DNA, 354 bp, Citrobacter koseri
atgcaaaagatagtgatcgtcgcaaacggtgcggcatacggtagcgaagcgttatttaacagcctgcgtctggccattgcgctacgtgaacaggccggcgacctcgacctgcgtttatttttaatgtcggatgccgtcaccgcaggattacgcggacagaagcctgcggaaggttacaatatccagcaaatgctggagatcctgaccgcgcagaacgtcccggtgaaactgtgtaaaacctgtaccgacgggcggggaatcaccacattgccgctcattgacggcgtggaagtcggtacgctggtcgaactggcccagtggacgctggcggcggataaagttctgaccttctga

SEQ ID NO: 73701 - DNA, 1785 bp, Citrobacter koseri
atgttcagctcaattcgcgcccgtattattgcggcgacaacgggatgtctggttgtcgccctcctccttaacacgctgattaaccttcaggtaacgcgtctcgataaccgacaagcgcagcaggatacgctcaccagtaccagcgccagccacagtctggcgattgccgactgggttagcagcaaaatgaatatgatttcctcgttgcagcaggcggcgctaaccgacgatccggtgccggtatttcgtcaaatggcgctgggcggcggctttacgaatatctatgtcgggtatgccagcaaaacagcaaaattctccgacccggcaggcataccgccagattttgatccgacgtcacgtccctggtatcaacaggttgtcagcgctgacgctgccgtcgttacggccccctatgttgatgccggaaccggcaagctggtggtaacgttcgccgttccggtgaaagagaacggcgaactgaaagcggtggtcgccggtgatgtcgcgatggatgccgtcgtggcgaatgtacacggtattcaaccgacacccgccagcagcggtatgttgctcgaccaaaacggaacgctcatcgccgccaacgatccggcgctgacgatgaaacctttcgcgcaggtcgtcagcggcgtggatttcaatcaggtaaaaagcggacaccctgttcaggcgctgatcggcgagagcagtaaaacgctgctggcgacgccggtgcaaggaacccactggtggctggtcgtggcgttagacgaaaaagaggcgacctccggcatgctggcgctgctgaaggcgtccaccctgtctctgctgctgttggttctcgcgggcggcgcagtgatgcaccttctggtggctcgcctgatgaagcgtctgtccacgatccgtgacgcgatgcatgccattgccaacgggacgaacgatttgtctcagcgtttgccggacagcggcacggacgaggtcgcgcaaatcgccagggcgtttaacggttttagcgataagctgtccgtagtgatggtacagctacgcgatgccagcgcctcagtgaaaatggccgcgcaggagattgccgccggtaaccgcgacctttcaggccgtaccgagcaggccgcctccagcctgcgtgaaaccgccagcgccgttgagcaaatcaccgcatcggtcgcccagtccacggaatctgccgccgaagccaacgatcaggcgcaaaaagcctcacaggccgccacgcgcggcggcgacgtggtctcgcaggcaatcacgacaatgcaatccattgaaggggcatcggcgaaaatcggcgatatcaccagcgtgatcgacggtattgcgttccagaccaatattctggcgctgaatgcttcggtcgaagccgcccgggcgggagagcaaggccgcgggtttgccgttgtcgcaggtgaagtgcgcaaccttgccagccgcagcgcgcaggcggcaaaagagattaaatcgctgatcgactccacaaccaccagcgtcgcgacaggttcacgttatgttcatctggccggagaaagtatgcaggagatcctgtccagcatcggccatgtctccggcatcatgcatgaaatcagcatcgccaccagtgagcagatgaaaggcattcaggaaataaatcactccgtgaaccaccttgatcgcatggtgcaacagaacgctgaactggtggtgcagtctgccgccgccgcaggcgccttgcagagccaggcaggcgagctggctgaaactgccgggcatttccgaatttaa

SEQ ID NO: 73702 - DNA, 246 bp, Citrobacter koseri
atggcattagtgaaagcaagtttgaaattgtttggtggggatacggtgatagtgcgttgttctgaacgctgccacatccatttaatgagcgagaaaaaacacgtcaaagacacgcagaccgatattttaagtgtgcagaaccgtgataatgcctggctgaccgtaccgtacaccggtgtctggaacgtgctgatcgacagccacagccagtcactggaacactccatcagttatatcgcagcctga

SEQ ID NO: 73703 - DNA, 696 bp, Citrobacter koseri
gtgttaacgcgtgattttttactgaatgccgattgtaaaacggcgtttggcgctattgaagaatcactactttggtcagcagaacaacgggccgcttcactggcggcgacgcttgcctgtaggcccgatgatggaccggtgtggatcttcggttatggatcgttgatgtggaatccggcgttagaatttgacgagtcctgtaccggtacgctggtcggctggcatcgggcgttttgtctgcgtctgacggcagggcgtgggacggcgtgccagcccggacggatgctggcgctgaaagagggcgggcgaactactggcgtggcttataaactgccggagaacgcgctggagcaggagctgacgctgctgtggaagcgggaaatgattaccggctgctatcttcccacctggtgccagctggcgctggatgatggccggacggtcaatgcgctggtgtttattatggacccgcgacacccgctgtatgagtcggatactcgcgctcagattatcgcgccgctgatcgctgctgccagtgggccgttgggcaccaacgcgcaatacctgttctcgctggaacaggagcttgccagactggggatgcgggacgattgcctgaacgatctggtggcgaaagtcagaggcttgttaggcgagaatcagccggaaaggggattcaaccccggatttgcctga

SEQ ID NO: 73704 - DNA, 231 bp, Citrobacter koseri
atgccttataaaacgaaaagcgatttgccggaaagcgttcagaatgtgctgcctgcgcacgcgcaggatatctataaggaggcgtttaatagtgcctgggaacaatataaagataaagcggacagacgtgacgacgccagccgggaggagaccgcgcataaggttgcctgggctgccgtcaaaaatgattaccaaaaaggggacgatgataagtggcataaaaagcgctga

SEQ ID NO: 73705 - DNA, 1101 bp, Citrobacter koseri
atgacacacgcacatgaggcggtaaaaacccgccacaaggagacctcgcttattttcccggttctggcactggtggtgctgttcttatggggaagcagtcagtcactaccagtggtcatcggtattaatatacttgcccttattggtattttaagcagtgctttcagcgttgtccgccatgcggatgtattagcgcaccgactcggcgaaccctacggttccctgatcttaagtctttctgtcgttattctggaagtgagtttaatttccgcattgatggccaccggcgacgccgcgccaacgctgatgcgcgacacgctctattcaatcatcatgattgtaactggcggactggtcggtttttctctgctgcttggcggtcgtaaattcgccacgcaatatatgaacctgtttggcattaaacagtatttaattgccctgtttccgctggcgattatcgtactggtcttccctatggcgctgccaggggcgaattttactacggctcaggcgctgttagtggcgcttatttccgccgcgatgtacggcgttttcctgctgattcagacaaaaacgcaccagagtttattcgtttacgagcatgaagatgaaagtgatgacgatgacccgcaccacggcaaaccgtccgcgcacagcaacatctggcacgctgtatggctgatcgtacatctgattgccgttatcgccgtgacgaaaatgaacgccaatccgctggagacactgttaaccgaactgaatgcgccagtagcatttaccggtttcctcgtggccttgctgatcctctcccctgaaggactgggcgcgctgaaagcggtgttgaataaccaggtacagcgagccatgaacctgttctttggttcggtactggcaaccatctccctgaccgtaccggtggtgacgctgattgcatgggccaccggaaatgacctgctcttcggtttgggcgccccggagatggtggtaatggtggcctcactggtgctgtgccacatttccttctcgaccgggcgaaccaatgtgttgaacggcgcggcgcatctggctctgtttatcgcttacctgatgaccatttttgcctga

SEQ ID NO: 73706 - DNA, 855 bp, Citrobacter koseri
atgaaacaaaaagtggttagcattggcgacatcaacgtggcaaatgacctgccattcgtgctgtttggcggtatgaacgtgctggaatcacgcgatctggcgatgcgtatctgtgaacactacgtaaccgtgacccagaagctgggtattccttatgtgttcaaagcctcttttgataaagccaaccgttcctctattcactcttaccgtggcccgggtctggaagaagggatgaagattttccaggaactgaaacaaacgtttggtgtgaaagtgatcaccgacgttcatgaagccagtcaggcgcagcctgtcgctgacgtggtggatgtcattcagcttccggcattcctcgctcgccagaccgacctggtggaagcgatggcaaaaaccggcgcggtcattaacgtgaaaaaaccgcagttcgtcagccctggtcagatgggcaatatcgtggacaaattccacgaaggcggcaacgataaagtgatcctgtgcgatcgcggtgcgaacttcggctacgacaacctggttgttgatatgctgggctttagcgtgatgaagaaagtttccggtaactcgcctgttattttcgacgtcacccatgcgttgcagtgccgcgacccgtttggcgccgcgtctggcggtcgtcgcgcgcaggttactgaactggcgcgcgccggtatggcggtaggtctggccggtctgttcattgaagcgcacccggacccggagcatgcgaaatgtgacggtccgtccgcgctgccgttagcgaagctggaaccgttcctgaagcaaattaaagcgattgacgatctggtgaaaagcttcggcgagctggataccgaacactaa

SEQ ID NO: 73707 - DNA, 810 bp, Citrobacter koseri
atgaggtcgttagctgatttcgaatttaataaagcgccactgtgcgatgggatgatcctggcatcggaatcgatccgcctggattttccgacgcaagcggtctatgacgaactggaacgtctggccagtctggcgcatgaagaaattagccagctcctgtctcaggatgagcaactggaaaaattgctggcacttttttatggcgagtgggggttcagagatacccacggcgtctaccgtctttctgatgcattatggctcgatcaggttctgaaaaaccgccaggggagcgcggtatcgttaggcgcaatcttattgtggctggctcaccggctgggtctcccattggtgccggtcattttcccgacccagttgattctgcgtattgaatcgctggagggggaaatgtggctgatcaacccatttaacggcgaaacgctcgatgagcatacgctggaagtctggctgaagggcaatattagcccggtcgctgagctgtttaacgaagatctggatgaggcggataacgctgaggtcattcgcaagttgctggatacgctgaaatcttccttgatggaagagcggcaaatggaactggcgttgcgcgccagcgaagcgttactgcaatttaacccggaagacccttacgagatccgcgaccggggcctgatttatgcgcaactggagtgtgaacatgttgcgttgacggatttaagttattttgttgaacagtgtccagaagacccgatcagcgaaatgattcgtgcgcagattaataccattgcgcacaagcaaattgttttgcattaa

SEQ ID NO: 73708 - DNA, 393 bp, Citrobacter koseri
atgaatacatttacgctgctgctgggcgtccatctgaccagcgttacgctttccgttagcctgttcgtgctgcgtttctggtggcgctatacccgccatgcgctggcatccgcacgctggacgcgggttgtcccgccgattattgacaccgttttgctgcttagcggagcggggttgatcataaaaacgcacatcctgccattcaccgtacaggggacatggctgactgagaagttgtttggcgttatcatctacatcgttttgggttttattgcgcttgattatcgtcaggcgcgcagtcagcaggcgcgcgttatcgccttcccgctggcgctggtggtgctgtacatcatcattaaactcgccaccacaaaaataccgttactggggtaa

SEQ ID NO: 73709 - DNA, 834 bp, Citrobacter koseri
atggattaccagcactggttgcgtgaggcgataagccgcttacaggagagtgaaagcccccgacgtgatgccgagattttgctgggccacgttaccggtaaggcgcgcacctttattctggcatttggcgaaacggcgctgaccgacacgcagcgtgagcaactggcgcagttgctggcgcgtcgtcagcgcggcgaaccggtcgcacacctgactggcatgcgcgagttctggtcactgccgctgtttgtctcgcccgccacgctgatcccgcgcccggacaccgaatgtctggtcgagcaggcgctggcgcgtctgcctgattcgccgtgtcggattctcgacctcggcaccggaaccggcgcgattgcgctggcgctggcgactgagcgaccggactgcgaagtcacggcggtagaccgtatgccagacgccgtggcgctggctggccgtaatgcgcaacatctggcgattcacaatgttcgcatactgcaaagcgactggtttgcggcgttgccggggcagcaatttgatatgatcgtcagcaaccctccatatattgatgcgcatgatccccatctcgcgcagggcgatgtgcgttttgaaccgctgtcggcgctggtcgcagacgataacggcatggcggatatcacgcacattattgcgcaggcgcgccatgcgctggtgccgggggggtatctgttgctggagcacggctggcagcaaggggcggcggtcagaaccgcgttggcgcaggcggggtacgttcaggttgagacctgccgtgattatggcgacaacgaacgaatcacgcttgggcggatcgcgccatga

SEQ ID NO: 73710 - DNA, 1083 bp, Citrobacter koseri
atgaagccttctatcgttgctaaactggaagccctgcacgaacgccatgaagaagttcaggcgctgttgggtgatgcgggaaccatcgcagaccaggaacgctttcgcgcgctgtcgcgtgagtatgcgcaattaagcgatgtttctcgctgttttacggactggcaacaggttcaggatgatatcgaaacggcacagatgatgctcgacgatcctgaaatgcgcgagatggcgcaggatgaactgcgcgaagccaaagaaaaaggtgaacaactggagcaacagttgcaggttctgctgctgccaaaagatcccgatgacgaacgtaacgctttcctcgaagtgcgcgccggaacgggcggcgatgaagccgcgctgttcgcaggcgatctgttccgcatgtacagccgttacgcggaagcgcgtcgctggcgggtagagatcatgagcgccagtgaaggcgagcatggcggctataaagagatcatcgccaaaatcagcggcgatggcgtttacgggcgactcaagtttgagtccggcggccatcgcgttcagcgcgttccggcgaccgaatcgcaggggcgtatccacacgtccgcctgtaccgtcgccgttatgccggaactgccggaggccgaactgccggatattaacccggctgatttacgtatcgacaccttccgctcttcgggcgcgggcggtcagcacgttaacaccaccgactccgcaattcgtattacgcacttgccgaccggtatcgtggtggagtgccaggacgaacgttcacagcataaaaacaaagcgaaggcgctgtcggtgctgggcgcgcgcatccacgccgcagaaacggcgaagcgtcagcaggctgaagcctcaacccggcgtaacctgttaggcagcggcgaccgcagcgatcgcaaccgtacctataacttcccgcagggtcgcgtgacggatcatcgtattaacctgaccctctaccgtctggatgaggcgatggaggggaaactggacatgctcattgagccgattgttcaggaacatcaggccgaccaactggcggcgttgtccgagcaggaataa

SEQ ID NO: 73711 - DNA, 1257 bp, Citrobacter koseri
atgacccttttagcgctcggtattaaccataaaacggcacctgtatcgctgcgagaacgcgtaacgttttcgccagatacgctcgatcaggcgttggacagcctgcttgcgcagccgatggtgcagggcggcgtggtgttgtcgacgtgcaaccgcacggagctgtatctcagcgttgaagaacaggataacctgcaagaggcgctgattcgttggttatgtgattaccataatctcaatgaagacgacctgcgcaatagcctctactggcaccaggacaacgacgccgtcagccacctgatgcgcgtcgccagcgggctggactcgctggtgctgggcgaaccgcaaattctcggtcaggtgaaaaaagcgtttgcggattcgcaaaaaggccatctgcatgccagcgcgctggaacgcatgttccagaaatcgttttccgtcgccaaacgcgtacgcaccgaaacagacatcggcgccagcgccgtgtccgttgcttttgccgcctgtacgctggcgcgtcaaattttcgaatccctctctacggtgacggtgttgctggtcggggcgggtgaaaccattgaactggtcgcgcgccatctgcgtgaacataaagtacagaaaatgatcatcgccaaccgcacccgcgaacgcgcgcaagtgctggcggatgaagtgggagctgaggttatttcgttgagcgacattgacgaacgtctgcgggaagccgatattattatcagctcgaccgccagtccgctgccgattatcggcaaagggatggtggagcgcgcgttaaaaagccgccgtaaccagccgatgctgttggtggacattgccgtgccgcgcgacgtggagccggaagtcgggaaactggcgaatgcctatctgtacagcgttgatgacctgcaaagcatcatttcgcataacctggcgcagcgtaaagcggcggcagtggaagccgaaacgattgtcgctcaggaagccagcgaatttatggcctggctgcgctcgcaaagcgccagcgagaccatccgcgaataccgtagtcaatcagagcacgtacgcgatgaactgacagttaaagcgttggcagcccttgaacagggcggcgacgcgcaagccattttgcaggatctggcgtggaaactgaccaaccgcctgatccatgcgccaactaaatctcttcaacaggctgcccgtgacggggatgacgaacgcctgaatattctgcgcgacagcctcgggctggagtag

SEQ ID NO: 73712 - DNA, 624 bp, Citrobacter koseri
atgaccctgcctgattttcgcctgatccgcctgctcccgctggctagcctggtcctcaccgcctgtacgatcaatgcgccgaaaggtcctggcaaaagtcccgactcccctcagtggcgtcagcatcagcaggacgtgcgcaagttgaatcagtatcagacgcgtggcgcgtttgcttatctctccgacgatcagaaagtgtatgcccgcttcttctggcagcaaaccggtcaggatcgctaccgtctgctgttgaccaatccgctgggcagcaccgaactggagctgaacgcccagccgggcaatgtgcaactggtcgacaataaagggcagcgttacaccgccgacgacgccgaagagatgatcggcaagctgaccgggatgcccattccgcttaacagcttacgccagtggattctcggtctgccgggcgacgccaccgattacaccctcgacgaccagtaccgcctgagcgaagtgaactaccgccaggacggtaaaaactggaaagtggtatacagcggatacgacagtaaaacgcagcccgccatgccggcaaatatggaactctctgacggcggtcagcgcatcaaactgaagatggataactggattgtaaaatga

SEQ ID NO: 73713 - DNA, 852 bp, Citrobacter koseri
atgatgacccactggccatctccggcaaaactgaatctgtttttatacatcaccggacagcgtgcggacggttatcacacattgcaaacgctgttccagtttcttgattacggcgacacgatcggcattacgccgcgtggcgacggcgaaattcatcttttgacgcctgtcgagggcgtcgaaaatgacgacaatctgatcgtccgcgcggcgcggttgctgatgaagacagcgtccgcccacgggcgtttgcccgcaggcagcggcgcagatatcagcatcgagaaacgtttgcccatgggcggcggtctgggtggcggctcgtccaatgcggcgaccgttctggtggcgctgaatcatctctggcagtgcggattatcggtcgatgaactggcggaaacaggcttaacgctgggcgcggacgtcccggtgtttgtccgcggacatgcggccttcgccgagggcgtgggtgaaatcctgacgccggtagacccgccggagaagtggtatctggttgcccacccaggggtaagcatccccacgccggttattttcaaggaccccgaattaccgcgcaacacgccaaaaaggtcaatagaaacgttattaaaatgtgaattcggcaatgattgcgaggttatcgcaagaaaacgttttcgcgaggttgatgcggcgctttcctggctgttagaatacgcgccgtcgcgcctgactggtacaggggcctgtgtctttgctgaattcgatacagaatccgctgctcgtcaggtgcttaagcaagccccggaatggctcaatgcgtttgtggcgaagggtgtcaacctctctccattgcaaaaagccatgctttaa

SEQ ID NO: 73714 - DNA, 948 bp, Citrobacter koseri
gtgcctgatatgaagctttttgctggtaacgccaccccggaactagcacaacgtattgccaaccgcctgtacacttctctcggcgacgccgctgtaggtcgctttagcgacggcgaagtcagcgtacaaattaacgaaaatgtacgcggtggtgatattttcatcatccagtccacttgtgcccctactaacgacaacctgatggaattggttgttatggtcgatgcgctgcgccgtgcttccgcaggccgtatcaccgccgttatcccttactttggctatgcgcgtcaggaccgtcgtgtacgttccgctcgtgtaccgattaccgcaaaagtcgtcgctgacttcctgtccagcgttggcgttgaccgcgttctcaccgttgacctgcatgctgaacagatccagggcttctttgacgttccggttgataacgtattcggtagcccaattctgttagaagatatgctgcaactgaacctggataacccgattgtggtttctccagatatcggtggcgttgtgcgtgcccgcgctatcgctaagctgctgaacgataccgatatggcgatcatcgacaaacgccgtccgcgcgctaacgtttctcaggtgatgcacatcatcggtgacgttgccggccgcgactgcgtactggttgatgatatgatcgataccggtggtacgctgtgcaaagcagcagaagcactgaaagaacgtggtgccaaacgcgtattcgcctacgcgactcacccgattttctcaggcaatgcggcaaacaacctgcgcaattctgtgattgatgaagtcgttgtctgtgacaccattccactgaccgacgaaattaaagcactgccgaacgtgcgcacgttgacactgtcgggtatgctggccgaagcgattcgtcgtatcagcaacgaagaatccatttcagctatgttcgaacattaa

SEQ ID NO: 73715 - DNA, 1653 bp, Citrobacter koseri
atgcctttccgcgccctcatcgacgcttgctggaaagaaaaatataccgcctcacggttcacccgtgatgtgattgccggggtaaccgtcgggatcatcgctatcccgctggcgatggcgctggcaattggcagtggtgttgcaccgcagtacggtctttatacgtccgctgtggcggggattgttattgccttaaccggcgggtcacgcttcagcgtctccggcccgaccgccgcatttgtcgttattctctacccggtatcgcaacaatttgggctggcaggcctgctggtcgccaccctcatgtccggggtgttcctgatcctcttcggcctcgcgcgttttggccgcctgatcgaatacattcccgtatcggtcacgttaggttttacatcagggatcggcatcaccatcgggacaatgcagattaaagatttcctcggtctgcaaatggcccatgtgccggagcattacctacaaaaagtcggggcgctggttatggcgttgccgaccattaatccgggcgatgccgctattggcgtggtgacgctcggtatgctgatgttctggccgcgtctggggattcgtctgccgggccatcttccggcgctgctggcgggctgcgccgttatggccgtggttaatctgctgggtggccatgtggcgacgattggttcacagttccactatgtgctggccgatggttcgcagggcaacggcattcctcagttgctgccgcagctggtattgccgtggaatctcccggattcagatttcacgctaagctgggattcattgcgggcgttattgccagccgctttctcgatggcgatgctgggggcgattgagtccctgctgtgcgcggtcgtgctcgacggcatgacgggcaccaaacacaaagcaaacagcgaactgatcggccaggggctggggaatatcgtggcgccgttctttggcgggatcaccgcgacggcggcgatcgcccgttctgcggcaaacgtgcgcgcaggcgcgacctcgcccatttccgccgttatccacgcaattctggtcatcctcgccctcctcgcgctggctcccctgttgtcatggctgccgctttccgccatggccgcgctgctgctgatggttgcgtggaacatgagtgaagcccataaggtggtcgatttactgcgacatgcgcccaaagacgacatcatcgtgatgatgatgtgtatgtcgctgacggtgctcttcgatatggtgattgcgatcagcgtcgggattgtcctggcttccctgctgtttatgcgccgtattgcccgtatgacgcgcctcgcggcggtaaacatcacggttcccgatgatgtgctggtattacgcgttatcgggccgctctttttcgccgccgcggaagggttatttaccgacctcgaatcacgcattgagggtaaacgcattgtggtgctgaagtgggacgccgttccggtgctggatgccggtggtctggacgccttccagcgctttgtgaagcgtttgccggaaggctgtgaactgcgcgtcagtaacgtggaattccagccgctgcgcaccatggcccgcgccggtatcaaacccattccaggtcgtctggcattcttcccgaacaaagatgccgcgctggcggatatctaa

SEQ ID NO: 73716 - DNA, 561 bp, Citrobacter koseri
atgaaaccaacctctccgtttgtttttcgtgaaataacgcgggacgatattcctgccgtacagtcctttattattcggcatcttaatctttattttaatgccggaagagcattacccactgcgagtgacgacgtattcgacctccagggaaattatcttgagcgggaaagaaaccaattgttcggcgtctggaatgaacaacagcagataattgggacgctggcgatatgtcagtacgatgacagaatagagatgttgcacggtcgttataatttaccggagacagctgagatttgtcgctgctatgtcgatcagcattatcgcaggcaaggtattggcagccaactggtctcgctggctgaacaattttgcgagcagcaacactataaaatattatatttgcacacccatcattttttacccggcgggtatcaattctggcggcgaaatctgtttaacgtcttcatggatgtgggtgacgagtggcagatcgtgcatatggaaaaaccgtgtaaatatattgttaccagcgacaatattgataacattcactgtttataa

SEQ ID NO: 73717 - DNA, 1050 bp, Citrobacter koseri
atgtacgcagactttactttacctcataaaaaataccttctggctgtggctggcgcagcgttattattcacatcaggattgactcatgcagcaaaaacagtctatccgttgacgattaaaaactgcggtcgtgatattaccttcaataaagccccggaacgcgttgccacggtcgggcaaaacagcactgaaattctttattccctgggactggccgagcgcgttgtcggcacatcgctgtggttcggccccgtcccggatgcttacaaagcggcaaatgaaaaagtggccgtgattgcgcagaacatccccagctttgaaggcattattgccaaaaaaccggatttggtcgccagtcagtttgaatggcaaattgggcctgccggaaccgtcgcctcttacgagcagtttagcgagttgaacgtgccggtatataccgcgcctgcggactgcgctaaagacaacgaagacggtggagacggtgtacgtaaaggcatgtttgatattgctatggtttatcaggaagtctccgatctggcgaaaatttttgacgtgcaggacaaaggtgatgaattgatcgccagtctgaaagcccgtgaagctgccgccaaagacaaaattgccggaatggataaaaacgtctccgccgtattctggttttccagcgccgatctgcaactggacccctatgtggccgggaaatttggccctgccgcatggatcgcccagacgctgggggtgaaaaatgtgattgattctgctgaagagtggccaaccgttggctgggaaaccatcgcgaaagccagcccgtccgtcattgttctcggtgaaatgagccgtcgtcgtttcccggcagatgactggcaggtcaaactggaatatctcaagtccgaccccgtgactaaactcatccccgccgtgaaggagaaccatctgccggtggtggatgtacaaacaatgaacgccggcatcagaacgatagatggcgtcgaaaaactcgcagatgcgttggttgaatacggtctggcgcatccgaaaacggctcaataa

SEQ ID NO: 73718 - DNA, 1068 bp, Citrobacter koseri
atgatgagcgaaactcgcaggacgcgtcgcgctgtcggccagttaacgataagaatcgggggacacgccctttgggtcagcgtgctgatgtgctgcgttctactggcggggatctccattggcgagacgtttatcccctggcagcatgtcatccatacgctttctaaccagttctttgatacgcgctatgccgttgatgcgctggatgcgggcattatctggaactatcgcctgacgcgggcgttggtttctgcctgttgtggcgcatgtctggcggtttccggcgtcgtattgcagtcattgctacgaaacgcgctggcagagccttatctactggggatctctgccggcgcctcgaccggcgctgttctgatcgccttaacagggcttggcgctgggatcgtcagcatgtcgcttggggcttttattggggcgttaacggcttttcttttcgtggcgttactggcgatcgccgccggggggagacagggaagcgccaccacgcaaatcatcctggccgggatcgccagttcacagttatttaatgccctcacctcgctaatcatcactcgctcagcgaatgcggaacaggctcgtgggattatgttctggctgctgggcaatctgagcggcgttcgctggccagatgtcgttttggccgtccctaccgcgctggtcggtgtggcgttatgtttttgttacgcccgtcatctggatgcgttttcgtttggcgcagagtccgcagcgtcacttggcatcccggtaaaacgcacgcgcggagtcctgattgccgccgttaccggtatgacggcaattatggtctccattgtcggggcgattggttttgtcggcctggtgatcccccatgccgcccgcctgctggtgggtaatcaacaccatcgattgctgccggtcagcgccatgatcggcgccatttttctcattatcgccgacgtaatctccagaacattacttcccgggcaggtgttacccatcggggtgattacggcgcttgtaggcgcacctgcgttttccatcattttgatcagaggaaaccagacaaaatga

SEQ ID NO: 73719 - DNA, 822 bp, Citrobacter koseri
atgacggtaaattctgctctcaccgctccacgctatccttctgcaacagtccgaagcctggtgcaggcgcagcaactgtactgggaagtgaaaggcaaagccatcgtcagcgacgtctcttttcacgtcgcgcccggtgagtttgtcggcattatcggccccaatggctcaggcaaaacatcactgatctcattgcttgccggtttactgaaaccctcgtcaggcagcgtaacgctggagaataaaaatattcgccattactcacgccgccatttagcgcaaaaagtggcgctggtggaacaacaagcggaaaccagtgaacgtctcaccgcattgcaggctgtctctctggggcgcaccccgtggttgagtctgctctcgccctggtctaaacaagatgacgatattgtccagaccatgctggagaaggtagatctacagcgcgtacaaaatcgctgctggaataccttttctggcggggaaaaacagcgtctgcatatcgcccgggccctggcgcagcaaccgaaagtgctgctgatggatgaacccacgaaccatctcgacattcaacatcagataggtctgcttaatctggtgaaacgccagaagctcaccgtcattgcggctctgcacgacctgaaccatgccgccatgttctgcgaccgcattctcgtaatgaaagcgggtcaactggcgatgcagggcagccctgcaaccatttttacgcctgaaaacctcagccagtggtttggcattaatgccatcgttgagcaggcgccggatggattgagttgcttcatccgctaccaacgaccggaataa

SEQ ID NO: 73720 - DNA, 441 bp, Citrobacter koseri
atgaaattgattaagcaaagcctgagcatgttatgtctgttagcgctgaccaccacggctttcgctcagacccacgaagtgctgatgaaaaacagaggcgcgggcggcccgatggtatatgaacctgattatctggcgattcagccaggcgacaccgtgaagtttattcgcaagcataagagccataacgctgcgtcaatcgcagagctttcgccagcaggctaccccggatttgtcggcaagattgatgaggaaattgaggtcaaatacgacaaacctggattttacggtattaaatgcaccccacattacgcgcaagggatggtgatgctcattaaagtgggtgatgcaaccctgcctgacagctatcgaacctttaaggcgccggggatcgcggataagcgtttccaggacatttatacacgcattgagaaacagtaa

SEQ ID NO: 73721 - DNA, 552 bp, Citrobacter koseri
gtggcggataaaaaacagggcaatgaagacgttcaggtacagcggagagaatgcctgtgtaaactcacaaaatttgtcggggctgcgggtgtcaccgccgccgtctggccgctcatctccgcactggggccggatgataaaaccgtagcagaaaacgaacctgtcgatgtctctctcgccggggttgccgtcggccagacggtgaaaagggtctggcagggaaagcttatccttattcatcaccgtaccccggaggaaattcgctcagcgcagcaggcggacgtccatcattttatcgatccgcaggctgacggcgaacgtatcaagacagagtatccgcagtggctggtcattcaaggttactgcccccacgcaggctgtgtgcccaatgccaaacccggtgggcaaggctgggtatgcccttgtcatggctcggagtttgacacttcagggcgcgtcacgcgggggcccgctacggcgaatctcgcaatccccgattacgcgtttcatcccgatggcctgacggtgcgtattggcgcgaaggaagtctga

SEQ ID NO: 73722 - DNA, 1173 bp, Citrobacter koseri
atggcggcagaacatctatccataccccgacgagagcgagtgtggcgtattcccttccctcgtacggtcgcaggcgtctgggtttttgccgtcgggatcattctgctggtgatgctcggagtacaaatcctttctggtctcgttctggcgatgttttatgtacccacggaagggctggcctttgattcaatcattcatattatgcgatccgtgagacacggcgaactggtgcgcaacgcgcattctattggcgcatcgctatttttcttcgcctgttacctgcatatcttccgcgccatgtattacaacgtgtaccgaaagccttatctcaaaatgtggatgataagcgtgacgttatacgtgttactgatgatcaccgcatttctgggatatagcctgatttggggacaaaagagctactgggccgctaccgttattaccggattcactcgtgcgatcccgtgggtgggagatacgttgtattcgtttttagtcggcgggtatgctccaggaacacccacattaggccggttttatgtgcttcattttattatccccttcgtcattgtcgggggaacgatatggcatatccgcaccgtgcagtccgcatttgcgcaggcaatgaaaaagacatttacgcagagcgagtcccggaaactgtttttcgattataaaatcaccgacagtgatgccatcaagctcactcttttcatgatgctgttcgcctggtttttattctttgccccgcactatctcagcagcgccgacaattttatcccggcagatcccaccgtaacgcccgctgtcgtggcgcctgagtggtattttttgccgttcttttccattttgcgctgcttcccaaacgaacttctcgggatagtcgccatgtgtgcttcagtgctgattttttattttctcccctggctcgacacttcacgcgcccgctttcgcaattacagcaagctcgttaaatgtggtttttggctctgggttgctaatgcattctttttaggatggctgggttcaaaagcgctggtcggtcccgacctgcctgacggtttcagtaatgaagagggctggatacgcgcggcatcgcaactttcaacgctggtttacttcggatggtttgtcatcgtactgccctgccgacgttttctggaaaagcaggattaa

SEQ ID NO: 73723 - DNA, 819 bp, Citrobacter koseri
atgaagggattagtgagatatagcgttttatggctgtgcattctgggcgccagcgctgtctgtgcgcaagagacgccacctcgccaggcgtggagttttagcggcataacgggccactatgataaagaacaactgcggcgcggtttacaggtctacgaagagaaatgccgcgcctgccacgggatggttcatcttaattttcgtaccctgacaaagccaggcggacccgaactctcgctcacagaggcaaagcgtcttgccagcggctacgtctttcccgacattcaggatgatggtcaacccggcgagcgggaaggcaatctcaatgatacgtttgtctcaccctaccttaacgatcaggaagcaagatatcttaataatggcgcccttcccgtcgatttaacctatatcgttcgcgccagaacgtacgaccgggggttcccgcaatttctgttcgatgccttcttgccctataccgatcagggggcggattacgtctatgccttgttgaccggttatctgcctgacgacccggaaatgaaggcaaaccgatacgctcccggcggcataattaacatgccgaagccgttgtctgatggggagatcaacaggtcagaaaaggacgatataccagaaaccgaagagcagtacgcgcgggacgttacggcttttctggcatgggctgccgatccggcgcttgaacagcgaaagcatcagggccattacgtaatgagttatctggtcattatgctggcattgctgctgattttgcgccgattaaagagacgctcgtcagaaaaaacgagtgagaatggttaa

SEQ ID NO: 73724 - DNA, 279 bp, Citrobacter koseri
atgaaacgcaaaaacgcttcgttactcggtaacgtgctcatggggttggggttagtggtcatggtggttggtgttggttattctattttaaaccagttaccgcagtttaacctgccacaattttttgcacatggtgcggtgctgagcatctttgttggtgccattctctggctggcaggcgcccgcgtaggtgggcatgagcaggtgagcgatcgttactggtgggttcgccactacgacaaacgctgccgccgtaacgacaatcgccgtcacagctaa

SEQ ID NO: 73725 - DNA, 585 bp, Citrobacter koseri
gtgacgattaaattgattgtcggcctggcgaaccccggcgcagaatacgcggcgacacgccataatgcgggcgcatggtacgtcgatttactggcagagcgactacgcgcgcctctgcgtgaagagccgaaattcttcggttacacctccagagtgaccctcgaaggggaagatgtttgcctgctggtgccgaccacgtttatgaatctgagcggtaaagccgtcggcgcgatggccagtttttaccgcatcatgcccgatgagattctggttgcccacgacgaactggatctcccccctggcgtcgcgaaatttaagttaggcggcggacacggtggtcataatggcctgaaagacatcatcaacaaactgggtaataaccctaactttcatcgcttacgtgtcggaattggtcatccgggcgataaaaataaagttgtcggttttgttctgggtaaaccgccggtgtcggaacaaaagttaattgacgacgccattgacgaagcggcacgttgtactgaagtctggttcaaagaagggttaaccaaagcgacgaaccgattacatgcctttaaagcacaataa

SEQ ID NO: 73726 - DNA, 1092 bp, Citrobacter koseri
atgggattcaaatgcggtatcgttggtttgcccaacgtcgggaaatccaccctgttcaacgccctgactaaagccggtattgaagcggcaaacttcccgttctgcaccatcgagccaaataccggtgtagtgccgatgcccgatccgcgtctggacaaactggctgagattgtcaagccgcagcgcattctccctaccaccatggagttcgtcgacattgccggtctggtaaaaggcgcgtcgaaaggcgaaggcctgggtaaccagttcctgacaaacatccgtgaaaccgaagcgattggtcacgtagtacgctgctttgaaaacgacaacatcatccacgttgcggggaaagtaaacccggcggaagatattgacgttatcaacaccgagctggcgctgtctgaccttgatacctgtgaacgcgccattcaccgcgtgcagaagaaagccaaaggcggcgataaagacgcgaaagctgagctggccgcgctggaaaaatgtctgccgcacctggaaaacgccggcatgctgcgctcactggatctgacagacgaagataaagcggcgatccgctatctgagcttcctgacgctgaagccgaccatgtatatcgctaacgtcaacgaagatggcttcgaaaataacccgtacctggatcaggttcgcgccattgccgatgcagaaggctctgtcgtggttccggtttgtgccgctatcgaggccgacatcgcagaactcgacgatgctgaccgtgacgagtttatggctgagctgggtattgaagaaccgggtctcaaccgcgttattcgcgctggctacaagctgctgaatctgcaaacttattttaccgctggtgtgaaagaagtacgcgcgtggacgattcctgtcggcgcaaccgcaccgcaggctgcgggtaaaattcacaccgattttgagaaaggctttattcgtgcgcagaccatcgctttcgacgacttcatcacgtacaaaggtgaacaaggcgcgaaagaagccggtaagatgcgtgcggaaggcaaagactacatcgttaaagacggcgatgtgatgaacttcttgttcaacgtctaa

SEQ ID NO: 73727 - DNA, 981 bp, Citrobacter koseri
atggaatttgaggcggaacaagtaacctttgagagaaagataagacgttatctctccgctagcgtgaagcggcaggtagctatattgagcggctatcgatgctcgtttccaggttgtgatcaaaacctcatgcttcaggactcatcatttattggggaaatagcttcgattgaagccattcactctcacgggccaagatacaacccttctacaaatgcagaccaactacttcaaacagaaaactatcttctgttgtgcccgaatcatcatgcgattattgacaggcagccggaaatatattcggctgagtggctaagaaaggccaggaaagaacatttaaataaaatatcagaaatagtgtctgcctctaagtgtgtagcagaggtcaagctggatgagcaggtcgaaatctctttagaggaagcaataggtgtctggaaagtaaatcgtgaaaatgcatccgaggaattctggcaaactcttctacaaaaatgtcctgctgtattatcacagatatttccgaaaagtatgtttcagttaggcagtaaatgctatgttggtggaaaatcgataaacaattcgggtggtaatcttgtcgattttatctacgcaagcaggctgactggaaatatagtattggtcgaaataaagaccccaaagacgatattactggggaaaagatatagaactaatgcctattcaattagcgaagaactatctggggcgtttgttcaggtgttaaattataaagaccaattaatgaaagaatacttcaagctaagtgaaggtaacggaggtgattcattttcggcattcaatcctaaatgcttaattgttattggtacacttgagtcagagcttaaaaataatagtcaatacaaatcatttgagctattcagaaatagtatgacaaacgttgagattgtcacttatgacgagctatttcaaaaggctcaagacattctggatatgattaaataa

SEQ ID NO: 73728 - DNA, 234 bp, Citrobacter koseri
atgcaaattgagaagacgccgcgagagctttattccggcgcaatcctgctgctggacgatacgcgctttgatgcggcgctagtcctgcgttccgtatttcaggacagccagcgcagctggatacaggcgggggcgggaatcatcgcgcaatctacgccggaacgagaactgacagaaacccgggagaaattagcgagcattgcgccctatttaatagcggcagagcaggggtag

SEQ ID NO: 73729 - DNA, 1029 bp, Citrobacter koseri
atgtctgcttttaccccggcaagtgaagtcttgctgcgccacagtgatgatttcgaacaaagccgtattctgtttgccggagatttgcaggatgacctgccagcccgcttcgaaagcgccgccagccgcgtgcatacgcaacaattccaccactggcagctgttaagccagctgatgggcgagaaggcgcgctttagcctggtcgcccacgctgacgacgtcgcggactgcgacacgctgatctactactggccgaaaaataaacctgaagcccagttccagttgatgaatatcctgtcgctgctgccgctcggcaccgacatcttcgtggtgggcgaaaaccgtagcggcgttcgcagcgcagagcaaatgctggccgactacgcgccgctgaacaaaatcgacagcgcgcgccgctgcgggctgtatcatggccgtctggaaaaacagcctgtctttgatgcggaaaaatactggggcgagtaccgcattaacgatctgaccatcaaaacgctgcccggcgttttcagccgcgacggtctggatgtcggcagccagttgctgctttccacgctgacgccacataccaaaggcaaagtgctggatgtcggttgcggcgcaggcgtgctctctgcggccttagccagccactcgccaaaagtgcgtttaaccctgtgtgatgtttccgcgcctgccgttgaggccagtcgcgcaacgcttgcggcaaacggcgttgagggtgaggtgttcgccagtaacgtcttttctgacgtaaaagggcgttttgatatgatcatctctaacccgccgttccacgatggaatacaaaccagcctggatgccgcgcaaacgctgattcgcggcgcggttcgccacctcaacagcggcggtgagttgcgcatcgtggctaacgccttcctgccctacccgaaagtgctggatgaaacgtttggcttccacgaagtgattgcgcaaaccgggcgctttaaagtttaccgcacggtgatgacgcgccaggcgaagaaatag

SEQ ID NO: 73730 - DNA, 414 bp, Citrobacter koseri
atgacatcccgacgagactggcaattacagcaactgggcattacccagtggtcgctgcgtcgccctggcgcgctacagggggaaatcgcgatttcccttccggcgcacgttcgtctggtggtcgtggcggaagaattaccggcgctgaccgaacccctgatgagcgatattttgcgcgcattgaccgtcagtccagaccaggtattaccgttgacgcctgaccgcgtcgccatgctgccggaaggcagccggtgcaacagctggcggctgggtactgaagagcctttgctgctggaaggcgctcaggtgacaagtcctgcgtttaatgaattacgggcaaacccaacggcacgcgccgcactatggcaacaaatttgcgcatatgaacacgatttcttccctcaatccgactga

SEQ ID NO: 73731 - DNA, 447 bp, Citrobacter koseri
atgaacacgatttcttccctcaatccgactgatttacctgctgcgtttctgattgaaaaacgcgcccatgcgtttccgtggagtgaaaaaacctttgccagcaatcagggcgaacgttacctcaactatcaactgacggtcggcggaaagatggcggcgttcgcgattacgcaggtggtgctggatgaggcgacgctgttcaatattgcggtcgacccggattttcagcgtcgggggctggggcgagaactactggaacatctgattgatgaactggaaaaacgcggcgtcctgacgttatggctggaggtgcgcgcctcaaatgccgccgccatcgcactctatgaaagtttaggttttaatgaggcaacggtgcgccgtaattactacccgacggctgacgggcgtgaggacgcgataatcatggcattgccaatcagtatgtaa

SEQ ID NO: 73732 - DNA, 678 bp, Citrobacter koseri
atgaagtgggactggattttctttgatgccgacgaaacgctgtttacgtttgactcgtttaccggcttacagcggatgtttctcgactatagcgtcacctttaccgctgaagattttcaggactaccaggctgtcaataaaccgctgtgggtggattatcagaacggcgctatcacttcgcttcagcttcagcgccagcgctttgtcggctggggcgagcagctgaacgtcccgcctgaagagttaaatgatgcgtttatgaatgctatggcggagatttgcgcaccgctgccgggtgcggtttcgctggttaacgccctgcacggtaaggtgaagatgggcatcatcaccaacggattcacctcattgcagcaaattcgccttgaacgaacagggcttcgcgatcgttttgatctgctggttatttctgaagaagtgggcgtggcgaagcccgatccgcgcatctttgattacgcgctggagcaggcaggcagccctgaccgctctcgcgtgttaatggtcggcgataccgcagagtctgatattctcggcggcattaacgccgggctttccacctgctggctgaatgcgcaccatcgcgagcagcctgcgggcattgaaccgacctggaccgtggcgtcattaagcgaactggagcaactcctgtgtaaacactga

SEQ ID NO: 73733 - DNA, 1590 bp, Citrobacter koseri
atgacgttgtctccttatttgcaagaggtggctaagcgccgcacttttgccattatttctcacccggatgccggtaaaaccactatcactgagaaagtattgctgttcggacaggctatccagactgccgggacggtaaaaggccgtggctccagccagcatgcaaaatctgactggatggaaatggaaaagcagcgtggtatttctattaccacgtcggtaatgcagttcccgtatcatgattgcctggtcaacctgctggacacccccgggcacgaagacttttcggaagatacctaccgcacgctgacggcggtggactgctgtttgatggtgattgacgcggcaaaaggcgtcgaagatcgtacccgtaagctgatggaagtgacccgcctgcgcgatacgccgatcctcacctttatgaacaaactcgaccgtgacatccgcgacccgatggagctgctggatgaagttgagaacgagctgaaaatcggctgtgcgccgatcacctggccgattggctgcggtaagttgttcaaaggcgtctatcacctttataaagacgaaacttacctgtaccagaccggtaaaggccacaccattcaggaagtgcgcattgtaaaaggtctggataacccggaacttgacgctgccgtaggggaagacctggcgcagcagctgcgcgacgagctggaactggtgcagggcgcgtccaacgagttcgaccatgagttgttcctggcaggtgaaatcaccccggtcttctttggtactgcgctgggtaacttcggcgttgaccatatgctggacggcttagtggagtgggcgcctgcgccgatgccgcgccagaccgatacccgtacggtagaagcgaaagaagagaagttcaccggtttcgtgtttaagattcaggccaatatggacccaaaacaccgcgaccgcgtggcgtttatgcgtgtggtctccggtaagtacgagaaaggcatgaaaatgcgtcaggtacgtatcggcaaagacgtggtgatttctgatgcgctgacctttatggcgggcgaccgttctcacgttgaagaggcgtatccgggcgatattctgggcctgcacaaccacggcaccattcagatcggcgacaccttcactcagggcgaaatgatgaagttcaccggtattccgaacttcgcgccggagctgttccgtcgtatccgcctgaaagatccgctgaagcaaaaacagctgctgaaagggctggttcagctgtctgaagaaggcgcggtacaggtgttccgtccgatcgccaacaacgatctgatcgtgggcgctgtcggcgtgttgcagtttgacgtggtggttgcccgtctgaagagcgaatacaacgttgaggctatctatgagtccgtcaacgtcgccaccgcacgctgggttgaatgtactgacgcgaagaaattcgaagagttcaagcgtaagaacgaagtacaactggcgctggatggcggtgataacctcacctatatcgcaccaacaatggtgaacctgaacctgacgcaggaacgctatcctgacgttcagttccgcaaaacgcgcgagcactaa

SEQ ID NO: 73734 - DNA, 618 bp, Citrobacter koseri
atgacgacgacaagactgaagatttctaaaactctcctggccgtaatgttgacctccgctgtcgcgaccggttctgcatttgcggaaacctctacgctggataaggcacagtccagcgcagaaagcgcgggacagaaagtcgatagctctatgaataaagtcggtaacttcatggatgacagcgccatcaccgcaaaagtgaaagcggcgttggtggatcatgaaagtattaagagcaccgatatctcggtcaaaaccgataacaaagtggtgatattaagcggctttgttgaaagccaggctcaggctgaagaagccgtgaaagtggcggaaggcgttgagggtgtgacctccgtcagcgacaaactgcatgttcgcgacagcaagtccggcacgatgaaaggctatgccggggatacggccactaccagcgagatcaaagcgaaactgttggcggatgacatcgtgccttcccgcaaagtgaaagtcgaaaccaccgacggcgtggtgcaactctcaggaaccgtagattctcaggcgcaaatcgaccgtgctgaaagtatcgcaaaagcggttgatggtgtgaaaagcgtcaaaaatgacctgaaaactcagtaa

SEQ ID NO: 73735 - DNA, 249 bp, Citrobacter koseri
atgtacaccacactaaaaatatcgcgaatgagcaacctgaacgctcatatcaagcggtcgacattaactatggtaaaggagaagcttatgtttcgttggggcattatatttctggttatcgcgttaattgccgccgctctgggttttggtggactggcaggcaccgcggctagcgcagcgaaaattgtcttcgtcgtcgggattgtcctgttcctgatcagcctgtttatgggccgtaaacgaccctag

SEQ ID NO: 73736 - DNA, 1074 bp, Citrobacter koseri
gtggggcagcgaatacccgtgacgctcggcaatattgcgccattatcattaaacgcgttccgaccaggccgaatggctctggtgtgcgagggcggagggcagcggggaatctttaccgctggcgtgctggatgagtttatgcgcgcgcagttcaatccgttcgacctctacctcggcacctctgccggggcgcaaaacctttccgcctatctctgtaaccagcccggctatgggcgcaaagttattatgcgttacaccacgaagcgggagttcttcgacccggtgcgttttgttcgcggggggaacctgatcgatctcgactggctggtggacgcgacatccgggcagatgccgctggcgatggacaccgccgcgcgtctgtttgatagcggaaaatccttctatatgtgcgcctgtcgtggggatgactacacggcgaactatttctcgccgacgaagcaaaactggctcgatattattcgtgcgaccagcgcgattccggggttctaccgtacaggcgtggcgctggatggcatcaattatctggacggcgggatcagcgatgcgatcccggtacaggaggcggcaaagcgtggcgcgaaaacgatcgtggtgatccgcacggtgccttcgcaaatgtactatacgccgcagtggtttaagcgcatggagcgctggctgggggagagcagtttgcagccgttggtgaatctggtacagcaccacgaaaccagctatagcgccattcagcgttttattgagaagccgccgggtaagctgcgtatcattgaaatctacccgccgaaaccgctgcaaagcatggcgttgggcagccgtcttcctgcgctgcgcgaagattacaaaattggacgcctgtgcgggcgctattttctggcgacggtggggaaactgctgacggagaaaccgccgctctcccgccacacgccgaagattgtcattcctggcccggtggtggtgcctccggcggcggtggccaacgatatgcatgtagcaacggtcagcggcgcagcgcaggccaacgacactaccttcaataatgaggatctggcgtga

SEQ ID NO: 73737 - DNA, 777 bp, Citrobacter koseri
gtgagttgccgatttatcgacacgcattgtcattttgattttccgcctttcaccggcgatgaagcggccagcattcagcgtgccgctgacgcgggggtcggcaaaatcattgttccggcgacggctgcggcctgtttttcacgcgtgctggcgctggcggaacgcttcccgccgctgttcgcggcgctggggttgcaccctgtgtttattgagcagcacgcagatgacagtctggatcgcctgcaacaggcactggatcaacgcccgcagaaagtcatggcggtaggggagatcggactggatctttaccgcgataatcctcagttcgatgaacaagaacggctcctggaggcgcagcttaaactggcgaaacgctacgatctgccggtgatccttcactcgcgtcgcacccatgacaagctggcaatgcatctcaaacgccacgccctggcgcgaaccggggtggtacacggtttttccggcagtctgcaacaggcggaacgctttgttcagttaggctacaaaattggcgttggcggcacgattacttatccgcgcgccagtaaaacgcgtgatgtgatggcacaactgccgctggatgcattgctgctggagaccgacgcgccggatatgccgttaaatggttttcaggggcagccaaaccgcccggaacaggcggcacgggtattcagcgagctgtgcgcgctacgcgatgaaccctctgaggtgatagccgaaacgctgtatcgcaatacgacggcgctatttcgtctctga

SEQ ID NO: 73738 - DNA, 855 bp, Citrobacter koseri
atgaagtgtttagtcagtaaaatcataccgttctcctgcgtggacggccccggcagtcgtctggctctgttcttacaagggtgcaatctgcgctgtaagaattgccataatccgtggacgatcgggcgctgcaacgactgcggtgagtgcgttccccagtgccctcatcaggcgctgggcttcagcgcggggaaagtggtgtggcaggctgacgtctgcgagcagtgcgatacctgtttgcggatgtgcccgcagcaggccacgccgatggcgcagacgatgagcgtcgatgaggtgctgggccatatccgtaaggcgtcgccatttattgaaggcatcaccgtcagcgggggcgaagccaccacccagttaccgtttatttgcgcgctgtttgccgcgatcaaggctgacccgcaactatgtacgctgacgtgtctggtcgacagcaatggcctgttgagcgaaaccggctggcagaaactgctgcccgtttgtgatggcgcgatgctcgatctaaaagcctgggatagcgcctgccatcagcgtcttaccgggcgggataacgcgcagatcaagcacagcatcaggatattggcggagcatggcaagctggccgagttacggctgctggtgattcctggtcaggtggattacctgcaacagatagcgccgctggccgcgtttatctcccgtctgggcgatattcccgtccggttaaacgctttccatgcgcatggggtgtatggcgaagcaaaagcgtggccgggcgcaacgcctgacgacgtgcaacagctggcaaacgcattatgggcgcacggggtgcataacctgattttccctgctttatatttatga

SEQ ID NO: 73739 - DNA, 1587 bp, Citrobacter koseri
atgcccacttcatgcgaaaccgcgctgcaacatcgttgccagcaaattgtgaccagtccggtgctcagccccgaacaaaaacgtcattttctggcgctggaagctgagaacgctttgccttatccggccttgcccgcagaggctcgccaggcgctggacgacggggttatctgcgatatgttcgaaggtcatgccccgttcaaacctcgttatgttttgcccgattacgcccgttttctggctaatggctcacagtggctggagctggaaggcgcaaaagatctggatgacgcgctatctttgctgaccatcctctaccatcacgttccttccgtaacatcgatgccggtctatctgggacaactggatgcgctgttgcagccgtatgttaaaattctaacacaagacgagatcgatattcgaataaaacgtttctggcgctatctcgacagaacgctgccggacgcctttatgcatgccaatattggcccggccgacacgcctgtcacccgcgctattttacgtgccgatgctgagttaaagcaggtttcacctaacctgacgtttatctacgatcccgatatcacaccggatgatttactgcttgatgtcgctaaaaacatttgtgaatgcagcaaaccgcatatttctaatggcccggtaaatgataaaattttcacaaaaggtcaatatggcgtcgtcagttgttacaactctctgccgcttgcgggcggcggcagcacgctggtcaggatcaatctgaaagccgttgcagagcgcagcacctctgtcgatgacttctttacgcgcacgctaccgcactactgccagcagcaaatcgccatcattgatgcccgatgtgacttcctctatgaacaatcacatttctttgagaatagcttcctggtgcaggaagggttgcttgatcccggacgttttgtaccgatgtttgggatgtatggcctggccgaagcggtaaacctgctgtgtgaaaacgcggggatgaacgcgcgctacgggaaagacgacgcggccaatgcgctgggctatcgcatcagcgcgcagttggccgatttcgtcgcaaacacgcccgttaagcatggctggaaacagcgggcgatgctgcatgcccagtcaggcatcagctccgatatcggtacgacgccgggcgcgcgtttaccgtacggcgatgaacctgaccccattactcacctgcaaaccgtcgccccccatcatgcgcactaccatgccgggatcagcgacatcctgacgctggacgaaaccatcaagcggaatcctcaggcgctggtgcagctttgtctgggcgcgttcaaggccggcatgcgggagtttaccgccaacgtcagcggcaacgatctggtgcgcgtcaccgggtatatggtgcgcctgtcggatctggaaaaatatcgcgccgaaggatcgcgaacaaacaccacctggctgggggaagaagccgcgcgcaatacgcgcattctggaacgacaagcacgcgtaataagtcatgaacagcagatgcgcttcctaacgcaaaatcattcgagaggcatcgaggcggcaagcgaatga

SEQ ID NO: 73740 - DNA, 780 bp, Citrobacter koseri
atgactgatttaaccgcaagcagcctgcgtgcgctgaaactgatggacctgaccaccctgaatgacgacgacaccaatgaaaaagtgatcgcgctgtgtcatcaggcgaaaaccccggttgggaatactgccgctatctgcatctacccgcgttttattccgattgcgcgtaagactctgaaagagcagggcacgccggatatccgcattgcgactgtcaccaacttcccgcacggtaatgacgacattgacatcgcgctggcagaaacccgcgcggccatcgcgtacggcgcggacgaagttgacgtggtattcccgtaccgcgcgctgattgctggtaacgagcaggtgggcttcgatctggtgaaagcctgtaaagacgcctgtgcggcggcaaacgtgctgctgaaagtgatcatcgaaaccggtgagctgaaagaagaagcgttaatccgtaaagcgtctgaaatttccatcaaagctggtgcggattttatcaaaacctctaccggtaaggttccggttaacgcaacgccggaaagcgcacgcatcatgatggaagtgatccgcgatatgggggtttccaaaaccgttggtttcaaaccggctggcggcgtgcgtaccgctgaagatgcacagcagttcctggccattgctgacgaactgtttggcgctgactgggcggattcccgtcactaccgtttcggcgcatccagcctgctggcaagcctgctgaaagcgctgggtcacggggacggcaagagcgcaagcagctactaa

SEQ ID NO: 73741 - DNA, 1356 bp, Citrobacter koseri
atggccttctactcttttcccctgggggttaccgtgtttctcgcacaagaaattattcgtaaaaaacgtgatggtcatccgttaagcgacgaagagatccgcttctttatcaatggtattcgtgataacaccatctctgaggggcagattgccgctctggcgatgaccattttcttccacgatatgtcgatgcctgagcgtgtgtcgctgaccatggcgatgcgagattcaggaaccgttctggactggaagagtctcaaccttaacggccccattgttgacaaacactccaccggcggcgtgggtgatgtgacttcgctgatgcttggccctatggtggcggcctgcggcggctacattccgatgatctccgggcgcggcctcggtcataccggcggtacgctcgacaaactggaagcgatcccgggatttgatattttcccggacgacaaccgtttccgcgaaatcattaaagacgtgggtgtggcgattattgggcagaccagttcgctcgcaccggcggataaacgtttttacgccacccgcgacattaccgcgacggtggactccatcccgctgatcaccgcttcaatcctcgcgaaaaaactggcggaagggctggatgcgctggtgatggacgtgaaagtgggcagcggcgcctttatgccgacctatgaactttctgcggcactggctgaagccatcgttggcgtttccaacggcgcgggcgtgcgcacaactgcgctgctcaccgacatgaaccaggtgctggcctccagcgccggtaacgccgtcgaagtgcgcgaagcggtgcagttcctgacaggtgaataccgcaacccgcgtctgttcgacgtcacgatggcgctgtgcgtggagatgctgatctccggcaagctggcgaaagatgacgctgatgcgcgagtgaaactacaggcggtgctggataacggcaaagcggcggaaatctttggtcgcatggtagcggcacagaaagggccgagcgatttcgtggaaaactacgcgaaatacctgccgacggcgatgctcagcaaagccgtctatgccgatactgaaggttttgtatccgcgatggacactcgcgcgttgggcatggcggtggtctcaatgggcggcggtcgtcgtcaggcgtcggacaccattgattacagcgtcggctttaccgacatggcgcgtctgggcgacagcgttgacgggcagcgtccgttggctgttatccacgccaaagacgaagccagctggcaggaagcggcgaaagccgtcaaagcggcaatcagccttgacgacaaagcgcctgaaattacaccgacagtctatcgtcgtattaccgaatag

SEQ ID NO: 73742 - DNA, 1224 bp, Citrobacter koseri
atgaaacgtgcatttattatggtgctggactcctttggtattggtgcaactgaagatgcggatcgctttggcgacgtaggttcagataccctgggccatattgcagaagcctgcgccaggggcgaggccgacaatggccgtaaaggcccactgaatttgcctaacctgacccgcctgggtctggtgaaagcgcatgaaggttctaccggtaaaattgctgcgggtatggacggcaatgcggaagtgattggcgcgtacgcgtgggcgcacgagctctcttccggtaaagataccccgtctggccactgggaaatcgcgggtgttccggttctgtttgactggggctacttcagcgaccatgaaaacagcttcccgcaggaactgctggataagctggtaaaacgcgccaacctgccgggttatctcggtaactgtcactcttccggtacggttattctggatcaattgggcgaagagcatatgaaaaccggtaaaccgattttctatacttccgctgactccgtattccagatcgcctgccatgaagagacctttgggctggataaactgtacgagctgtgcgaaatcgcccgtgaagagctgaccgaaggcggctacaacattggccgcgttatcgcgcgtccgtttatcggcgataaggccggtaacttccagcgtaccggcaaccgtcacgatctggccgttgaaccgccggcgccgaccatcttgcagaaactggtcgacgagaaaaaagggcatgtggtttccgtcggtaagattgcggatatctacgccaactgcggcatcaccaaaaaagtgaaagccaccggcctggacgcgctgttcgacgccacccttaaagagatgaaagaagcgggcgacgagacgatcgtctttaccaacttcgttgatttcgactcctcctgggggcatcgccgcgacgtagcgggctatgctgcgggtctggagctgtttgaccgtcgtctgccggaactgatggaactggtcggtgaagatgacattctgatcctgaccgccgaccacggttgcgacccgacctggaccggtacggaccatactcgcgagcacattccggtgctgatttatggcccgaaagtgaaagcgggctcgctcggtcaccgtgaaaccttcgcggatatcggtcagacgctggcaacgtacttcggtacgtcgccgatggactacggcaaaaacatgctgtga

SEQ ID NO: 73743 - DNA, 720 bp, Citrobacter koseri
atggcaactccacatattaacgcagaaatgggtgatttcgctgacgtcgttttgatgccgggcgacccgctgcgtgcgaagcacattgctgaaactttccttgaagacgtgcgtgaagtgaacaacgttcgcggcatgttaggtttcaccgggacgtacaaaggccgtaagatctccgtcatgggtcacggtatgggtatcccgtcctgctccatctataccaaagagctgatcaccgatttcggcgtgaagaaaatcattcgtgtcggttcctgcggtgcggtacgcaacgatgtgaaactgcgcgatgtggtgattggtatgggtgcctgcaccgattccaaagttaaccgtatccgcttcaaggatcatgattttgcggcgatcgctgactttgacatggtgcgcaacgcggtagacgcggcgaaagcgctgggagttgacgcacgcgtgggcaacctgttctccgccgatctgttctactctcctgacggcgaaatgttcgacgtgatggaaaaatacggcatcctgggcgtggaaatggaagcggcaggtatctacggcgtagcggctgagtttggtgcgaaagcgctgaccatctgcaccgtgtctgaccatatccgtactcacgagcagaccactgccgctgaacgtcagacgaccttcaacgacatgatcaaaatcgcgctggaatctgttctgctgggcgataaagcgtaa

SEQ ID NO: 73744 - DNA, 567 bp, Citrobacter koseri
atgaagtcatacggaaagtggatcattgcattatgtacgttagcagcgctggggtcacgcatggcatgggcagatgagaactgccaggtatcgctctctcgcgctaccgtggcctttcccccgatgcagcgaaatgacaacgtcggctcacagcaaaactggtttaaaatgccctcgcgcgatatcaatgtcagcatctattgcccgcaaccacaggtgatggcgctatttgtacatggcgccgcaggcccacaagggcgatttcttttcggtaacggcggggggctggcgttgaaagccagccaaatgatactggatggtcgcagctatatgatcgggaaaacaaccgatcgcaatgagttcattcccgcagacggccatgccgatacacagctgctgcacaataatgaagccattatcgctatcgagaacaatgaagccgcgcgcgggcagcagttgaactttacgttaacgctaacgccagtgctgaacgaaaagcagttccgtaacgtcagcgacaatactgagatggagagtaatttaagctgggagttgctaacgcattaa

SEQ ID NO: 73745 - DNA, 2421 bp, Citrobacter koseri
atgaaaggaatcaacctgctgtctcgccatattcagatcgcgttatattcatgtacgttattaacctcaacggcgttagcccgtgaggtaacgttcagtaccgatatactcaatacgcggggcatcagtaaaaatatcgcaaattacttcgcagaagagccgcgttttttgcccggtgtacatagcgttctaatcaacgtaaacgggtcagaaaaaggttcgctgggcgccaaatttgacgaacaagggcaactctgcgtagatgacgattttctgacagcgatcgggctacgtcctctggggatttccctgcaagaacactgtcatgacctgcaaaaagattatccctccgccgtcataaagtcccttcccggtaaggagatgctggagttaactgtcccgcccgacgcactggaaaatagcgcgtcccgggagaaaaactatagccacggcggcagcgccgggctgctcaactacagcctgttttccacgcgaaatgaatacaacggcggcgacagccataactacacgcagggcgatctcgaagcgggcgccaatctggccaactgggcattgcgcagccgctattttctgctggactctgacggcgatcgcagcgctaaaaatttattcacttatggcgaacacgtttttgaagcgcaacagatgcgtgtccaggttgggcagatcagctccagatcggcgctgttttctggaacatccctcagcggcattcagttactccccgagtccagcatgacctctgataattcaggcgtcaccgtgacggggattgcccgcacgaaccaggcgcgagtagaagtccgccaggcggggcagcttgtttattccacgctggtaaacgcgggggcattcaggctggacaatgtccccatcctgttaaataacgccgatcttcaggtcagcatcgtcgaaaccgacaacgtcacaaccagtttcatcgtacctgcctcctcaatcaacctgaacggccttccgcgaccacaagggcttatgatgtcagtaggccaggtgcgcaacgtcgacagcgattacagcgacccctgggtatataacatttcagacggctggcgccttaccccacaaacaagtttgctggcggcgggggttcttgccgaggattatcaggcaagcggtgcaatgctggagtggagttcaaacgagaaatggcaagtatttgccagtctgctgggcagccgcgaatccttcggtgatacgcgtagcggtataaaggcggaaattcaaaaccagctgacacttcccggccatgtctctgttggggtcagcaccgcgcgttattctgacgactatcgtgagttgtccgaggcgatggacgacgacagcgcaagctatcaaagcagctatagcgccaatgtaaactggagcggcagaacagcaggaaccttctcgttagcctatagctataatcaggccacggatgattatgaagactccagttacgtgagtctttcatggggaaaaacatttaaatacgcgtcaataaacgtgaactggcagcactctgttagcaacgataacgataatgacgacatcaacgatgacagctatgacgatgatgtgttttacatcaacctcaacattcctttccagtcacagtcgattaacgcatatatgcgtaatcagggcgaccgaacgacatatggcttacgcagcagtggccctctcagcgacaataccagctattccgtttcggcggatcgcgatatcggaaacgatctcaacaccctcaacggcaacatcaacagcaacctgcactacacgcagatgagcgttggcgcaacaaccaacaatgacgatcagcgtacctacagcgcaatgctgtcgggcggcattgccctgcatcgccagggggtaaccttctccccctataccattaaagatacctttggcattgcccacctgagcgaaccggaaagcggcatcgaaatcgcaacgccgcaaggcccggtctggacagatttctgggggcaggccgtggtgccagggctgacggagtggcgtaagtcacgtattgaggtgaatgcaaatacgctgcccaaaaatatggatctggctaacggaacaaagctactggtgcccgctcatgccaccgtcagcgacctggattttaacgtgctaaacacccgtcgcgtcatgctaaagataaaacagcaggatggctcctggcttcctaaaggcacgtctgttgttgatgaaaaaggaaactacctggtcagcgcagtggacagcggccgcgtctttattagcaatattgacgaaacgccaacgctctatagcgttgatgacaatatgaaccgtatctgcaaaatcacttacacattaaacaatgtgcagaataaagaggcgttttacgaaacggcggagggtatttgccaatga

SEQ ID NO: 73746 - DNA, 711 bp, Citrobacter koseri
atgtctgacaaatcttgtaccgttaaagcgtatatatttgccgccacgcttctctgtttacctttatctcaggcttatgcggcaggaatggttcccgcctccacgctactggttattgaagaaagccataatggcggaacgataaatgtcaaaaacagcgatacggttccgatgttgctgtacaccacaatagaagatgtaaaagatgacagtggcatcaccgtcaacgtcacacagcccgtcgtacgcgtggaacccggtcaggaacagcaggtccgctttattatggaaagcagcgccccgctaaccaaagagcactataaacgcgtcacctttgaaggcatcccgccatcaggcgtgtctaaaggcgcaatgaaagttaacttcaatctgcgtcaggatctgccggtattaattcgccccaaaaatttaccggtcgtcaccgatgcgtggaaactgctgaaatggtccggctccgggcagcatattaaagtcagcaacccttccgcctatgtggtgcgcctggcgcaacaggtgatttttttaccttcgcaaacggccggggaaatcgcaaaaacctatattttacccggagaagttctggatgtaaccgtcaagaaatccatcatttccgatcaatctgtgcgcttcttcccggccagccgctacggcatcgacatacccaatttcactgcgccgttaacaccataa

SEQ ID NO: 73747 - DNA, 699 bp, Citrobacter koseri
atgaaaaaagcacttcttgccaccgcaatcgcggcactgaccatgtctaacgcatgggcggccgacggcgccaccactgaactgcgcgtaacggggaaactgctggtcggtggctgtaccgcgacagtcaacggcggcaacgcacttgacttcggctcgcatctgatcagcgaccttagttcaacggccgtcaacgatatcgccacgaaagacaccgatctggtcatcgagtgccccagcgccacgaaagtaggctggacgctgaccgataacaaagcggatagcaacgcagagatctggataaccggcatcattaaaggtaaaggagtctcattcggcgtaggtaaaacagcaggcaatgtcaacattggcgcctatgccgtatccatcgattctgtcaaggctgcaagcgcgaaagccgtcaatggcgaagacacttttgacgctgactatattgtaagcgccgccgcaagtacgggtttgtgggctaaggcgacaacggaaacttcttttcggaaccaggaagggacgcaggatatcatcaccgtcggcgccaaaggcacgctggaaccagcagcctatagcaatgcaacttatccgcttaaggtttctctggctgtagataataccaccaaactggccattagcgatgataccgatatttcaggttccgccaccattaccctgagatatatctaa

SEQ ID NO: 73748 - DNA, 1017 bp, Citrobacter koseri
atgacgacattacgtctgcttatctctgactcttacgatccctggttcaacctggcggttgaagagtgtatttttcgccagatgcccgcgacacagcgcgttttgttcctgtggcgcaacgctgatacggtcgtcatcgggcgggcgcaaaacccgtggaaagagtgcaacacccggcgcatggaagaagacaatgtccggctggcgcgtcgcagcagcggcggcggcgcggtgttccacgatctcggcaatacctgttttacatttatggccgggaagccggagtacgacaaaacgatctccaccgcgatagtgctcaatgcgctgaacgcgctgggcgttagcgcagaggcttccggtcgtaacgatctggtggtgaaaacgccggaaggcgaccgcaaggtttccggctccgcctatcgggaaaccaaagatcgcggcttccaccacggcacattgctgttgaatgccgatctcagccgtctggcgaactacctcaatcctgataagaaaaaattacaggccaaagggatcgcctccgtacgcgggcgcgtcgccaatctggtcgaactgctgcctggcattacccatgaacacatctgcgacgccattaccgaggcgttcttcagccactacggcgaacgcgtggaagccgaaataatctccccagataaaacgccggatctgcccaattttgccgaaacgtttgctcgccagagcagttgggaatggaacttcggccaggcgccagcctttacgcatcttctggacgaacgctttatctggggcggcgttgaactgcacttcgacgttgaaaaagggcacatcacgcgcactcaggtttttaccgacagccttaaccctgcgccgctggaagcgctggcaggccgtttacaggggtgtctgtaccgtgcggatatgctgcaacaggagtgtgatgcgctgttagtcgattttccagagcaggaaaaagagctacgggaattgtcggcgtggattgcgcgggcggtgcgttaa

SEQ ID NO: 73749 - DNA, 648 bp, Citrobacter koseri
atggctcgcgcaaaactgaaattccggcttcatcgtgcagtgattgtattgttctgtctcgcactgctcgtcgggctgatgcagggggcgtcctggttcagtcaaaaccatcaacggcagcgcaatccgcagctcgaagaactggcccgcacgctggcgcgccaggtgaccttaaatatcgcgccgctgatgcgcaccgaaacgccggatgagaagcggatcgccgtcgtactccgccagctaacggaagagagccgcattctggatgctggcgtctacgacgagcaaggcgatctcattacgcgcgcaggcgaaagcgtcaatgtgcgcgacaggctggcgctggacggtaaaaaagcgggcggctattttaatcagcagattgtcgaacctattcagggtaaaaatggcccgctgggctatctgcgcctgacgctggatacgcatacgctggcgaccgaagcgaaacaggtcgataacaccaccaacattttacgcctgatgctgctcctgtcactggcaattggcgtggtgctcacgcgcaccttgctacagggcaaacgcacgcgctggcagcaatcgcctttcctgctcaccgccagcaaatccgtaccggaagaggaagagagcgagaagaaagaaccatag

SEQ ID NO: 73750 - DNA, 969 bp, Citrobacter koseri
atgcctaacattacctggtgcgatctgcctgaagatgtttctttgtggcctggtttacccctttcattaagtggtgacgaggtgatgccactggattaccacgcaggccgtagcggctggctgctgtacggtcgcgggttggataagcagcgcttaacgcagtaccagagcaagctgggcgcggcgatggtgatcgtggcggcctggtgcgttgaagattatcaggtgattcgtctggcgggttccttaacgccgcgcgcgacgaaactggcgcacggagccgggctggacgtcgcgccgctgggcaaaattccgcatctgcgtacgccaggtctgctggttatggatatggattcgacggcgattcagatcgaatgcatcgatgaaatcgcgaagctggccgggacgggcgaaatggttgcggaagtcacggaacgcgcgatgcgcggcgaactggattttaccgccagcttacgcagccgtgtggcgacgctgaaaggcgcggatgccgatattctgcgccaggtgcgcgagaatttgccgttgatgccgggtctgacgcaactggtgcttaagctggaaacgctcggctggaaagtggcgatcgcctccggcgggtttaccttttttgcggaatacctgcgtgaaaagctgcgtttaaccgcggtggtggcgaacgagctggagatcatcgacgggaaatttaccggcaatgtcattggcgatatcgtcgatgcccagtacaaagctaacacgctgacccgactggcgcaggagtatgaaattcccgtggcgcagacggtggcgattggcgatggcgctaacgatctgccgatgattaaagcggccgggctggggattgcgtaccacgccaaaccgaaagtgaatgaaaagacggaaatcacgattcgtcacgctgacctgatgggggtgttctgcattctctccggcagtatgaatcaaaaatga

SEQ ID NO: 73751 - DNA, 1383 bp, Citrobacter koseri
gtggcaaaagctccaaaacgcgcctttgtttgtaatgaatgcggggccgattatccgcgctggcaggggcaatgcagcgcctgtcatgcctggaacaccatcaccgaggtgcgtcttgccgcgtcgccaacggtggcgcgtaatgagcgactcagtggctatgccggtaacgcaggtgtggcaaaggtgcagaaattgtctgacatcagccttgaggagctgccgcgtttttccaccgggtttaaagagttcgaccgtgtgctgggcggcggtgtcgtgcccggcagcgccatcctgattggcggcaaccccggtgcggggaaatccacgctgctgctgcaaacgctttgcaaactggccgagcagatgaaaaccctgtacgtcacgggcgaagaatccctgcaacaggtagcgatgcgcgcgcatcggctgggattgccgacggctaacatgaatatgctgtcagaaaccagtattgaacagatctgcctgattgcggaagaagaacaaccgaagctgatggtgatcgactccatccaggtgatgcatatggcggatatccagtcctcgccgggcagcgtggcccaggtgcgtgagacggccgcttatctgacgcgctttgccaaaacgcgcggcgtggctatcgtgatggttggtcatgtaaccaaagacggctcgctggcaggcccgaaggtgctggagcactgcattgactgctcggtgctattggatggcgacgctgactcccgttttcgcacgctgcgtagccataaaaaccgttttggcgcggtaaacgagctgggcgtttttgcgatgacggagcaggggctgcgtgaagtcagcaacccgtccgcaattttcttaagccgtggcgatgaggtgacttccggcagttcggtcatggtggtgtgggaagggacgcgcccgctgctggtagagattcaggcgctggtcgatcactcgatgatggcgaatccgcgtcgtgtggcggtcggcctggaacaaaaccgtctggcgattctgctggcggtgctgcaccgtcatggcggattgcagatggccgatcaggatgtattcgtcaatgtcgtgggcggcgtgaaggtcacggagaccagcgcggatctcgcgctattgctggcgatggtctccagcctgcgcgacaggccgctgccgcaggatctggtggtgtttggcgaagtggggctggcaggggaaattcgcccggtgcccagcggtcaggaacgtatttctgaagcggctaaacacggtttccgccgcgctatcgtaccggctgccaacgtgccgaaaaagccgccggaagggatgcaggtttttggcgttaaaaagcttgcggatgcgttaagtgtgtttgacgacttataa

SEQ ID NO: 73752 - DNA, 1233 bp, Citrobacter koseri
gtgtcatcgttcgactatctcaaaaccgcgatcaagcaaaaggggtgtaccctgcaacaggtggcggatgccagcggcatgaccaaagggtatttgagccaacttctgaatgcgaagattaaaagccccagcgcgcaaaagctggaggcgctgcatcgttttttggggctggagtttccccggcagcggaaaaacatcggcgtggtgtttggcaagttctaccccctgcataccgggcatatctatttgattcagcgcgcctgtagccaggtggatgaactgcatatcattatgggttatgacgatacccgcgaccgcgaactgtttgaagacagcgccatgtcgcaacagcctaccgtgtcggatcgtctgcgttggctactacagacctttaaatatcagaagaatattcgtattcatgccttcaatgaggaagggatggagccgtacccgcacggctgggatgtgtggagcaacgggatcaaagcctttatggaagagaaggggattcagcccaactggatctacacgtccgaggaagccgatgcgccgcagtatctcgaacacctggctattgaaacggtgctggtcgatccgaaacgaacctttatgagtatcagcggggcgcagatccgtgaaaacccgttccgctactgggaatacattccgacggaagtgaagccctttttcgtgcgcaccgtggcgatattaggcggggagtcgagcgggaaatccacgctggtgaacaagctcgccaatatttttaataccaccagcgcgtgggagtacggacgcgactatgtcttctcgcatctgggcggtgacgagatggcgttacagtattctgattacgataagatcgcgctgggccatgcacaatatattgattttgcggtgaaatacgccaataaagtagcctttatcgataccgatttcgttaccacgcaggccttttgtaaaaaatacgaagggcgcgagcatccgtttgtgcaggcgttgatcgatgaataccgctttgatctggtgatcctgctggagaacaatacgccctgggtcgcggatgggttacggagtctgggcagttcggtggatcgtaaagagttccagaatctgctggtggatatgctgcgggagaacaacatcaatttcgtccacgtagaagaggccgattacgatggtcgatttttgcgctgcgtggagttagtgaaagagatgatgggcgagcagggttaa

SEQ ID NO: 73753 - DNA, 1668 bp, Citrobacter koseri
gtggctcaattcgtttataccatgcatcgtgtcggcaaagtggttccgccgaaacgtcatattttgaaaaacatctcgctgagcttcttccctggggcgaaaatcggcgtactgggtctgaacggcgccggtaagtctaccctgctgcgcattatggctggcatcgatacagatattgagggcgaagctcgcccacagccaggcatcaaaattggctacctgccgcaggaacctcagctcacccctgaacacaccgttcgcgaatcgatcgaagaggcggtggccgaagtggtcggcgccctgaaacgtctggatgaagtgtacgcgctgtacgccgatccagatgcggactttgacaagctggccgccgaacagggcaagctggaagagatcatccaggcgcatgacggccacaacctgaacgtacagctggagcgcgccgctgacgccctgcgtctgccggactgggatgccaaaatcgcgaatctttccggtggtgagcgccgccgcgtcgcgctgtgccgtctgctgctggaaaaaccggacatgctgctgctcgacgaaccgaccaaccacctggatgcggagtccgtcgcgtggctggaacgcttcctgcacgacttcgaaggcaccgttgtggcgattacccacgaccgttacttcctcgacaacgtagcgggctggatcctcgaacttgaccgtggcgaagggattccgtgggaaggcaactactcctcctggctggaacagaaagatcagcgtctggcgcaggaagcctctcaggaagcggcccgccgtaaatccattgagaaagagctggagtgggtgcgtcagggtactaaaggccgccagtctaaaggcaaagcccgtctggcgcgctttgaagagctgaacagcaccgaataccagaaacgtaacgaaaccaacgaactgtttattccacctggaccacgtttgggcgacaaggtcgttgaagtcagcaacctgcgtaaatcctacggcgatcgcctgctgatcgacgatctcagcttctcagtaccgaaaggcgcgattgtcggcatcatcggtccgaacggcgcgggtaaatccaccctgttccgcatgatgtccggtcaggaacagccggatagcggcaccatcacgctgggggaaaccgtaaaactggcttccgttgaccagttccgtgacgcgatggataacagcaaaaccgtgtgggaagaagtttccggcgggctggatatcatgaagatcggcaacaccgaaatgccaagccgcgcctatgtgggccgctttaacttcaaaggcgtcgatcagggtaaacgcgtgggcgaactgtccggcggtgagcgcggtcgcctgcatctggcgaagctgttgcaggttggcggcaatatgctgctgctcgatgaaccgaccaacgacctggatatcgaaaccctgcgtgcgctggaaaacgccctgctggagttcccgggctgtgcaatggttatctcgcacgaccgttggttcctcgaccgtatcgccacgcacattctggattaccaggatgaaggcaaagtggagttcttcgagggtaactttaccgagtacgaagagtacaagaaacgcacgctgggcgccgacgcgctggagccgaagcgtatcaagtacaaacgtatcgctaagtaa

SEQ ID NO: 73754 - DNA, 1938 bp, Citrobacter koseri
gtggacaaagccaaaccatttacctggcgtcttatcgccgccagcgtatgcctgctgacggtaagtcaggcggcgcgagcggattctctggatgagcagcgcaatcgctatgcgcaaatcaaacaggcctgggataaccgacagatggatgtcgttgagcagatgatgcctggcctgaagaattacccgctgtatccctatcttgagtatcgccagatcaccgacgatctgatgaaccagcctgcggtcaccgtcacccagtttgtgcgcgccaaccctacgcttcctcctgcgcgtacgctgcaatcgcgtttcgttaatgagctggcgcgtcgcgaagactggcgtggactgttagcgttcagccccgagaagccgggcaccaccgaagcgcaatgtaattactactacgcgaaatggaataccgggcagacggaagaggcctggcagggggcgaaagcgctttggctgaccgggaaaagccagccgaacgcctgtgacaaactgttcagcgtctggcgcgcttccggcacccaggacccgctggcctggctggagcgcatccgcctggcgatgaaagcaggcaacacggggctggtaacggtgctggccgggcagatgcctgcgcagtaccagaccattgcttcggcgatcatcgcgctggcgaacgatcccaatagcgtgatgacttttgcgcgtacgaccggcgcgaccgattttacccgtcagatggcggcagtggcctttgccagcgtggcgcgtcaggacgcagagaatgcgcgtttgatgatcccgtcactggtgcaggcccagcagcttaatgaggagcaaactcaggaactgcgcgatatcgtcgcctggcggctgatggggaacgatgtgaccgatgcgcaggcgaagtggcgcgatgatgcgattatgcgctcgcaatccaccacgctggtggaacgccgcgtgcggatggcgctgggcaccggcgatcggcgtgggctgaatacctggcttgcccgactgccgatggaagcgaaggagaaggatgaatggcgctactggcaggcggatttgttgcttgagcgcgggcgtgaggcagaggcaaaagagatcctccatgcgctgatgcaacagcgtggtttctacccgatggtcgccgcacaaaagctgggtgaagcgtatgtactgaagatcgacaaagcgccgacgacagtggatgcttcgcttacgcagggcgcggaaatggcgcgagtacgcgaactgatgtactggaacctggataatacggcgcgcagcgagtgggcgaatctggtctccagcaggacgaagtcggagcaggtgcagctggcgcgttatgctttcaataaccactggtgggatctgagcgtgcaggcgacgatcgcagggaaactgtgggatcatctggaagagcgtttcccgctggcgtacaaggatcttttcgcccgttacaccggcggcaaagcgatctcgcaaagttacgctatggcgattgcgcgtcaggagagcgcctggaatccgaaagtgaaatccccggtaggagccagcggtctgatgcaagttatgccgggcacggcgacgcatacggtgaaaatgttctcgataccgggctacagcagccccagccagctgcttgacccggagacgaacatcaacattggcaccagttacctgcaatacgtttatcaacagtttggtaataaccgtattttctcttcagcggcttacaatgccgggccggggcgcgttcgtacctggcttggcaacagcgcagggcgcatcgacgccgtcgcgtttgttgaaagtattccgttctcagaaacgcggggctacgtgaagaacgtgctggcttatgatgcctactatcgctacttcatgggcgataaaccaacgttgatgaatgacgcagaatggcagcgccgttactga

SEQ ID NO: 73755 - DNA, 300 bp, Citrobacter koseri
atggcagaacagcgtcaccaggagtggttacgctttgttgagctgctcaagcacgcttgtgcggaagacctgcatcttcccttactcaatttgatgctgacgccggatgagcgtgaggcgctgggaacgcgcgtgcgtatcattgaagagttgttacgcggtgaaatgagccagcgcgagcttaaaaatgagctgggggcgggcatcgccaccattacgcgcggttccaacagcctgaaatccgcaccggtagagttacgccagtggctggagcaggtgttgctcaagagcgaaaggtaa

SEQ ID NO: 73756 - DNA, 516 bp, Citrobacter koseri
atgcaccatgttgtctcagcaaccaccaatcccgctaaaattcaggcaattctgcaagcatttaacgagattttcggtgaaggatcctgccatattgagtccgtctccgtcgagagcggcgtgccggaacaaccttttggaagtcaggaaacgcgcgctggcgcacggaatcgggtagaaaatgcgcgctgtctgcgtcctcaggccgatttttgggtggctatcgaagcggggattgatgatgacagtacgttcagttgggtggtgatagagaatgccacccagcgaggcgaggcgcgctcggcaacgctgccgcttcctgcggttatccttgaaaaagttcgtcagggcgaagcgctcggcccggtgatgtcgcagtataccggtattgatgaaattggccgtaaagagggggctatcggggtgtttaccgccggaaaactgacccgctccagcgtttatcaccaggcggtgattctggcgctcagcccgtttcataatgcggtgtatcggtag

SEQ ID NO: 73757 - DNA, 648 bp, Citrobacter koseri
atgttacaggtataccttgttcgccacggtgaaacgcagtggaacgccgagcgacgtattcaaggccagtctgacagtccgctgaccgctaaaggtgagcaacaagctatgcaagtgggagaacgcgccagaacgctcggcatcacccatatcgtcagtagcgatctcggtcgcacccgccgcacggctgaaatcatcgcccaggcatgcggttgcgatatcactttcgacgcccgtctgcgtgagctggacatgggcgtgctggaaaaacggcacatcgacaccctcaccgaagaagaagagaactggcgtcgccagttagtgaacggcacggttgacgggcgcattcctgatggcgaatccatgcaggaactgagcgatcgcgtcaatgccgctctcgcttcctgtctggaactgccgcagggcagccgcccgctgctggtcagtcacggtatcgcgctgggttgcctggtcagcaccattctgggattaccggcctgggcggagcgtcggttacgtctgcgtaattgctctatttcccgcgtcgattatcaggaaagtttgtggctggcgcctggttgggtcgttgaaacggcaggggacgtctcgcatctcgatgcccctgcgttagatgagctacagcgttaa

SEQ ID NO: 73758 - DNA, 870 bp, Citrobacter koseri
atggatcaggctggcattattcgcgacctcttaacctggctggaaggccatctggatcagcctctgtcgcttgacaatgtggcggcaaaagcaggttattccaagtggcacctgcaaagaatgtttaaggacgtgacgggccatgctattggcgcttacatccgcgctcgccgcttatctaaatccgccgtggccctgcgcctgacggcgcgtccgattctggatatcgcgttgcagtaccgcttcgattctcagcaaacctttacccgcgcgtttaaaaagcagttctctcagacgccggcgttatatcgccgttctccagaatggagcgcctttggcattcgtccgccgatgcgtctgggtgagttcgccatgcctgagcatcagtttgtcaccctggaagatacgcaactgctcggcaccacccagagctattcctgttcgctggagcaaatctccgattttcggcacgaaatgcgcgtacagttctggcaagactttctcagccaggcgccaacgattcctccgctgctctacggccttaacgaaacgcgccccagcctggagaaagatgacgaacaggaggtgttctacaccaccgcgctaccgcaagaacatgccaacgggtatgtgccgtcagcgcagcctgttaccctacagggcggcgaatatgtgatgttcacctacgaaggtttaggaaccggggtacaggagtttatcctgacggtatacggcacctgtatgccgatgctgaacctgacccgccgtaaagggcaggatatagagcgatactacccggcagaagatgccaaaacaggtggtcgccctattaacctgcgttgcgaattcctgatccccgttcgccgttaa

SEQ ID NO: 73759 - DNA, 486 bp, Citrobacter koseri
atgaatggtaacaatatgaaatacaagagcttaatactttcctcaattctgttgatgctggggcagtttgcgcatgcagaacaggtgggttccgtcgataccgtatttaaaatgtttgggcctgaccataaaatcgtcgtcgaagcgtttgacgatcccgacgtcaaaaatgtgacgtgctatgtaagtcgggcgaaaacgggggggattaaaggcggcctgggactggccgaagatacctccgacgcggcgatctcctgtcagcaggtagggccgattgagctgagcgataaaattaagaacgggaaagcgcaaggggatgtcgttttccagaagcgcacgtcgctggtgtttaaaaaattacaggtcgtgcgtttttatgatgccaaacgcaatacgctggcgtatctggcctattctgacaaggtcgttgaagggtcgccaaaaaatgccataagcgcggtgcccgttatgccgtggcggtaa

SEQ ID NO: 73760 - DNA, 717 bp, Citrobacter koseri
atgcagaccccgcacattcttatcgttgaagacgagttggtaacacgcaacacgttgaaaagtattttcgaagcggaaggctatgatgtattcgaagcgacagatggcgcggaaatgcatcagatcctctctgaatatgacatcaacctggtgatcatggatatcaacctgccagggaaaaacggtcttctgttagcgcgtgaactgcgcgaacaggctaacgttgcgttgatgttcctgactggccgcgataacgaagtcgataaaatcctcggcctcgaaatcggcgcagacgattacatcaccaagccgtttaacccacgcgaactgactatccgtgcgcgcaacctgctgtcccgtactatgaatctgggtacggtcagtgaagagcgccgtagcgtcgaaagctacaagttcaacggttgggaactcgacatcaacagccgttctttgatcggcccagatggtgagcagtacaaactgccacgcagcgaattccgcgccatgcttcacttctgcgagaacccgggcaagatccagtctcgtgcagaactgctgaagaaaatgaccggtcgcgagctgaagccgcatgaccgtactgttgacgtgactatccgtcgtattcgtaagcatttcgaatccacgccggataccccggaaatcatcgcgaccattcacggtgaaggttaccgtttctgcggtgatctacaggactaa

SEQ ID NO: 73761 - DNA, 687 bp, Citrobacter koseri
atgcgtgtaacaattattctggtcgcgcctgccagagcggaaaatattggcgcggcggcacgggcaatgaagacgatgggttttggcgatatgcgtattgtcgacagccaggcgcacctggagccggcgacccgttgggtcgcacatggttccgctgatattattgataatattagtgtttatccaacgctggcggaagcgctgcacgatgttgatttcactgtcgccaccacggcccgcagtcgcgcgaagttccactactacgcaacgcccgcagaactgctgccgctgttgcaggaaaaatcgcagtggatgaaccatgcggcgctggtttttggccgggaagattcgggcctgacgaacgaagaactggcgctggcggacgttttaaccggcgtgccaatggttgctgattatccttcactcaatttagggcaggcggtaatggtgtattgctatcaattagcaggcttaatgcaacaaccggcgaaacaaacagaggcgactgacgcgcctcaattgcaggcgttacgcacacgcgtttcgcagttactggcgacgctggatgttgctgatgacatcaaactggcggactggctgcaacaacgactggggctgtcagggcagcgcgacacggccatgctgcaccgtttattgcatgatattgagaaaaacataacaaaataa

SEQ ID NO: 73762 - DNA, 2463 bp, Citrobacter koseri
atgcgagtgttgaagttcggcggtacatcagtggcaaatgcagagcgctttctgcgtgttgccgatattctggaaagcaatgccaggcaggggcaggtagcgactgttctctctgcccccgccaaaattactaaccatctggtggcgatgattgaaaagaccatcagcggtcaggatgctttaccgaatatcagcgatgccgaacgtattttttccgaacttcttacgggccttgcagccgctcagccggggttcccgctggcgcagttgaaagttttcgttgagcaagaatttgcgcaaatcaaacatatcctgcacggaatcagcctgctgggccagtgcccggatagcatcaatgctgcgctgatctgccgtggcgagaagatgttgatcgcgatcatggctggcctgctggaagcgcgcggtcatggcgtgacggttatcgatccggtcgaaaaattgttggcggtcgggcattacctcgaatcgaccgttgatatcgccgaatctacgcgccgtatcgcggcgggccgcattccggctgaccacatggtgctgatggcaggtttcaccgccggtaacgaaaaaggcgagctggtcgtgctgggccgcaacggttctgattactccgctgcggtgttggctgcctgcttacgcgccgactgttgtgagatctggactgacgtcgacggtgtgtatacctgcgatccgcgccaggtgccggacgccaggttgctgaagtcgatgtcctatcaggaggcgatggagctttcttacttcggcgccaaagtccttcatcctcgtaccatcacccccattgcccagttccaaatcccatgcctgattaaaaacaccggaaacccgcaagcccctggtacgctgatcggcgccagcgtggatgaagacgaactgccggtgaaagggatttcgaacctgaacaatatggcgatgttcagcgtttccggccctggaatgaaagggatgatcgggatggcggcgcgcgtcttcgcggcaatgtcccgcgcggggatctccgtggtgctgatcacgcaatcctcttctgaatacagcatcagtttctgcgtaccgcagggcgactgcgcgcgggcccagcgtgcaatgcaggatgagttctacctggaactgaaagaagggttgctggagccgctggcggtgactgaacgtctggcgatcatctcggtggttggcgacggtatgcgcacgctgcgcggcatctcggcgaagttctttgcggcgctggcgcgcgcgaatatcaatattgtcgcgattgcgcagggctcgtccgaacgatcgatttcggtggtcgtgaataacgatgacgtcacaacgggcgtacgtgttacccaccagatgctgttcaacaccgatcaggtgattgaagtgttcgttatcggcgttggcggcgttggcggagcgttacttgagcagctgaaacgccagcagtcctggctgaaaaacaagcatatcgacctgcgcgtctgcggcgtggcgaattcgaaagcgctgttgaccaatgtgcatggcctgaacctggataactggcaggcggaactggcggaagcgaaagaaccgtttaatttagggcgcttaattcgcctggtgaaagagtatcacctgcttaacccggtcattgttgactgtacctccagccaggcggtggcggatcaatacgccgacttcctgcgtgaaggcttccatgtggtaacgccgaacaaaaaagccaacacgtcgtcgatggattactaccatcaactgcgttttgccgcggcgaaatcccgacgtaagttcctgtacgacaccaacgtaggcgcgggcttaccggttatcgagaacctgcaaaacctgctgaacgcaggtgacgaactgcaacacttctccggcatcctgtctggatcgctctcttttattttcggcaagctggatgaaggcatgagcctttcggccgcgaccacgatggcgcgcgagttgggctataccgaacccgatccgcgtgacgatctttccgggatggatgtggcgcgcaaattgctgatcctcgctcgtgaaacgggacgtgagctggaactgtccgatatcgtgattgagccggtgctaccggaaggtttcgacgattccggcgatgtcgccacgtttatgaccaatctgtcgcagcttgacgacgcgtttgccgcccgcgtggcgaaagcccgtgatgaaggcaaagtattgcgctatgttggcaacattgaagacgacggcgtgtgtcgcgtgaagatcgccgaggttgacggcaacgatccgctgtttaaagtgaaaaatggggagaacgcgctggcgttttacagtcactattatcaaccgctgccgctggttctgcgcggttacggtgcggggaatgatgtgacggcggcgggtgtttttgccgatctgctgcgtaccctttcatggaagttaggagtctaa

SEQ ID NO: 73763 - DNA, 930 bp, Citrobacter koseri
atggtgaaagtctatgctccggcttccagtgccaatatgagcgtcggatttgatgtgcttggggcggccgtcacgccggttgatggctcactgctgggcgatgtggtctcggtggatgcggcagaaagcttcacgctgaataatttagggcgttttgccgacaagctgccgtcagcgccgcgtgaaaatatcgtttatcagtgctgggagcgtttttgccaggagttgggtaaacagataccggtggcgatgacgctggaaaagaacatgccgattggttccgggttagggtccagcgcctgttccgtggtcgccgcgctggtggcgatgaatgagttctgtggcaaaccgctgaacgacacgcgtctgctggcgatcatgggggaactggaagggcgtatctctggcagcattcattacgataacgtcgcgccgtgctttctcggcggcatgcagttgatgatcgaagaaaacggcattatcagccagcaggtgccaggatttgatgagtggctgtgggtactggcctatccggggattaacgtttcgacggctgaagcgagggcgattttacccgcgcagtatcgccgtcaggactgtatcgcccacgggcggcatctggccgggtttattcatgcctgctattcccgtcagccgcagcttgctgcgaagctgatgaaggatgtgattgccgaaccgtaccgcgctcgtctgctgccgggcttcagccaggcgcgtcaggcggtggcggaaattggcgcgctggccagcggtatttccgggtccgggccgacgctcttcgcgctctgtgataaaccggatacggcgcagcgcgtagcagactggctgggtaaaaattacctgcaaaatcaggaaggctttgttcatatttgtcagctggatacggcgggcgcacgagtactgggataa

SEQ ID NO: 73764 - DNA, 1287 bp, Citrobacter koseri
atgaaactctacaatctgaaagatcataatgagcaggtcagctttgcgcaggccgttacgcaggggcttggcaagaatcaggggctctttttcccgcacgacctgccggaatttagcctgactgaagttgatgagatgctgaatcaggactttgtgagtcgtagcgcaaagatcctttccgcgtttatcggggatgagatcccgcaggacatcttagaagagcgcgtccgcgaggcattcgcttttccggcgccggtgcgtcaggtggaaggcgatgtcgggtgcctggagttgttccacggcccgacgctggcctttaaggattttggcggtcgctttatggcgcaaatgctgacgcacatcagcggcgacaaaccggtgactatcctgacggcgacctctggcgataccggcgcggcagttgctcacgcattctacggtctgaaaaatgtacgcgtcgtgatcctctacccacgcggcaagatcagcccgttgcaggaaaaactgttctgtacgctgggcggcaacatcgaaacggttgcgattgacggtgatttcgatgcctgccaggcgctggtaaaacaggcgtttgatgatgaagaactgaaggcggcgctggggctgaattcggcgaactccatcaacatcagccgtctgctggcgcagatttgctattactttgaagcggtcgctcaactgccgcaggacgcgcgtaatcagttagtgatctccgtgcccagcggtaactttggcgacctgacggcggggctgctggcgaagtcgctcggcctgccggtgaaacgctttatcgccgccactaacgtcaacgatacggtgccgcgcttcctgaaagaggggcagtggtcgccgaaagcgacgcaggctaccttgtcgaacgcgatggatgtcagccagcccaataactggccgcgcgtggaagagctgttccgccgtaaaatctggcgtttgacggagctgggctacgctgcggttgacgatgagacgacgcaggagaccatgcgcgaactgaaagcggcaggttatacctctgaaccgcacgctgccgtggcgtaccgcgcgctgcgtgatcaactgcacccgggggagtatggcttgttcctcgggactgcgcatccggcgaaattcaaagagagtgtggaggcgattcttggtgaaacattggatctgccaaaagagctggcggatcgtgccgatctgccgctgctctcgcataatctgcctgccgattttgccgaattgcgtaagctgatgatgacacgcggctaa

SEQ ID NO: 73765 - DNA, 291 bp, Citrobacter koseri
atgaacaagttgaaacccgtgcttcttgcactttccatgatgctggtggctcccctcgcagcacaggctgccgaaattactctcgtaccggcagttaaacttcagattggcgatcgcgataaccacggtaattactgggatggcggtcactggcgcgaccacggctggtggcagaagcattatgagtggcgagaaaaccgctggcagccgcatggaccacgtccgcaaccgcatcataataagcatgacgagcatcgtcatgatgatcgccgcgacgaccaccgccattaa

SEQ ID NO: 73766 - DNA, 777 bp, Citrobacter koseri
atgctgattctgatttcacctgcaaaaacgctcgattaccaaagcccgctggccacgacgcgctatacgcggcctgaactgctggattactcccagcagttgatccgcgaggcgcgcaagctctcggcgccgcagattggcaagctaatgggcattagcgacaaactggccgatctgaatgccacccgttttcatgactggcagcctgacttttcccctgaaaacgcccgccaggcgattctggcgtttaaaggcgacgtctataccggactacaggcggaaacgttcagcgaagccgattttgatttcgcgcagcagcatttgcgtatgctttccgggttgtacggcgtcctgcgtccgctggatctgatgcagccttaccgtctggagatgggcattcgccttgagaacgccaaagggaaagacctttatcagttctggggcgatgtgattaccgataaactgaacgaagcgctggctgcgcaaggcgataaaatcgtcatcaacctggcctcggatgaatattataaatccgtgaagccgaagcagctgaatgcggaggttatcaagcccgtgttccttgatgagaaaaacggcaaattcaaagttatcagcttctacgccaaaaaagcgcgcggcctgatgagccgttacatcattgaaagccggctgacgaagccggaacagctcaccgcatttaacagcgaaggctatttctatgatgagcaagcgtcaggaaaaggcgaactggtgtttaaacgccacgagcaaaactga

SEQ ID NO: 73767 - DNA, 1431 bp, Citrobacter koseri
atgcctgatttcttcgcctttattaatgaaatactctggggatcggtaatgatctacctcctgcttggcgcagggttttggtttacttaccgtaccggattcgttcagtttcgctatatccgccagtttggcaaaagtcttaaaaacagcatacatccccagccgggcgggcttacgtcatttcaggcgctgtgtaccagccttgccgcgcgtattggcagcggtaacctggcaggcgttgcgttggctatcgccgcaggcgggccaggcgccgtattctggatgtgggtatctgcgcttatcggcatggcgacctcgtttgccgaatgttctctggcccagctctacaaagagcgcgacagcacagggcagtatcgcggcggcccggcatggtatatggcgcgtggcctgggtatgcgctggatgggcgttctcttcgcgattttcttactcattgcgtatggtctgatttttaatagcgtacaggcgaactccgtctcacgggcgctcgcttttgcctttgacataccgcccattatctccggtatcgtgctggcgctggcggccttttttgtcatcgttcgcggcattaaagatgtcgcaaagctcatgcaatggttcgtccctgcgatggcccttctgtggacgctcaccggtttagtgatttgcctctggcacatcgaacagctgcccgagattatcgcgtcgattgtgaaaagcgcattcggctggcaggaagccactgccggggcggctgggtatacgctcagccaggcgattaccagcggtttccagcgcggcatgttctccaacgaagcgggaatgggttctgcgcctaacattgcggccgccgcttcatcctggccgccgcaccctgccgcgcagggaattgtgcagatgatcggcgtctttaccgataccattattatctgcaccgccagcgcgatgattattctgctggcaggcaatggcgcctcgcatatgccaacggaaggcatccagctggtgcaacaggcaatgatttcactgaccggcgaatggggcgcaagccttgtcgcgtttattgtggtgttgttcgccttcagctcgattgtcgccaactacgtttacgccgaaaataacctgatttttctgcgtctggacagtctgcgaatgcgctgggcgctgcgtattgtcaccgtcgggatggtcgtggcgggcacgttactcagctttccgctcgtctggcagttggccgacattattatggcctgtatggccatcaccaacctgacggcgattctgctgctctcgccggtggtgcatacgatcgccagcgactatctgcgacagcgtaagctcggcgtacaacccgtgttcgacccgttccgctaccctgaaattgagcagcaactggcgccggatacatgggatgaattgccgcgtcactag

SEQ ID NO: 73768 - DNA, 954 bp, Citrobacter koseri
atgacggacaaattgacctcccttcgtcagttcaccaccgtggtggccgacaccggagacatcgcggcaatgaagctgtaccagccgcaggatgccacaaccaacccttctctcattcttaacgcagcacagatcccggaataccgtaagctgattgacgatgccgttgcctgggcgaaacagcagagcagcgatcgcgcgcagcagattgttgacgcggccgacaagctggcggtgaacattggtctggagatcctgaaactggttccgggccgtatctccaccgaagttgacgctcgtctgtcctacgacaccgacgcgtctatcgccaaagcaaaacgcatcatcaagctctacaacgacgcgggcatcagcaacgatcgcatcctgatcaaactggcgtctacctggcaggggattcgtgctgctgaacagctggaaaaggaaggtatcaactgtaacctgactctgctgttctccttcgcgcaggcgcgtgcttgtgcggaagcgggcgtatacctgatctctccgttcgtgggccgtattcttgactggtacaaagccaataccgacaagaaagagtacgctccggcagaagatccgggcgtggtttccgttacggaaatctacgaatactacaaacagcacggttatgagacagtggtgatgggcgcgagcttccgcaacgtcggtgaaattctggagctggcgggttgcgatcgtctgaccatcgctccggcgctgctgaaagagctggcggaaagcgaaggcgctatcgaacgtaaactgtccttctctggcgaagtgaaagcgcgtccagaacgcatcaccgagtctgagttcctgtggcagcacaaccaggacccgatggcggtagacaaactggcggacggtatccgtaagtttgctattgaccaggaaaaactggaaaaaatgatcggcgatctgctgtaa

SEQ ID NO: 73769 - DNA, 588 bp, Citrobacter koseri
atgaacaccttacgtattggtttagtttccatttctgaccgcgcgtccagcggcgtataccaggataaaggcattcctgctcttgaagagtggctggcctccgcgctgaccaccccttttgacgtgcaaacccgactgatcccggatgagcaggcgatcattgagcaaacgctgtgtgagctggtggatgaaatgagctgtcacctggtactgacgacgggtggtacggggccggcgcgtcgtgatgtcacgcctgacgcgactctggccgtcgccgacagagaaatgcccggctttggcgagcagatgcgccagatcagcctgcactttgttcctacggcgatcctttcccgccaggttggcgtgatccgtaagcaggcgctgatcctgaacttaccggggcagccaaaatccatcaaagagaccctggaaggggtgaaagatgccgagggtaaggttgtcgtgccgggaattttcgcaagcgtaccgtattgtgtacagttgcttgaagggccttatgtggaaaccgcaacggaagtggtagcatctttccgcccgaaaaatgccagacgcgacataaacgcctga

SEQ ID NO: 73770 - DNA, 1308 bp, Citrobacter koseri
atgtcacgacacacacgacctctgaatcgccaggattataagactctttcacttgccgctctcggcggcgcgctcgagttttacgacttcatcatctttgttttcttcgcagcggttgtgggcgaactatttttccccgccgatattcctgaatggcttcgtcaggttcagacgtttgggatcttcgccgccggttatctggcgcgcccgctgggcggcattatcatggcgcactttggcgatctggtagggcgcaagaagatgttcaccctgagtattctattgatggctgttccaacgctggcgattggcctgctgccgacttacgcctcaatgggcatccttgcgccgttgttattgctgctgatgcgtattttgcaaggcgcagcgattggcggcgaagtgccgggagcgtgggtgtttgtggctgaacatgtgccggagcgccgtatcggcatcgcctgcggcacgctgactgcgggactgacggtcggtatcctgcttggctctgtcgtggcgacgctggtgaataccagtatgacccagcaggcggtgcatgattatggctggcgtattcccttcctgctcggcggcgtatttggtctgattgcgatgtatttacgtcgttggttgcaggaaacgcccatcttccttgaaatgcagcagcgcaaaacgctcgcgcaggaattgcccgtcaaagcggtagtggtgaaacataaaaaagcggtggcgatttcgatgctgctgacctggttgttatcggccggcattgtcgtcgtgattttgatgtcgccggtctggttgcaaaagcagtacgggtttgcacccgcgttaactttacaggcaaatagcgtggcgaccattatgctgtgcgtgggatgcctgctggcagggttcattgtcgatcgggttggcgccagcaaaacctttattgtaggcagttttctgctggcctgctcaagctggatcttctatcacctgtctggcgcgcatcccgagcagttgtttttattatacgggctggtggggctgtgtgttggtgttgttggcgcggtgccgtacgtaatggtgcgagccttcccggcggaagtgcgtttcaccggcatctctttttcttacaacgtctcgtatgccatttttggcggcctgacgccaattgcggtcaccatgttgatgggcgtgtcgccaatggcgccggcctggtatgtgctggcgttgtcactggtggggctggggttgggcatctggttgcgacaggatatttattatcgcgatgcggatgtgcaggcagaattacaacagctgtaa

SEQ ID NO: 73771 - DNA, 567 bp, Citrobacter koseri
atgggcaacactaagttggctaacccggctccgctgggcctgatgggcttcggcatgaccaccattctgcttaacctgcacaacgcgggtttcttcgctttagacggcattattctggcgatgggcattttctacggcggtatcgcgcaaatttttgctggcctgctggaatataaaaaaggcaacaccttcggcttaaccgcatttacctcttacggttctttctggctgacgctggtcgcgatcctgttaatgccgaaaatgggtctgacagaagcgccgaacgcgcagttcctgggcgcctacctggggctgtggggcgtgttcacactgttcatgttctttggcacgctgaaagccgctcgcgcgctacagtttgtcttcctgagcctgaccgtactgttcgccctgctggccttcggcaacatcgcgggtaacgaagcggtgatccacgttgcgggttggattggcttagtgtgtggcgccagcgccatttacctggcgatgggcgaagtgctgaacgaacagtttggccgcaccatcctgccaatcggtgaagcgcactaa

SEQ ID NO: 73772 - DNA, 1917 bp, Citrobacter koseri
atgggtaaaattattggtatcgacctgggtactaccaactcttgtgtagcgattatggatggcacaactgcacgtgtgctggagaacgccgagggcgatcgcaccacgccttctatcattgcttatacccaggatggtgaaactctggttggtcagccggctaaacgtcaggcagtgacaaacccgcaaaacaccctgtttgcgattaaacgcctgattggccgccgcttccaggacgaagaagttcagcgtgacgtttccatcatgccgtacaaaatcatcggcgccgataacggcgacgcatggcttgatgtgaaaggtcagaaaatggcaccgccgcagatctctgctgaagtgctgaaaaaaatgaagaaaaccgcagaagattacctgggcgaaccggtaactgaagctgttatcaccgtacctgcttacttcaacgatgctcagcgtcaggcaacgaaagatgccggtcgtatcgcaggtctggaagtaaaacgtatcatcaacgaaccaaccgccgccgcgctggcttatggtctggataaagaagtcggcaaccgtactatcgcggtttacgacctcggtggtggtactttcgatatctctattatcgaaatcgacgaagttgacggcgaaaaaaccttcgaagttctggcaaccaacggtgatacccacctgggtggtgaagacttcgacagccgtatgatcaactacctggttgaagaatttaagaaagatcagggcattgacctgcgtaacgacccgctggcgatgcagcgtctgaaagaagcggcagaaaaagcgaaaatcgagctttcttccgcacagcagaccgacgtgaacctgccgtacatcaccgcagatgccaccggtccgaaacacatgaacatcaaagtgactcgcgcgaaactggaaagcctggtcgaagacctggtgaaccgttccatcgagccgctgaaagtcgcgttgcaggatgctggcctgtccgtatctgatatcaacgacgttatcctcgttggtggtcagacgcgtatgccgatggtgcagaaaaaagtggcggagttctttggtaaagaaccgcgtaaagacgttaacccggacgaagctgttgctatcggcgcagcggtgcagggcggcgtactgaccggtgatgtgaaagacgttctgctgctggacgttaccccgctgtctctgggtatcgaaaccatgggcggcgtaatgacggcgctgatcagtaaaaacaccactatcccgaccaagcacagccaggtgttctctaccgctgaagacaaccagtctgcggtaaccatccatgtgttgcagggtgagcgtaaacgcgcgtctgataacaaatctctgggtcagttcaacctggatggcatcaacccggcgccgcgcggtatgccgcagatcgaagtcacctttgatatcgatgctgacggtatcctgcacgtttccgcgaaagacaaaaacagcggtaaagagcagaagatcaccatcaaggcttcttctggtctgaacgaggacgaaattcagaaaatggttcgcgatgctgaagcgaacgcagaatctgaccgtaagttcgaagagctggttcagacgcgcaaccagggcgaccatctgctgcacagcacgcgtaagcaggttgaagaagcgggcgatcagctgccagcagacgacaaaacggctatcgagtctgcactgagcgcgctggaaacggcgctgaaaggcgaagacaaagcggctatcgaagcgaaaatgcaggaactggcgcaggcttcccagaaactgatggaaatcgctcagcagcagcatgcacagcagcaggctggcggcgctgacgcttctgcaaacaacgcgaaagatgacgatgttgtcgacgctgagtttgaagaagtgaaagacaaaaaataa

SEQ ID NO: 73773 - DNA, 1158 bp, Citrobacter koseri
atgttaggggcagataaaaacaagatggctaagcaagactattacgagattttaggcgtttccaaaacagcggaagagcgtgaaatcaaaaaggcgtacaagcgcctggccatgaaatatcacccggaccgtaaccagggtgataaagaggccgaggccaagttcaaagagatcaaggaagcctacgaagttctgaccgatgcgcaaaaacgtgcggcatacgatcagtacgggcacgccgcgtttgaacaaggcggtggtggatttggcggcggcttcggcggcggtgctgacttcagcgatatctttggtgacgttttcggcgatatctttggcggcggacgtggtcgtcagcgcgcagcgcgtggtgctgatttacgttacaacatggatctcaccctggaagaagccgtacgtggcgtgaccaaagagatccgtattccaacgctggaagagtgcgacgtttgccacggcagcggtgcgaaagcaggcactcagccgcagacctgtccaacctgtcatggctctggtcaggtgcagatgcgtcagggcttcttcgccgtgcagcaaacctgcccgcactgtcaggggcgcggtacgctgattaaagatccgtgcaacaaatgccacggtcatggccgcgtagagaaaaccaaaaccctgtcggttaaaattccggcgggtgtggacacaggcgatcgtattcgtctttccggtgaaggtgaagcgggcgagcatggcgcgccagcgggcgatctgtacgttcaggtgcaggtgaagcagcacccgatcttcgagcgtgaaggcaacaacctgtattgcgaagtgccgattaactttgcaatggcggcgttaggtggcgagattgaagtcccgacgctggatggccgtgtgaagttgaaagtgccgcacgaaacgcaaactggcaagctgttccgtatgcgcggaagaggcgtgaaatccgtacgcggcggcgcgcagggcgatctgctgtgccgtgttgtggtcgaaacgccggtaggtctgaacgagaagcagaagcagttgctgaaagatctgcaagaaagcttcggtggcccgacaggcgagaaaaacagtccgcgttcgaagagtttcttcgacggtgtgaagaagtttttcgatgatttgacgcgttaa

SEQ ID NO: 73774 - DNA, 1167 bp, Citrobacter koseri
gtgaaacacctgcatcgtttttttagcagtgatgcctccgggggcatcattctcattatcgccgccgtgctggctatgctgatggcgaacagcggattcaccagcggatggtatcacgcctttctggagacgcccgttcagctgcgggttggggcgcttgagatcaacaaaaatatgctgctgtggatcaacgacgcgctaatggcggtatttttcctgctgattggtctggaggtcaagcgcgagcttatgcagggctcgcttgccagtttacgtcaggcggcgtttccggtgattgccgccattggcggcatgattgttccggcgctgctctatctggcttttaactattccgacccgattacgcgcgaaggctgggcgatcccggcggcaacggatattgcttttgcgttgggcgtattggccttgctgggcagcagggtgccgctggcgttgaagatattcctgatggcgctggctattattgacgacctgggcgcgattgtgatcattgcgctgttctacaccagcgatctttcgatggtctcgctgggagttgcggcatttgcgattgtgcttctggccgtgctgaacctgtgtgatgtcagacgaacaggggtttatatcctggtcggcgtggtgctgtggactgccgtattgaaatctggcgtccatgccactcttgccggggtgatcgtcggtttcttcatcccattgaaggagaagcatggtcgttctccggcgaagcgtctggaacatgtgctgcacccgtgggtggcgtatctgattctgccgctgttcgccttcgccaatgcgggcgtctcgctacagggggtaacgcttgacgggctgacctcaatactcccgctgggaatcattgccgggttgctgatcggtaaaccgctggggattagcctgttttgctggctggcgctgcgtctcaaactggcgaagctgccggaaggaacacgttttcagcaaataatggcggtcggtattctgtgcgggatcggttttacgatgtcgattttcatcgccagtctggcgtttggtagtgtagatccggcactgattaactgggcgaagctggggattttgattggttctctgctttcggcagtgatcggctacagctggttacgtacacgtttaagcccggtggtctga

SEQ ID NO: 73775 - DNA, 897 bp, Citrobacter koseri
atgtctcatattaactacaaccatctttattatttttggcatgtgtataaagaaggttccgttgtcggggcggcagaagcgctttacctgacgccgcaaaccatcaccggtcagatcaaagcccttgaggagcgcttgcagggaaaattattcaagcgtaaagggcgtgggctggagcccagtgaattaggggaactggtgtttcgctatgcggacaaaatgtttaccttaagccaggaaatgctggatatcgttaactaccgcaaagagtctaatctgctgtttgatgtcggcgtggcggatgcgttgtcaaaacgtctggtcagcaatgtgctggacgcggccgtggttgacgacgaacaaattcatttgcgctgttttgaatccacccatgagatgctgcttgagcagcttagccagcataagctggatatgattatctcggattgcccaatcgactctactcagcaggaagggctgttttcggtgaagataggtgaatgcagcgtgagcttctggtgtacgaaaccgctgcctgcaaaacccttcccggcgtgtctggaagagcgtcggctgctgatccctggccgtcgctctatgctcggtcgcaaattattaaactggtttaattcgcagggcttaaacgtcgaaatcctcggcgagtttgatgatgcggcgctgatgaaagcgtttggcgctacccacaatgcgattttcgtcgcgccgacgctctatgcgcatgacttttacgccgatgagtcgatcgttgagattggccgtgtggaaaacgtcatggaagagtaccacgccatttttgccgagaggatgattcagcacccggccgtacagcgtatttgtcacgcggattactcggcgctatttagccacaaagggtaa

SEQ ID NO: 73776 - DNA, 210 bp, Citrobacter koseri
atgacgtgcagctttgtttttgtggatcagacctttagcagcctgacggtccacgatcggttgcatttcgttaaatgctttcagtgcagcagctttgtcgccagcttcgatagctgcgtatactttcttgatgaaagtacgcatcatagagcgacggcttgcgttgtgcttacgagccttttcagactgaacggcgcgcttcttagctga

SEQ ID NO: 73777 - DNA, 939 bp, Citrobacter koseri
atgaagctgatacgcggcatacataatctcagtcaggccccgcatgggtgtgtgctgactattggtaatttcgacggtgtgcatcgtggccatcgtgcattgctgcagggcttgcgggaagaagggcgcaagcggggtttaccggtgatggtaatgattttcgaaccgcagccgctggaactcttcgctacggaaaaggcccctgcgcgcctgacccgcctgcgggaaaaactgcgttacctggcggaatgtggcgtggactacgtgctgtgcgtacgcttcgatcgccgctttgccgccctgaccgcacaaaactttatcagcgatctgctggtgaagcgtctcggcgtgcggttcctcgctgtcggtgatgatttccgttttggcgctggtcgcgaaggcgatttcttgttattacagaaagccggagcggagtacggttttgacatcaccaacacgcagaccttttgcgaaggtggcgtacgaatcagcagtacggccgtacgtcatgcgctggcggaggacaacctgccgctggctgaaagtttgctggggcatccgtttaccatctccgggcgtgtcgtccacggcgatgagttagggcgcaccattggtttcccgacggcgaatttaccgctgcgtcgtcaggtctccccggtaaaaggggtttatgcggtggaagtgatggggctgggtgataaacccatgcctggcgttgccaatatcggcacgcgtccgacagtggcaggcgtacgccaacagttagaagtgcatctgctggacgttgtaatggacctctatggtcgccatatagatgtaatactgcgtaaaaaaatacgcaacgaacagcgattcgcatcgctggatgaactaaaagcgcagattgcgcgtgatgagttaactgcccgcgatttttttgggctatcaaaaccggcttaa

SEQ ID NO: 73778 - DNA, 2817 bp, Citrobacter koseri
atgagtgactataaatcaaccctgaatttgccggaaacagggttcccgatgcgcggcgatctcgccaagcgtgaaccgggaatgctggcgcgttggaccgatgatgacctgtacggcatcattcgtgcggccaaaaaaggcaaaaaaaccttcattctgcatgatggccctccttatgcgaatggcagcattcatattggtcactcggttaacaagattctgaaagacattatcgtgaagtccaaaggactcgcgggatttgactcgccttacgttccgggctgggactgccacggtctgccgatcgagctgaaagtcgagcaggaatacggtaagccgggcgaaaaattcacggctgcggaattccgtgcgaagtgtcgcgaatacgccgccacccaggttgacggccagcgtaaagacttcatccgtctgggcgtgctgggcgactggtcgcatccgtatttgacgatggacttcaaaactgaagccaacatcattcgcgcgctgggtaaaatcatcggcaacggccatctgcataaaggcgcgaagccggtgcactggtgcgtggactgccgttccgcgctggcggaagcggaagttgaatattatgacaaaacgtctccgtctatcgacgtggcgttccacgccgctgaccaggatgcggtgaaagcgacgtttggcgtttccagcgtcaacggcccgatctcgctggttatctggaccaccaccccgtggacgctgcctgcgaaccgcgcgatctctctggcgccggattttgattacgcgctggtacaaattgacggccaggcgctgattctggcgaaagacctggtggaaagcgtgatgcagcgccttggcgcggctgactataccatcctcggcaccgtaaaaggcgcggagctggagctgttgcgctttacccatccgtttatggacttcgacgttccggcgatcctcggcgatcacgtcacgctggatgccggtacgggggcggtgcataccgcgcctggtcatggcccggacgactatgtcatcggtcaaaaatacggtctggaaaccgctaacccggttggaccggacggcgcttacctgccaggcacgtatccgacgctcgatggcgtgaacgttttcaaagcgaacgacatcgtcgttgcgctgctgcgtgaaaaaggcgcgctgctgcacgttgagaagctgcaacacagctatccgtgctgctggcgtcacaaaacgccgataatcttccgtgcgacgccgcagtggttcgtcagcatggatcagaaaggcctgcgcgagcagtcgctgaaagagatcaaaggcgtacagtggatcccggactggggtcaggcacgtattgaatcaatggttgcgaaccgtcctgactggtgtatttcccgtcagcgtacctggggcgtgccgatgtctctgttcgtacataaagacaccgaagagctgcacccgcgcgccatcgaactgatggaagaagtggcgaagcgcgttgaagtggacggcattcaggcatggtgggatctcgatccgaaagagatcctcggcgacgacgctgaccagtacgtgaaagtgccggatacgctggacgtctggtttgactccggttcgacgcacgcttctgtggtcgatgtgcgtcctgagtttgccggtcatgcggcggatatgtatctggaaggttccgaccagcatcgcggctggttcatgtcttccctgatgatctccactgcgatgaagggcaaagcgccgtaccgtcaggtactgacccacggcttcaccgtggatggtcagggccgcaaaatgtccaaatccatcggtaacaccgtttctccgcaggatgtgatgaacaaactgggcgcggatattctgcgtctgtgggtggcgtctaccgactacaccggcgaaatggccgtttccgacgagatcctgaaacgcgctgccgacagctatcgtcgtatccgtaacaccgcgcgcttcctgctggcgaacctgaacgggtttgatccggtaaaagatatggtgaaaccggaagagatggtggtgctggatcgctgggcggtgggctgcgcgaaagcggcgcaggacgatatcctgaaagcctacgaagcctatgatttccacgaagtggtacagcgtctgatgcgcttctgctccgttgagatgggctcgttctacctcgacatcatcaaagaccgccagtacaccgcgaaagccgacagcgtggcgcgtcgtagttgccagagcgcgctgtaccatatcgcagaagcgctggtgcgctggatggcgccgatcatgtccttcaccgcagatgaaatctggggttatctgccaggcgatcgtgagaagtacgtctttaccggtgagtggtatgaaggtctgtttggcttaggcgaaaccgaagcgatgaatgacgcttactgggacgagctgctgaaagtgcgtggcgaagtgaacaaggttatcgagcaggcgcgtgcggacaagaaagtcggtggttctctcgaagcggctgtcaccctgtacgctgaaccggaactggcggcgaagctgactgcactgggcgatgaattacgatttgtcctgttgacctctggcgcgaaagtcgctgactatgcggaggcttctgctgatgcgcagcagagcgaactgctcaaagggctgaaagtcgcgttgagtaaagccgaaggtgagaagtgcccacgctgctggcactacaccacggatgtcggcaaggtagcggaacacgcagagatctgcggccgctgtgtcagcaacatcgccggtgatggcgaaaaacgtaagtttgcctga

SEQ ID NO: 73779 - DNA, 489 bp, Citrobacter koseri
atgagtaagcctctttgttcaacaggactgcgctggctgtggctggtggtagtcgtgctgattatcgatttaggcagtaagtacctgatcctccagaactttgctctgggggatacggtgtcgctgttcccgtcgcttaatctgcactacgcgcgtaactatggtgcggcgtttagcttcttagccgacagcggtggctggcagcgctggttctttgccggtatcgccatcggtatttgcgttatcctgatggtgatgatgtatcgctcgaaggcgacgcaaaagctgaataacatcgcctatgcgttaatcattggcggtgcgctgggcaacctgtttgaccgtctgtggcatggctttgttgtcgatatgatcgacttctatgtcggcgactggcatttcgccacctttaacctggccgatagcgcgatttgtatcggtgcggcgttgattgtgctggagggtttcctgccgaaaaagcaggcgtaa

SEQ ID NO: 73780 - DNA, 450 bp, Citrobacter koseri
atgtctaaatcagtacagagtaacagtgcggtgctggtgcacttcaccttaaagcttgacgatggctctaccgctgagtcaacgcgtaacaatggtaagccagcgctattccgcctgggtgacggctccctgtccgaagggctggagcagcatcttctgggactgaaagacggcgacaaaaccacgttttctctggagccggatgccgcgtttggcgtaccgagcccggacctggttcaatacttctctcgccgcgagtttatggacgcgggcgagcctgaagtgggggcaattatgctctttaccgcaatggacggcagtgagatgcctggcgtgatccgcgaaattaacggtgactcgattaccgtcgatttcaaccatccgctggccgggcataccgttcattttgatattgaagtgctggaaatcgatccggcactggaggcgtaa

SEQ ID NO: 73781 - DNA, 951 bp, Citrobacter koseri
atgcagatcctgttggccaacccgcgcggcttttgcgcaggtgtagaccgcgctatcagcattgtagaaaacgcgctggctatttacggcgcgccaatttatgtccgtcacgaagtggtgcacaaccgctacgtggtggatagcctgcgtgagcgcggggcgattttcatcgagcagatcagtgaagtgccggacggcgcgatcctgattttctccgcacacggggtttcccaggcggtacgtaacgaggcgaaaagccgcgatctcaccgtttttgacgccacctgtccgctggtaacaaaagtgcatatggaagtggcgcgcgccagtcgtcgcggcgaagagtcaatcctgatcggccatgccgggcacccggaagtggaagggacgatggggcagtacagcaacccggaagggggcatgtatctggtcgagtcgccggacgacgttctgtcgcttgatgtcaaaaacgaaggcaaactctcctttatgacccagacgacgctctccgtcgatgacacgtctgatgtgattgacgcgctgcgtcaacgcttcccgaaaattgtcgggccgcgtaaagatgacatttgctacgccacgacgaaccgccaggaagcggtgcgcgcgctggcggaacaggctgatgttgtgctggtggttggttcgaaaaactcctccaactccaaccgtctggctgaactggcgcagcgtatggggaaagcggcgtttctgatcgacgatgccaccgacatccaggaagcctgggtgaaagaggcgaagtgcgttggcgtgaccgctggcgcttccgcaccggatattctggtgcagaatgtgatcgctcgcctgcaagagcttggcggcggcgaagccattccgctggaaggccgcgaagagaacattgttttcgaagtgccgaaagaactgcgtgtggatgttcgtgaagtagagtaa

SEQ ID NO: 73782 - DNA, 693 bp, Citrobacter koseri
atgcaacctgaacttatcgatgtcctgatcgttgaggacgagaacgaactggcgcagctgcacgctgaactgatcgacaaacatccgagactccgactggcaggcattgcctccacgcttgccgatgcccggcaaaaactcaaccagctgcggcctcagctactgctgctggacaactatctaccggatggtaagggtattacgctcatcagcgatccgttagtcatgaacacgaattgctcagtgatctttattactgccgccagtgatatggatacctgtagcctggcgattcgcaacggcgcgtttgactatattctgaagccaatctcgtggaaacggctcagccagtcgctggaacgttttgtccagtttgccgagcagcaacgggtatggaaaattgtcgatcagcaaaacgtcgattcactctacctgttacaggcgaagaattaccgtcaggagaatggcagtaaggggattgaagaaatcacgctggcgctggtgcagaagctttttacagaaaacagcacgcgcagcttctccgttgacgacgtggttgccggaacggggttaagtaaaaccacggcgcgccgctatgttgaacacggtgtcgagacggggtttcttcgcgtcgagatgctgtatggcaagccaggacatccgcgcaggatgtatcgcctgagcgaaacctaa

SEQ ID NO: 73783 - DNA, 1638 bp, Citrobacter koseri
atgaaagtttcatttcagatcaaactgtttatatcgctgattgcttttttctccatattatttgccttactgggtggatactattatatgcacgtagaaaaacagctttatcaggagatgggagccagggcgaaaatacaggcggaagagattgcgcttattccgaatttgcgaaaagaagtcgtggaaagagataccacggcgattcatcaatttatgcaaaaaatagccgcgcatagcgacgccagttttattgttatcggagataaagaaggcatccatctgtttcattcggtttatgccgacagagtaggaaaaaagctggttggcgacgataacactgaagtgcttcacggaaagagcaccacgacaattcgccgtggcggcctgggcatctccctgcgcagtaaagcgcccattgttgacgatcagggcgaggttattggtatcgtctccgttggatacctcaccagttacctcaacaccattacggtgaataaagccgtcagtatcctggttgccgccatcctgctgctgatatccctttttgtcttttcctggttcttcacccgtagtattaaaaaacagattttttcactggagccgcgagagataggcctgctggttcgtcagcaaaaagcgatgatggaatcgatttatgaaggggtaatcgccattgataataatttgcacattgaggtgatcaatcaggctgcccgcgagctgctgggtttaggccagcctgcgcaggcgatacgcggtcaacacattaccgaagtgattacgccatcccccttcttccttaaagaagtgatgctgaagaatgacactcatgatgaaatctgccgtttcaatgaattgacggttatcgccagccgggtacgcatcatgctggagaactcgcttcagggatgggtgataaccttccgcgatcgcaatgaaatagacagtttgagcgctcagctaagccaggtaaaacgttacgtagataatttgcgcatcatgcgccacgagcagctcaattgcatgacgaccctttctggtttactgcatatgggtcgttacaatgaagccattgattatattcaggctcagtcggaacatgcccaggagctgctggactttatctcatcgcgcttcagttcaccgacgttgtgcggcctgctgttaggtaaagcggcaagagcgggtgaaaaaggggtggaactgaatttcgatcccagttgccggatggataggccttttccgccacttgcggaatcagaactgatttcgatcctgggcaatttactcgataacgcgatcgaagcaacgcagcgatcgccattaccgcatgcgccagtggacgtgctgatcagactcaacgagcatgagctgattatcgaagtggccgatcagggagtcggtattaaaccggagattcgcgagcatattttcgaacgtggcgtcaccacgaaaacccggggcgatcatggcattggattgtatctgattgaaagttatgtcactcaggcgggaggggtgatagaagtcgctgataattcgccgcgcggcgccatatttacgttgtttattcccgctacgggaatttcccgcagtcccgtacaggaactggaaggtaccgattatgcaacctga

SEQ ID NO: 73784 - DNA, 1368 bp, Citrobacter koseri
atgagcacgactgatgattctttctctgttactcatgaaccgttaaacattcagcgtttgtcacttaaagaacgctggtggcacattatggatacatggaaaatcggtattattccattaccgatgtttttgttggccggcgcattaatcgcgattgattgcctgggcgggaagctgccgagcgatattgtcgtgatggtcgccacgctggctttttttggctttgcctgcggagagtttggaaagcgtttgcccatcgtcggcaaactgggggccgccgcaatttgcgcgacctttattccttccgcgttagtttactatggcctgctgccggatgtggtggtggagtcgacgaccaaattctataaatctaccaacatcctgtatctctatatctgctgcattatcgtcggcagtattatgagtatgaatcgcaccgtgctgattcagggtttcctgcgtattttcttcccaatgttatgcggtgaaatcgtcggcatggttgttggtatgggcgtcggcctggcgcttggcctcgaaccctttcagattttcttctttattattttgcccatcatggccggcggcgttggcgaaggcgccattccgctttcaatcggctatgcgaccctgttacacatggatcaaggggtggcgctcggtcgtatcttaccgatggtaatgctgggcagtctgaccgccattatcatctccggctgcctgaaccaactgggcaagcgcttcccgcatctgaccggcgaaggtcaattgatgccaaaccgtgcgaatgccgatgaacaatcgccgtcactggcggaaggcgtctctggcaaaacggatgtgaccacgattgccgcaggcgcgctgctggcgatactgctctatatgctggggatgttagggcacaagctgattggcttgcccgcaccggttggcatgttgtttgtggctgtgctggtcaagttagttaacggcgtatcgccccgcgttcttgaaggctcgcaggtggtgtacaaattcttccagacttcggtgacttaccccattctgttcgcggttggcgtagccattacgccgtgggaggaactggtgaacgccttcaccctgaccaatcttctggtcattatcagtaccgttgctgcgctggtcgcgacaggattctttgtcggtaaaaaaatcggtatgcatcctattgatgtcgccattgtctcctgctgtcagagtgggcaaggcggtacgggcgacgtagcgattttaaccgcaggcaaccgcatgagcctgatgccgttcgcacaaattgcgacgcgtatcggcggggcgataaatgtttccatttcgctgctggtgctgggtaactttcttatttaa

SEQ ID NO: 73785 - DNA, 864 bp, Citrobacter koseri
atgaaactcgcaagctttctttatcagggcactcgcagctatggcatcgttactgccggaggcgttattgatttggggaaccgcatcggcgatcagtatcgggacctgaaggcgctattgcagggggatggtctggagcaggcgcggcgcttcgcgcaggcgccggtcgatctaaaaatggatgcaatcacctttttaccggtaatagagcgaccggaaaaaatactctgtgtcggcatgaactacgccgaaaagcgccaggagttcgatcagcatgaccccgcgccgacgctgtttgttcgttttgcggattcgcaaaccgggcacaacatgccggtactcaagccacgccattcgcatgagtttgattacgagggggagctggcggtgatcatcggtaacggtggcgagaatatctcccgcgaccatgcgcttgaccatgtcgccggatacagctgctatatggatggctccgcacgcgactggcagcacagctggtttactgcggggaaaaactggcggcagaccggcgcttttggcccgtggatggttactgccgatgaaattcccgacccgcatcagctggcgatccgcacctggctcaacggccgcatggtacaggaagataacaccagcagtatgatccataaagttgctgaattaattgagtatataagcactttcacccgtcttaattccggtgacgtcatcattacgggctcgccgggcggcgtagggaaaaagaggaatccgccgttattcatgcaggaaggcgatcgtattgaggtggagattgagcacattggccatctgagtaatgtcatcatggaagccccgctacaggcctttgcggcggcgcattaa

SEQ ID NO: 73786 - DNA, 915 bp, Citrobacter koseri
atgcgcctgcccattattctggataccgatccgggtatcgacgatgccgccgccatcgccgccgccctgtttgccccgcagcttgacctgcaactgatgaccaccgtcgcggggaatgtctccgtagagaaaaccacccgcaacgcgctgcaactgctgcatttctggaacatggatatcccgctggcgcagggggccgccacgccgctgctgcgcccgttgcgcgatgctgcttacgtccacggcgagtcgggcatggaaggctatgactttgtcgcccatgattgccagccattggcaaaaccggcctttatcgccattcgggatgccctgatgagcgccacggaacccgtcacgctggtcgcgatcggcccgttgaccaatattgcgctgctgctgactcactacccggaatgcgcttttaacattcgtcgtctggtgatcatgggcggctctgcggggcggggaaactttacgccgaacgccgaattcaatattgccgtcgacccggaagctgcttcccgcgtttttcagagtgggatagagatagtgatgtgcgggctggacgtgaccaaccaggccctgctggcgccggattatctggcaaaactgcccgaacttaaccggacgggaaaaatgctgcatgcgttgtttagccactaccgcagcggcagcatgaacaccgggctgcgtatgcacgatctctgcgccatcgcctggctggttcgcccggatctgttcaccgttaaaccctgttttgtcgcggtagagacgcagggggaatacaccgcaggcacaacggttgttgatattgaaggtcgactggggaaaagccctaacgtgcaggtggcgctggagatagatgtggctggcttccagcagtgggtcgccgacgtgctggcgctggcgccctga

SEQ ID NO: 73787 - DNA, 564 bp, Citrobacter koseri
atgaatctttcctttatccagccaccacaggtggagtgggcgagcggcgttttagccgatggcccattattgcgtaaatcaacacgaattcaggatctcgccggtgtttttgccgatgagcccgcccgtcagcaactggcgggtgagcgggtcgtgtatgacgttgagatgcttgatacttcacccgccgaaggcgaactctataccggcgtcacgcatctgtatccggggcgcgtgggacgagagtattttatgacccggggccatttccacgcgcgtcgcgagcagggggaagtctatttcggcctgcgcggtaatgggctgctgcttctgcaaactgagcagggtgaggcgcggcttgaaaacatttttgcgggctctatccatatcatccccggctttactgcacaccggttaatcaatacggggagtgatgtactttctgcgcttgccgtgtggcctggggttgcggggcatgattatatggcgctggcgagcggcttcaaactcagactctttgaggaaaaccagacgattcaggtgaaagaggtgcagaatggttga

SEQ ID NO: 73788 - DNA, 783 bp, Citrobacter koseri
atggttgatgatactcatctctacggtctggatatgacagttcatcatcatccactgggttttagctatggggacgatgttaccgggccaatgccagaaattcgccgactcgagcaaattcgtgcttcgctgcgcgatccgcagtgtgaagggccggaagaggtatacgccatcgcgatggacgttgcgcggatgcaggatcgtgatgagttggaaaagcgtatgctgctgtttggcgtggtgacttatgcggccggtcggctgggtgaagaaccgatccgtagtcaggggcatattcatcgcatcagtcagcatagcggctggtctccgccggaactttatgagatctggcagggaaaagcgattatttacatgcaggagtatgtcgaggacgatcccggtcgctgttttgcggtgattgccgggcccggcgagaaagtgctggtgccgcccggctgggggcatgcaacggtatctgccgatccagatgaacccttaacgttcggagcgtggtgcgatcgtgaatatggtttcgagtatgaggctgtacgggcgcataaagggctggcatggtacccgttattgcaggataagaatgttatctggcagcacaatccgcgctatattcccgggagattacaggctgttactccccggcaatataccgaattcgcgataacttccgcccccatctatcagcagtttattgaagatcctggacgttttcagtttatctcccgtccagataagaccgcagagttgtggcaaaactttcatccataa

SEQ ID NO: 73789 - DNA, 819 bp, Citrobacter koseri
atggaagaacgtacacttacccgtaaagacctacgccgctgctggcgtgcatggatgatgcataacctgtcatcaatgagctttgaacgtctggagtcattcggcttctgcctgagcatgctcccggtcgccaaaaagctctatcccgacgccgcacagcgcactgaaatgctgcgtcgtcatgcgtcgttctataatactgaaccccagataggcgccatcgtgaacggtatggcgttggggctggaagagaaaaaggcaaacggcgaaccgatcgacggagagacgatcaacaccctgaaagtgggtctgatgggacctattgccgggattggtgattcgatgatcccaggaatgcttatccctattctgctcagcatcggtatggccctggcggctggcggtaatattctcgggccgctgttttataccgttgcatggcttgccatcatcattcccggttcatggtttctgttcctgaaaggctacaagatgggctccggctcggtggaaatgctggtgagcagtaaatctgcccgcctgcgcgaagccctgtcgctgctgggggtgtttgtgatgggcggtgtcgcagcaagctacgttaagctgggaaccgggctggagtttattaccaaagatggggtgaatattcacgttcagcagatgctggatggtatcttcccgcaattgttgccgctggccgttgtgctgggtacctggtacatcatggcaaaacgcggcgtttcaccggtaaaagcgatggtcctgcttctgatactggccgcgcttggggtcgctacgggcctgtttgcaggttaa

SEQ ID NO: 73790 - DNA, 795 bp, Citrobacter koseri
atgattatcgaagctacgctgattggcattctttgctatctcggcgccctcagtagcccctggctactggggctgaccggcggttggtatctgataacccgaccactggtttctggaatgctggtcgggattatcttaggcgacctgaaaaccgggatcatgattggggtcgcggtgcaggcggtatatatcgcgatggtcacccccggcggctcaatgcctgccgatctcaactttgtcgcttacccggcaatcgcgctgggtatcctctcaggaaaaggcccggaggtggcggtggctctggcagcgaccatcggtatcgctggaaccattttgtttaatgccatgatggtgctgaactccttctggaaccaccgggccgacgtcgcgttagatcgcggcgacgaacgtggtatttatctcaacagcgccatctggccacaggccaccaacttcattcttcgtttcgtgccaacgttcattgccgtctattttggcgcgcagtacatcagcggctttatggacagcctgccgaaagttgtactgtcgacgatgaacgtactgggcggcattttacccgccgtcgggatcgcaattttgctcaagcagatcatcaaaaactacaccatgttgatctactttctcgtcggtttcgtctgcatcgtctttttaaagctcaacatggtcgcgctggtgatcgtcggttcactgttggcgttgatccactacaactataagccggaaccaccgcaggctgtgaaggcggtcgccgatgatgatgaggacgaattctga

SEQ ID NO: 73791 - DNA, 495 bp, Citrobacter koseri
atgagtatttcttttgtacgtatcgatgaccgcgttattcatgggcagctcgtgacacgatgggccaaagagctgccctgtgacggaattgtcgccattgatgatgccgtcgcggccgatcctttgctctcatcggtgatgaaaggcgccgttcaggacaccaaagtctggttgtttgatacggcaacggcgattgaaaaactgccaaaagtcattgccagcgagaaacgttattttgttattggcaaatcgcccgtcacgctgaaacgcattgaagaagcgggcatcagtctgacaaacgccaacggcaagattaacgtgggcccaatgagcgcccgtgctgataccacgacaattggtcctaatcagtcagtcaatgcggatgaaatcgccgcctttgactggctaacgcagcacgggcatctggtcgaatttcgcctggtgccggatgccagttgttacagctggcaggatgcacgccagaagctgaaataa

SEQ ID NO: 73792 - DNA, 429 bp, Citrobacter koseri
atgattaatgttattgtcgccacccacggccctctggcagaagcgttcctcgccagtggtcgaatggtttacggagacttaccgcatgtttactccgttacgctgaacgaacaagcgggtatcgaaggctttaaagataacttttcccaggtactcgcgaatgcagggcaaaacgctgatggcgtactggtgttatgtgatatgcaaagcggtacgccgtggaacgttgcctgccaacatgctttttcgccacagacggctcctcctgtcgccgtcgtcgcgggcgtaaatttccccatgctgctgcaaagcgaagaaatttgccatttaacggatgttcacgccgcagccgtggagctgctggcattaaccgtccccacactgattaaagccgccccggttttatccgttcagtcagatgatttttaa

SEQ ID NO: 73793 - DNA, 1746 bp, Citrobacter koseri
atgcgtacaacctataataaatttcctgaagtaaaggttcagggttatgacaaccaggcctggcaaggctgggagtcaatccattctgtgcttaacaccagggtttctgaatcatctaaaactgttctggttgtggactgttatccgggcgtgcggcttgaagagctcgaacagcagcttttcacggcgtttaacagcgcgctcgtactgaatatcgagtccgcccgccgcgatgaacaggcgttgcatgatctactggcacgcaacctgaccgacgatcgcgtatttggcgtgctttcctgccaccatcttgatgagttttttaatgccgataaactcaaccaactccgtcaacaaattgatgcggttaccgaaggcctcgtcatcgtttatggttcgggggccgcgctggcacaccctggcgacgtgctaatttatgccgatctcccgcgttgggagatccaacaacgtatgcgtcatgacgggctcggtaactggggcgcggaaaaccaggatgaggatattctgcgtcgttacaaacgcgcctttttcatcgaatggcgggtatttgacagacataaaacgccgctgctcaagcgcgccgattatttgctcgataccacagaagaaaatgccccggcaatggtcagcggcgaagcgctacgcgccgggttgcaacaaaccaccacccaaccgtttcgtgtcgcccctttctttgatcctggcgtctggggcggccaatggatgaaacaacacttcgatctcgatccctcagcccccaattacgcgtggtgttttgattgcgtgcccgaggaaaacagcctgttactgcgttttggcaacgtgcggatcgagatcccctctcaggatctggtgctcatttatccccgggcgctacttggcgagaaagttcatgcccgcttcggcgcagaatttccgatccgttttgacttcctcgacactatcggcggtcagaatttgagttttcaagtccatcctgtgaccgaatacatccagcagcaattcggtatgcactatacccaggatgaaagttattacattctcgaagccgaaccggaagcggtggtttatctgggcaccaaaaccgggatcgaacctcaggatatgctggactgcctccgggcagcaggtcgcggagaaaaaacgtttgatgacgagcgcttcgttaatcagataaccgcacataaacacgatcacttcctcatccccgcaggaaccgtacactgctcaggcgcgggaacaatggttctggagatcagtgcgacgccctacatcttcacctttaaactatgggactggggacgcttaggtttagatggattgccgcgtccggtccatctggatcatggtcagcaagtcatcgactggcagcgtgatacacaatgggtttatgacaacctggtaaaccgtattgagcccatcgcagagggtgaaggctggcgggaggaaagaaccggtatgcatgagagagaatttatcgaaactcgtcgccactggtttaccgcgccggtcacgcaccatactcatggcggcgttaacgtgctgaacctggtcgaaggcgcggaagcggtcgtcgacagcccgagcggcgccttttccccctttatcgtccactatgctgagacctttatcattcctgctgccgtcggcgaataccgcatttctccctcgggcgaaagcgttggacagcagctcgccaccatcaaagcctgggtaagaggataa

SEQ ID NO: 73794 - DNA, 1008 bp, Citrobacter koseri
atgaccacagtcacgctggcgcaggtagcagaacgcgcaggggtctccacggcgaccgtttcaatggtgctgcgaaatcgtggacgaatttcacaggctactcgcgatcgcgtactaaaagcgctggatgatactggctatgtctacaatcagaccgccgctaacttgcgtaaccgtagcagcaatcaggttggattgttgttgcacgatatcaccaacccgttttacggcgagatgaccgcaggactcagtcatgaaatggaacgccatgatctgctcttatttcttgccaacagtgaggagtcgggtgagcgacagcaaaaatttgtcgattcgctgatgcgtaacaacgcttgcgggatggtgttatgcgcagcacgggaaacgccggcatccttttttgaagcgctgaaaagacgcaatattcccgccatcatggttgtccgtccgctgaatgacccggactttgattttgtgggcacagataactttctcggtacgcaaatggccacgactcacttgttgaaaatgggacatacgaatattgcttttatcggggggagtccaagttctgggagtcgggcgcagcgtattggcgggttcaccagcacgttgctggagcaggggatatcgccgaatcctgaatggattgttgcgacccaggccagccagattgacggtgccagagtcgctgagtctttgctaatgcgtcatccacaaattactgccgcagtgtgttaccaggatattgtggcgttaggggtgatgcaggcgctacgtaaaatggggcgcgaacctgggcgtgattttgcccttgttggttttgatgatattactgaagccgcgttggttcagcctgcgctcactaccgtttcggttgcggcgaaagagatcggtcgtaaggctggagaactgctttacagccgaatccaggggaatgatgagccgccgaagcgtatcattctgccacctgcgctggtggtcagagagtcatgcggtttttgctga

SEQ ID NO: 73795 - DNA, 822 bp, Citrobacter koseri
atgcatgatgcacaaatccgcgttgccatcgcgggagccgggggacgcatgggacgtcagctgattcaggccgccctggggatggacggcgttcaactcggcgcggcgctggagcgggaaggttcttcattactgggcagcgatgccggtgaattagcaggcgcagggaaaacgggcgtcaccgtgcaaagtagcctcgaagcggtaaaagatgattttgacatctttatcgatttcactcgcccggaagggacgctggcgcacctggcgttttgccgtcagcacggtaaaggcatcgtcattggcacgacgggatttgatgacgcgggcaagcaggccattcgcgatgccgcgcaggatatcggcattgtgttcgccgccaactttagcgtcggtgttaacgtcatgctgaagctacttgagaaagcggcgaaagtgatgggcgactataccgatattgaaattatcgaagcgcaccatcgccataaagtggatgcgccgtcaggcaccgcgctggcgatgggggaagcgatcgcccacgcgctggacaaagatctgaaagcgtgtgcggtatacagtcgtgaaggttataccggcgaacgcgtgccgggcaccatcggttttgcgacggttcgtgctggcgacattgtgggtgaacataccgcgatgtttgctgatatcggtgaacgtattgaaatcacgcataaggcctccagccgtatgacgtttgcgaatggcgcggtcagatcggctatctggctaaaatcaaagccaaatggtctttttgatatgcgagatgtgctggatttaaacaatttatag

SEQ ID NO: 73796 - DNA, 1149 bp, Citrobacter koseri
ttgattaagtcagcgctattggttctggaagacggaacccagtttcacggtcgggccataggggcaacaggttcggcggttggggaagtcgttttcaatacttcaatgaccggttatcaagaaatcctcactgatccttcctattcccgccaaattgtcactcttacttatcctcatatcggtaatgtcggcaccaatgaagccgatgaagaatcctctcaggttcatgcgcaaggtctggtcattcgcgatctgccgctgattgccagcaacttccgcaatactgaagacctctcttcttacctgaaacgccataacatcgtggctattgccgatattgatacccgtaagctgacgcgcctgctgcgtgagaagggcgcacagaacggctgcattatcgcgggtgataacccggatgcggcactggcgctggagaaagcgaaagccttcccgggcctcaacggaatggatctggcgaaagaagtgaccaccgctgaatcctatagctggacgcagggaagctggacgcttgcagacgacctgccggaagccaaatcagaaactgacctgccgttccacgttgtggcttacgactacggcgcgaaacgcaacatcctgcgtatgctggtagacagaggctgccgcctgacggtggttccggcgaagacctccgccgaagaggtgctgaagatgaacccggacggtatcttcctctctaacggccctggcgatccggcgccgtgcgattacgctatcgaggcgattcaggcattcctcgaaaccgatattccggttttcggcatctgcctcggccatcaactgctggcgctggcgagcggcgcgaaaaccatcaagatgaagttcggccaccacggcggtaaccatccggtaaaagatatcgataacaataccgtgatgattacggcgcagaaccacggttttgcggtggatgaggcttctatgcctgcaaatctgcgagtgacgcacaaatcgctgttcgacggcactctgcaagggattcatcgcaccgataaaccggcgttcagcttccagggacaccctgaggcgagccctggcccgcatgatgccgcgccattgttcgaccactttatcgagttaattgagcagtaccgtcagtccgcgaaataa

SEQ ID NO: 73797 - DNA, 3225 bp, Citrobacter koseri
atgccaaaacgtacagacataaaaagtatcctgattctgggtgcgggcccgattgttatcggccaggcgtgtgagtttgactactctggcgcccaggcgtgtaaagcgctgcgcgaagaaggttatcgcgtcatcctggtgaactctaaccccgcgaccatcatgaccgacccggaaatggccgatgcgacctacatcgagccgattcactgggaagtggtgcgtaaaattattgagaaagagcgcccggatgcggtgctgccgacgatgggcggccagacggcgctgaactgcgcgctggagctggagcgtcagggcgtgctggctgagttcggcgtgaccatgattggcgccactgccgatgcgattgataaagccgaagaccgccgccgtttcgacgtggcgatgaagaaaatcggcctcgacactgcccgctccggtattgcgcatacgatggaagaggcgctggcggttgccgctgacgtcggttatccgtgcattatccgtccatcctttacgatgggcggcaccggcggtggtattgcctacaaccgcgaagagttcgaagaaatttgcgcgcgcggtctggatctctccccaaccaacgaactgctgattgatgagtcgctgattggctggaaagagtacgaaatggaagtggtgcgtgataagaacgacaactgcattatcgtctgctccattgagaactttgacgcgatgggcattcacaccggtgactccatcacggtggctccggcgcaaacgctgacggacaaagagtaccaaatcatgcgtaacgcctcgatggcggtactgcgtgaaatcggcgtggaaaccggcggttccaacgttcagtttgcggtgaacccgaaaaacggtcgtctgattgttatcgaaatgaacccgcgcgtctcccgctcctcggcgctggcgtcaaaagccaccggcttcccgattgccaaagtggcggcgaaactggcggtgggttacaccctcgacgaactgatgaacgacatcaccggtggccgtaccccggcatcgttcgaaccgtccatcgactacgttgtcaccaaaattcctcgcttcaactttgaaaaattcgcgggcagcaacgaccgtctcaccacccagatgaaatccgtcggcgaagtgatggcgattggccgcactcagcaggaatccttacagaaagcgctgcgcggtctggaagtgggcgccgccggttttgacccgaaagtcagcctggatgacccggaagcgctgaccaaaattcgtcgcgagctgaaagatgcgggcgccgagcgtatctggtacatcgctgatgcgttccgcgcggggctgtctgtcgatggcgtctttaacctgaccaacatcgaccgctggttcctggtgcagattgaggaactggttcgtctggaagagaaagtggcagagcttggcatcaccggtctcgacgctgacttcctgcggatgctgaagcgcaaaggcttcgccgatgcgcgtctggctaaactggcgggcgtgcgcgaagcggaagtgcgcaaactgcgtgaccagttcaacctgcacccggtttacaagcgcgtggacacctgtgcggcggaatttgctaccgacaccgcctacatgtactccacttatgaagatgagtgcgaagcgaatccgaaccaggaccgcgacaaaatcatggtgctcggcggcggcccgaaccgtatcggccaggggattgaatttgactactgctgcgtacacgcttcgctggcgctgcgcgaagacggttacgagaccattatggtcaactgtaacccggaaacggtctccaccgactacgacacctccgaccgcctgtacttcgagccggtcacgctggaagatgtgctggaaatcgtgcgcgtcgagaaaccgaaaggcgtcatcgtacagtacggcggccagactcctctgaaactggcgcgcgcgctggaagcggcaggcgtgccggttatcggcaccagcccggatgcgattgaccgcgcggaagaccgtgagcgcttccagcaggcggttgaccgtctgaaactgaaacagcctgctaacgccaccgtgacggcgattgaacaggccgttgagaaggcaaaagagattggctatccgctggtggttcgcccatcctacgtgctgggtggccgcgcgatggaaatcgtttacgacgaagctgacctgcgtcgttacttccagaccgcagtcagcgtctctaacgatgcgccggtactgctggaccgcttccttgatgacgcggtggaagtggatgtggatgctatctgcgacggcgaaatggtgctgattggcggcatcatggagcacatcgaacaggcgggtgtgcactccggtgactccgcatgttctctgccggcctacacgttaagcaaagagattcaggacgtgatgcgccagcaggtgcagaaactggcctttgagttgcaggtgcgtggtctgatgaacgtgcagttcgcggtgaaagacaacgaagtctacctgattgaagtgaacccgcgtgcggcgcgtaccgtaccgtttgtctctaaagcgaccggcttaccgctggcgaaagtggcggcgcgcgtgatggcaggaaaatcgctgaccgagcagggcgtgacgaaagaaatcatcccgccgtactactcggtgaaagaagtggtgctgccgttcaacaaattcccgggcgttgacccgctgttagggccagaaatgcgctctaccggggaagtgatgggcgtcggccgcaccttcgctgaagcgttcgccaaagcgcagcttggcagcagctcgacgatgaagaaatcgggccgtgcgctgctctccgttcgtgaaggcgacaaagaacgtgtggtggacctggcggcgaagctgctgaaacagggcttcgaactggatgcgactcacggtacggcgattgtgctgggtgaggcgggtatcaacccgcgtctggtcaacaaggtgcacgaaggtcgtccgcacattcaggaccgtatcaagaatggcgaatacacctacatcatcaacaccaccgcaggtcgtcaggcgattgaggactctaaactgattcgccgcagcgcgttgcagtataaagtgcattacgacacgaccctgaacggcggcttcgccacgacgatggcgctgaacgccgatgcgactgaaaaggtgatctccgtacaggaaatgcacgcgcaaattacgaagtaa

SEQ ID NO: 73798 - DNA, 339 bp, Citrobacter koseri
atggcagaaaaccggtgggtgagcgccaaagagatcgcgaagcaatttaatatggattattgcaaagcgattaatacggtttcgtatattctttctgaagtgggggaaatagagtgcgagaccaggacgatccctaatcagctggaagggcgaggatgccagtgccagcgcctggtgcgtattaagcgtattgacgcgcagctctatgcacgtttgggtcatagtgcgcaggagaagatggtaaaagcggagagaaccccgcgaatgccggttccgcccgcagagctaaaccgcgagcagaaatggcagatgatgctatcaaaaagtatgcgtcggtaa

SEQ ID NO: 73799 - DNA, 594 bp, Citrobacter koseri
atgagctattacgcctttgaaggcctgattccggtagtacatccagaggcgtacgtgcatcccagcgccgtgttgattggcgatgtcatcgtcggcgccggcgtctacatcggcccgcttgcatcgctgcgcggcgactatgggcgtctgattcttgaggcgggcgctaaccttcaggatagctgcatcatgcacggttattgcgataccgacaccatcgtgcatgaaaacgggcatatcgggcacggcgcaatccttcacggctgcgtgattggtcgtgatgcgttagtgggcatgaacagcgtaatcatggatggcgcaatcatcggcgaagagagtatcgtcgccgccatgagttttgtaaaagcgggttttgtcggcacgcccaggcagctgctggttggcgcgcctgcacgcgtcaaacgtgatgtcacgaatgaagagctgcactggaaacggctcaacacgcaggaatatcaggatctcgcggtacgctgtcgggcatcgctatgtgaaacgcaacccttaacccaggtcgaaaagaaccggccgcgcctgaaaggcacgacggaggtgaagccaaaatcggcgtag

SEQ ID NO: 73800 - DNA, 786 bp, Citrobacter koseri
atgagtgaatcattacattttacccgtcacggcccgattctggaaattacgctggatcgcccgaaagcgaatgcaatagacgcaaaaaccagttttgagatgggcgaagtttttctcaatttccgtgacgatcccgaattgcgtgtggcgatcatcaccggtggcggcgaaaaattcttctccgcaggctgggatttaaaagcggcggccgaaggcgaagccccggacgccgattttggccccggcgggtttgccggtttaaccgagatctttgacctggataaaccggtgattgccgccgttaacggctatgccttcggcggcgggttcgaactggcgctggcggcggattttatcgtctgcgccgataacgccagtttcgcgctgcctgaagcaaagctcggcattgtgcctgacagcggcggcgtgctgcgcctgcctaagctactaccgcctgctgtcgtcaacgaaatgctgatgaccggcagacgaatggacgcagaagaagccttgcgctggggaattgtgaaccgggttgtcagccagcaagcgttaatggacagcgcccgtgaactggcgcaacagctggtgaacagcgcgccgttggcgatcgccgccctcaaagagatctaccgcgcaaccagcgaaatgccggtggaagaaggctatcgctacattcgcagcggcgcattgaagcattacccgtcggtactgcactctgaagatgcgctcgaaggcccgcaggcgtttgccgaaaaacgcgatccggtctggaaaggccgctag

SEQ ID NO: 73801 - DNA, 1554 bp, Citrobacter koseri
atggatatcgttggcggacaaaacttacgtcagatgtgggacgacctggccgaggtatacggaaataaaacggcgcttatttttgaatccagcgaaggcgttgtccggcaattcagctacgcgtcgctgaatgaagagatcaaccgcacggcgaaccttttcctcgcctcaggcattcagaaaggcgataacgtcgcgctgcatctggataactgcccggagttctttttctgctggtttggtctggccaaaattggcgccatcatggtgccgatcaatgccaggctcctgcgcgaagagagcgcctggattttacaaaacagccgcgcgcagctcatcgtcaccagcgctgaattttatccgatgtatcgccagatactgcttgaggacgataccctgctcaatcatatctgtctgattggcgaaaatgcgcccgttgaagataacgttagccatttttctcaactgaaagaccagcagcctgccacattgtgctatgcgccgccgttatccactgacgacacggcggagattctgtttacttctggcaccacctcgcggccaaaaggcgtggtcattacccattacaacctgcgttttgcgggttactactcctcctggcagtgtgcgctgcgtgaagatgacgtctatctgacggtgatgcccgcctttcatattgactgtcagtgtactgcggcaatggcggcattctccgcaggcagcacctttgtgctgatcgaaaaatacagcgcccgcgcgttctggggacaggtacgaaagtatcgcgccaccgtcacggaatgtattccgatgatgatcaggacgctgatggtgcagcccgcctccccggaagagaggcagcattgtctgcgcgaagtgatgttctatctcaacctttccgtgcaggaaaaagacgcttttattgcacgtttcagcgtccgactgctgacctcttacgggatgacggaaaccattgtcggcattataggcgatcgtcccggcgataaacggcgctggccatctattggtcgccctgggttttgctatgaggcggacatccgcgatgagcagaaccgctcgctgcccgccggagaaatcggtgaaatctgtattaaaggcgtgccgggaaaaaccctctttaaagagtattacgccaggccggaagccaccgccaaagcgctggaagccaacggctggctgcatactggtgattccggctatcgggatgaggagggatttttctatttcgtcgacaggcgttgcaacatgattaagcgcggcggcgaaaatgtctcctgcgtcgaactggaaaacattatttcggctcatcccaaaattcaggacatcgtcgttattggtattcacgattcgatccgcgatgaagccattaaagcctttgtggtgcttaatgaaggtgaaacattaacggaagaggagtttttcgctttctgtgaacagaatatggcgaaattcaaagtcccctcttttcttgagataagaaatgatctgccccgaaactgttcaggaaaaataattaaaaagaacctgaaataa

SEQ ID NO: 73802 - DNA, 1218 bp, Citrobacter koseri
atgaaccgtttaccgatgcccactttcgggccgctcgccggattgcgggtcgtgttctccgggattgaaatcgccgggccgttcgccggacaaatgttcgcagagtggggagcggaagtgatctggattgaaaacgtcgcctgggccgataccattcgcgtccagccgaactatccgcagctttcacgccgaaacttgcatgccctctcccttaacatcttcaaagatgaaggtcgggaagcgtttctgaaactcatggaaaccactgacatcttcatcgaagccagcaaaggcccggcgtttgcccgtcgcggaattaccgatgacgtgctgtgggaacacaaccccaaactggtgatcgcccacctttccggtttcggccagtacggcacggaggagtacaccaacctcccggcttacaacaccatcgcccaggcctttagcggctacctgattcagaacggcgatgtcgatcaacccatgcccgcgttcccgtatacggcggactatttttccgggatgaccgccaccaccgccgcgctggcggctttgcacagagtgcgtgaaaccggcaaaggcgaaagcattgatgtggcgatgtatgaagtgatgctgcgcatgggtcagtacttcatgatggattacttcaacggcggcgaaatttgcccgcgcatgaccaaaggcaaagacccctactacgccggatgcgggctgtataaatgcgcagacggttacatcgtgatggagctggtcggcattacgcagatcaacgagtgctttaaggatatcggcctggcgcacattctgggtacgccagaggtgccggaaggcacccagcttatccatcgcgttgagtgcccttacgggccgttagtcgaggaaaaactggatgcgtggctggtgacccgttccatcgccgacgtgcaggcgcgtttcgccgagctgaatatcgcctgcgcgaaagtgctgaccattccagaactggaaaacaacccgcagtacgtcgcccgcgaatccattaccgagtggcacacgatggatggccgcacctgtaaagggccaaacatcatgccgaaattcaaaaacaacccagggaaaatctggcgtggcatgccgtcgcatggcatggacaccgccgccattctaaaaaacatcggttacaacgaagcagatatacaggaactggtcagcaagggtctggccaaagttgaggattaa

SEQ ID NO: 73803 - DNA, 1143 bp, Citrobacter koseri
atggattttaatttgaatgacgagcaggaactgcttgtcgccggtattcgtgaactgatggccagtgagaactgggaagcctactttgccgagtgcgatcgcgacagcgtctacccggaacgttttgtgaaagcgctggcggatatgggcatcgacagcctgttgatcccggaagaacacggcgggctggaagccggtttcgtcaccgttgccgccgtatggatggaactggggcgtctgggcgcgcccacttacgtgttgtaccaattgccaggaggttttaacactttcctgcgtgaagggacccaggagcaaattgataaaatcatggcgttccagggaaccggcaagcagatgtggaactcggcgatcaccgaaccgggagcgggatcggatgttggcagtttaaaaactacctatacccgtaaaaatggtaaggtttatcttaacggcagcaagtgtttcatcaccagtagcgcctacaccccctacatcgtggtgatggcacgggacggcgcctccccggacaaaccgatttataccgaatggtttgtcgatatgagcaaacccggcatcaaggttaacaaacttgagaagctcggcctgcgcatggacagctgctgtgaaatcaattttgacgatgttgagctggacgaaaaagacatgttcggccgggaaggtaatggctttaaccgcgtaaaagaagagttcgaccacgaacgttttctggtggctttaaccaactacggtacggcgatgtgcgcgttcgaagacgctgcgcgttacgccaatcagcgcgtgcagtttggcgagacgatcggccgcttccagctgattcaggagaagttcgcgcatatggcgatcaaattaaactccatgaaaaacatgctgctggaagccgcgtggaaagcggataacggcaccatcacctcgggcgatgccgcgatgtgtaaatacttctgcgccaacgccgcgtttgacgtggtagacagcgccatgcaggtattgggcggcgtcgggattgcgggcaaccaccgcattacgcgtttctggcgtgacctgcgcgttgaccgcgtctccggcggctctgacgaaatgcagatcctgacgctcggccgcgccgtgctgaagcaataccgttaa

SEQ ID NO: 73804 - DNA, 1518 bp, Citrobacter koseri
atgaaaaatgaaaagagaaagtccgggattgaacctaaggtttttttcccgccgttaataattgtagggatactttgttggctaaccgtcagagatctcgacgctgcgaatattgttattaatgccgtcttcagttatgtcacaaatatctggggttgggcatttgaatggtacatggtggtgatgctttttggctggttctggctggtcttcggcccttacgctaaaaaaagattaggtgatgaaccgccggaattcagcaccgccagctggattttcatgatgttcgcctcctgcacttccgccgccgtgctgttctggggctcaatcgaaatttattattacatctcgacgccgccctttgctctggcacctggctccaacggcgccaaagagatcggcctcgcctacagcctgtttcactgggggccgttaccgtgggcgacttacagcttcctctccgtcgcgttcgcctacttcttttttgttcgcaaaatggacgtgattcgtcccagctcgacgctggtacctttagtgggcgagaaacacgcgaaagggttattcggtactattgtcgataacttctatctggtggcgctgatcttcgcgatgggcaccagcctcggcctggcgacgccgctggtgaccgagtgtatgcagtatctgttcggcatccctcatacgctggaactggacgccatcatcattacctgctggatcgttctgaacgccatttgcgtggcctgcggcctgcaaaaaggggtgaaaatcgccagtgacgtgcgtagctatctcagcttcctgatgctcggctgggtgtttatcgtcagcggcgccagcttcatcatgaactacttcaccgattccgtcggtatgctgttgatgtatctgccacgcatgttgttctacaccgatgcgatcggcaaaggcggcttcccgcaaggctggaccgttttctactgggcatggtgggtcatttacgccatccagatgagtatcttcctcgcgcgtatttcccgcggccgtaccgtgcgcgaactgtgctttgggatggtgctcggcctgaccgcctccacctggattctgtggaccgttcttggcagcaacaccctgctgctgatggataaaaatattctcaatattccacaacttatcgaacagcacggcgtggcgcgcgccatcatcgaaacctgggccgcactgccattcagcacagctacgatgtggggattcttcatcctctgctttatcgctaccgtcacgctgattaacgcctgctcctacacgctggccatgtccacctgccgcgaagtgcgcgacggtgaagagccgccgctgctggtacgtatcggctggtcggtgctggttggcgttatcggcatcgtcctgttagcgctcggcgggttaaaacccattcaaaccgcgattatcgccggaggatgcccgctgttcttcgtcaacatcatggtaacgctctcctttatcaaagacgccaaagtgcactggaaagataaataa

SEQ ID NO: 73805 - DNA, 771 bp, Citrobacter koseri
atgaagataattacttgttacaagtgcgtgcctgatgaacaggatattgcgatcaataatgccgatggttcattagatatcagcaaagcggatgccaaaatcagtcagtacgatctgaatgcgattgaagctgcctgccagttaaagcagcagacaagcgatgcccaggtgattgccatgagcgtaggcggcaaggcgctgaccaacgccaaagggcgtaaagatgtgctttcccgtgggccagatgaactggtcgtggtgatagacgagcagtttgaacaggctttgccgcaacgcaccgccgcagcgcttgccgccgccgcgcaaaaatcgggctttgatctgatcgtttgcggcgacggttcctccgacctttatgcccagcaggtcagcctgctggtgggtgaaacgctgaacattccggccatcaacggtgtgagcaaaatcctctccctgacggaaagtgcgcttaccgttgagcgtgaactggaagatgaaattgaaaccctgagtattcccctgcctgcggtggtggcggtctccacagacattaactctccgcagatcccgtcgatgaaagcgattctgggcgcggcgaaaaaaccggtgcaggtctggtctgcggcggatattggtttcagtgcgccagacgcgtactccgtccagaaggtcgccgcaccgaaacaacgcgagcgtcagcgcatcgttattgaaggcgatggtgaagaacagatcgccgcgttcgccgaacatctgcgcaaaatcatttaa

SEQ ID NO: 73806 - DNA, 942 bp, Citrobacter koseri
atgaacacgttttctcatgtctgggtattcagcgataccccttctcgtctgccggaactgatgagcggcgcactggcttcaggcgagcagattcatgcgtttgtgcagcacgacgccgagggcgagacggcacgccagctgggggcgaatcacatctggcatttacgcggtaaaccggacgactgcatggtggaagattacgccggggtgatggcgcagacgattcaccagcagggggattcgggtctggtgctgctgcctaatacccgccgtggcaaactgctggcggcaaagctgggatttcgtctcgcggcggccgtctctaacgacgccagtgcggtaacgcagcaggagggccatgcgaccgtccgacatatggtctacggcgggctggcgattggcgaagagaccatcacatcaccgtatgcggtgatcaccgtcggcagcggcacgttcgaggcgcaacaggcggatgtgtcccgccacggcgagtcgcatgacgtgcagtggcagtcgccagatgtcgtcgtaacgcgcaccgcaacgcaggcgcgccagagcaacacggtcgatcttgataaagcgcgactggtggtcagcgtcgggcgcggcatcggcagcaaagagaatatctcgctggcccaggcgctatgtcaggccataggcgcagaactggcgtgttctcgtccggtggcggaaaacgaaaaatggatggagcacgagcgttatgtcggcatctccaacctgatgcttaaaccagagctttacctcgcggtgggcatttccgggcagatccagcacatggtgggcgcgaacggttcacaaaccatctgcgccatcaacaaagataaaaatgcgccgatatttcaatacgctgattacggcattgtcggcgatgtgatgaagattctgcctgcgcttacgagcgctttagcacgctga

SEQ ID NO: 73807 - DNA, 1287 bp, Citrobacter koseri
atgtccgaagatatctttgatgccatcatcgtgggggccgggctggcgggttccgtcgcggcgctggtgctcgcccgcgaaggggcgcaggtgctggttattgagcgcggcaattccgctggcgcgaagaatgtcaccggcgggcgcatttatgcgcacagtctggagcgcattatccccggttttgctgagcatgccccggttgaacgcgtgatcacccatgaaaaactcgcttttatgaccgaaaaaggggcgatggcggtggattacgtcaatggcgaggatgccgcgccttcgcaggtctcttattccgtattgcgcagtaaatttgacgcctggctgatggaacaggctgaagaggcgggcgcgcagctgataaccggcatccgcgtggataatcttgttcagcgcgacggcaaagtggtgggcgttgaggcggatggcgacgttattgaagcgaaaacggtcattctcgctgatggcgtgaactcgctgttggcggaaaaactgggaatggcgaaacgtgtagatgccgcccatgtcgcggtaggcgtaaaagagttaattgagttgcctgaatcggtcattgtggatcgcttcggattacagggaaatgaaggcgcggcctgtctgtttgccggttctccgaccgacggtctgatgggcggcggcttcctctataccaataaaacgaccctctctttggggctggtttgcggtctgcatcatctgaaagaggcgaaaaagtcggttccacaaatgctggaagattttaaacagcatccggcggtggcgccgctgattgcgggcggaaaactgctggagtacgccgcgcacgtcgtcccggaagcgggaatgaatatgcagccggagctggtgggcgacggcgtgctgattgccggtgacgccgccggtatgtgtatgaacctcggttttacgattcgcggtatggatctggccgtcgcggcaggggaagcggcggcgaagaccgtactttcggccatgcagagcaacgatttcagccgacaggggctggcggaatatcgacagcatctcgacaacgggccgatgcgggatatgcgtatgtaccagcgcttaccggcgtttctggacaacccgcgtatgttcacgcgctaccctgaaatggcggtgggcattgcccgcgatctgtttaccgtcgatggcagcgctcccgtccctgtgcgtaaaaaaatcctgcgccacgcgaagaaagtgggcttcatcaacctgatgaaggatggcatcaaaggagtgaccgtattatga

SEQ ID NO: 73808 - DNA, 288 bp, Citrobacter koseri
atgacttctcccgtcaatgtggacgtcaaactgggcgtcaataaattcaatgtggatgaagacaatccgcacatcatcctgaaaactgaaccggataagcaggcgctggaagtgctgatcaaggcgtgtccggccgggttgtataaaaagcaggacgacggcagcgtgcgctttgattacgccgggtgcctggagtgcggcacctgtcgaattctcgggttggggacggcgctggagaaatgggaatacccgcgcggcacctttggcgtggaatttcgctacggctga

SEQ ID NO: 73809 - DNA, 1437 bp, Citrobacter koseri
atggcgtcgctgacgcgtcttatccggcctacaaaagacgtgattcgtaggcctgataagcgtagcgccatcaggcatcaagtgaaaacaaaacaggacgcggctatgcagcagcccaggaactttgacgacattaaattctcctctattcaccgcagaattatgctgtggggaagcggcgggccgttcctggacggttacgtactggtcatgattggcgtagcgctggagcagctcacgcctgcgctgaagctggatgcgcagtggctggggttactgggggcaggcacgctggccgggctgtttgtcggtacgtcgctgttcggctatatctcagacaaagtggggcgacgtaaaatgttcctcatcgatatcatcgccattggggtgatatcggtagcgacgatgtttgtctcatcgccgatggagttgctcgtcatgcgcgtgctgattggggtggtgattggcgcggattatcctatcgccacctcgatgatcaccgagttttccaacacccgccagcgcgccttctcgatcagttttattgccgcgatgtggtacgtcggcgccacctgcgccgatctggtcggctactggttgtacgatgtggcgggcggatggcgctggatgctggggagcgcggcaattccctgcattatgatcctgatcgggcgcttcgatcttcccgaatcaccgcgctggctgttgcgtaaggggcgggtgaaagagtgcgaggagatgatgattaaactgtttggcgagccggtggcgttcgatgaagaaccgccccaggagacgcgcttcttacagctgtttaatcgccgtcacttcccgtttgttttgtttgtcgccgccatctggacctgccaggtcatcccgatgttcgccatctatacctttggcccgcagattgtcggcctgctggggctgggcgtcgggaaaagcgcggcgctgggcaatgtggtgatcagtttgttctttatgctgggctgtattccgccgatgtactggctgaacagcatagggcgacggccattgctgatcggcagctttgttatgatgacgctggcgctggctgtgctggggctgatcccagaaatggggatctggctggtggttgcggcctttgcggtgtacgcctttttctccggcggcccggggaaccttcagtggctctacccgaatgagctgttcccgacggatattcgcgcgtctgccgtgggcgtcattatgtccctgagtcgaattggcaccatcctttcaacgtgggcgctgccgatcttcatcaccagatatgggatcagctacgtcatgctgatgggggcgggaatttcacttatcggtctgcttatttccatcgcctttgcgccggagacgcgtggactgacgcttgcccagacgagcagtatgacgattcgcaacaaacctctgtgctag

SEQ ID NO: 73810 - DNA, 234 bp, Citrobacter koseri
atgcaaaaacaacttcttattgcgtctctttttgccgctgcgacggtatttaccgtagcgggctgttcatcaaaccaggccataaaaaccaccgacggcaaaacgatcgtcaccgatggtaaaccacaggtcgatgatgataccggactggtgtcctacaaaaatgcagaaaccggtaaaacggaacagatcaaccgcgatcaggtgaagaacatgagcgaactggataattaa

SEQ ID NO: 73811 - DNA, 531 bp, Citrobacter koseri
atgatcctcattatttatgcccatccgtatccgcagcactcgcatgcgaataaacggatgctggaacaggcaaggacgctggatggcgtcgaaattcgctcgctctatcaactttaccctgacttcaatattgatgttgccgccgaacagcaggcgctggcgcgcgcgcgtcttatcatctggcagcatccaatgcagtggtacagcgttccccctttactcaaactctggatggacaaagtcctcgcgcatggctgggcctacgggcatggcggcacggcgctccggggcaaagatctgatgtgggccgtgacgaccggcggaggcgaaagccacttcgctattggcgcctatccgggctttgacgtgctctcgcagccgttacaggctaccgcgctctattgtgggctcaactggctgccgcctttcgcgatgcactgtacgtttgtctgtgatgacgaaacgctccaggcgcaggcgcgccactacaagcaacgtttgctggcgtggcaggaggcaaatcatggatag

SEQ ID NO: 73812 - DNA, 1863 bp, Citrobacter koseri
atggatagccatacgctgatacaggcgctgatttacctggggtcggccgcgctgattgtgccgattgccgtccggctgggcttagggtcggtgctgggctacctcattgccgggtgtattatcggcccgtgggggctgcgtctggtgacggacgctgaagctattctccatttcgccgaaattggcgtggtgctgatgctgtttgtgattgggttggagctggacccgcagcgtttgtggaaactgcgtgcgtcggtttttggcggcggcgcgttgcagatggtggtatgcggtgggttgattggcctgttctgtatgttcctcggtctgcgctggcaggtggcggagctgatcggcatgacgctggcgctctcttccacggcgattgcgatgcaggcgatggatgagcgtaacctgaccgtctcgcaaatgggccgtagcacattcgccgtgctgctgtttcaggatattgccgctattccgctggtggcgatgatccccttgctggccgccagcagcgcctcaacgacgctgggcgtctttgcgctgtctgcgttaaaagtggcaggggcgctggcgctggtggtgctgttagggcgctatgtcacgcgcccggcgctgcgttttgtcgcgcgttccggtttgcgtgaagtgttcagcgccgtggccctgtttctggtctttggcttcggcttgctgctggaagaagtggggctgtcgatggcgatgggggcgtttctggcgggcgtgttgctggcaagctcggaataccggcatgcgctggaaagcgacatagaaccgtttaaagggctgctgctggggctgttctttatcggcgtcggcatgtctatcgactttggcacgctgatcgataatccgttacgcattcttatcctgctggtcggtttcctggtaattaaaacggtaatgctgtggctggtcgccaggccgctacgggtgccgaataagcaacgtctctggtttgccgtattattaggacaggggagtgagtttgcctttgtggtattcggcgcggcgcaaatggccagtgtactcgacccggaatgggcgaaggccttgacgctcaccgttgcgctctcaatggcggcgacgcccatttttctggtgctcctgagccgtctggaaaaatccgcaatcggcgaagcgcgtgaagcggatgagatcgatgcggagcaaccgcgcgtgatcatcgccggatttggccgttttgggcagattacggggcgtttgctgctgtcgagcggagtaaaaatggtggttctcgaccatgacccggatcatattgaaacgctgcgcaaatttggcatgaaggtcttttacggggacgcgacgcgcatggatctgctggagtccgccggtgcggcgaaagcggaagtgctgatcaacgcgattgacgatccgcaaaccagtttacaactgacagaaatggtaaaagcccattttcccgacctgcaaattattgcccgcgcccgcgatgtcgatcactacatccgtctgcgacaggccggtgttgagatgccggagcgtgaaacgtttgaaggcgcgttaaaaacagggcgtcaggcgctggagaaattagggctgggacgctacgaggcgcgcgagcgtgccgatctgttccgtcgttttaatacgcagatggtggaagagatggcgaaaggggaaaacgatccaacgtcccgcgcggctgtctataaacgcaccagcgctatgttgagcgagattattactgaagaccgtgaacatttatcgttaattcaacgccacggctggcaaggcacggatgaaggtaaacatacgggtgatgcagatgatgagccggaagtgaaaccgtcaacgtag

SEQ ID NO: 73813 - DNA, 480 bp, Citrobacter koseri
atgatcagtctgattgcggcgttagcggtagatcgcgttatcggcatggaaaacgccatgccgtggaacctgcctgccgatctcgcctggtttaaacgtaacaccttaaacaagcctgtggttatggggcgccatacctgggaatccatcggacgaccgctgccggggcgtaaaaacatcgtcatcagcagccagcctggcactgacgatcgcgtgcagtgggtgaaatcggtcgatgaagcgattgccgcctgcggcgatgcgccagagattatggtgattggcggcggacgcgtgtacgaacagttcttgccgaaagcgcagaaactgtatctgacgcatattgatgccgaagtggaaggggacacccatttcccggactacgaaccggatgactgggaatcggtcttcagcgagttccacgacgccgatgagcagaattctcacagctactgcttcgagattctggaacgtcgttaa

SEQ ID NO: 73814 - DNA, 849 bp, Citrobacter koseri
atggcaacatacctcattggcgacgttcacggttgctacgacgaactgatcgcattgttacaccaggtggaatttacccccggttcagataccctgtggcttaccggcgatctggtcgctcgcggccctggttctctggaagtgctccgctacgtgaaatcactgggcgactgcgtgcgtctggtgcttggcaatcacgatttacatctgttggccgtctttgcgggcattagccgcaataagccgaaagacaggctgactccgctgctggaggcgccagacgccgacgaactgctcaactggctgcgccgtcagccgctgttgcaggtcgacgaagagaagaagctggtgatggcgcatgcgggcattacgccgcagtgggatttacagacagcgaaagactgcgcgcgcgatgttgaagccgtgctgtcgagcgactcctatcccttcttcctcgacgcgatgtacggcgatatgccgaacaactggacgccggagctaacgggtctggcgcggctgcgttttatcacgaatgccttcacccgtatgcgttactgtttcccgaacggccaactggatatgtacagcaaagagtcgccggaaaacgcccctgcgccgctgaaaccctggttcgccattccggggccggttagtgaagcatacagcattgtctttggtcactgggcgtcgctggaaggtaaagggacgccggaaggcatttatggtctggataccggctgctgctggggcggggatttaacctgcctgcgttgggaagataagcgctacttcgtgcagccgtcgaatcgtcatcttgattcaggcaaaggcgaggcggtaaacgcctga

SEQ ID NO: 73815 - DNA, 378 bp, Citrobacter koseri
atgatcaattcgccccgagtgtgtattcaggttcagagcgtctacattgaagcgcaatcttcacctgatgatgaacgttacgtattcgcatacacggtaaccatccgcaatttggggcgagcgccagtgcagttgttggggcgttattggctgataaccaatggtcatggccgcgaaaccgaagtacagggcgaaggtgtggttggcgtgcagccgcacatcgcgcccggagaagagtaccagtacaccagcggcgccgttattgaaacgccgctgggcaccatgcagggtcactacgaaatgatcgatgaaaaaggcgtcgcctttactatcgatattcccgtgttccgactcgccgttccaacacttattcattaa

SEQ ID NO: 73816 - DNA, 822 bp, Citrobacter koseri
atgaataatcgagtccatcagggccacttagcccgtaaacgtttcgggcaaaactttctcaacgatcagtttgtgatcgacagtattgtctccgccattaacccgcaaaagggtcaggcaatggtcgaaatcggccccggtctggcggcgctgacggagcctgtcggcgaacgtctggaccagctcacggtgatcgaacttgaccgcgatctggccgcgcgtctgcaaacgcacccgtttttggggccgaaactgacgatttatcagcaagatgccatgaccatgaacttcggtgagctgtctgagaagataggtcagccgctgcgcgtattcggcaatttgccctacaacatctccaccccgttgatgttccacctctttagctatactgatgccattgccgacatgcactttatgttgcaaaaagaagtggtcaatcgtctggttgcagggccgaacagtaaggcgtatggtcgattaagcgtcatggcgcaatattattgccaggtgatcccggtgctggaagtgccaccatccgccttcacgccgccgcctaaagtcgattccgccgttgtgcgtctggtgcctcacacgacgatgccgtatccggtgaaagacatacgcgtgttgagccgcatcaccaccgaggcgtttaaccagcgtcgtaaaacgattcgcaacagcctcggcaatctgttcagcgtcgaggtgctgacggaactgggcattgacccggcattgcgagcggaaaatatctctgtcgcgcaatattgccagatggcgaactatctgtcagaaaacgcgccttcgaaggagagttaa

SEQ ID NO: 73817 - DNA, 990 bp, Citrobacter koseri
atggctactgttcaacgcgttgttatcactcccggcgaacccgccgggattggtcctgacttagtcgttcagctcgcacagcgtgagtggccggtcgaactcgtcgtctgtgcagatgcccgtctgttaaccgaccgggccgcgttgctcggtttgcccctctcgcttcttccctactcgccaaatcaccctgcaaaaccgcaatccgccggcacgctgaccctgttgccgacagcgcttcgcgctcctgtcaccccgggtcaactcagcgttgagaatgggcagtatgtggtggatacgctggcgcgcgcctgcgacggttgtctgcaaggggaatttgcggcgctgatcaccgggccggttcacaaaggcgtcatcaatgacgctggcgtaccgtttaccggacacacggagttttttgaagcacgttcgcaggcgaagaaagtggtgatgatgctggccaccgaggagctgcgggtcgcgctggcgacaacgcacctgccgttaagagcggttgccgacgccattacccccgctttgctgcatgaggtgatcggcattctgcatcatgatttacgcacgaaattcggccttgccgatccgcatattctggtgtgcgggctaaatccgcatgcgggtgaaggcggccatatgggaaccgaagagatcgacacgatcgttccggtactggatgatctgcgcgctcaggggatgcgcttaagcggccctttgcccgccgacacgcttttccagcctaaatatctcgatcatgccgatgccgtgctagcgatgtaccacgatcagggtctccccgtgctaaaataccagggatttggtcgcggcgtgaatatcacgctgggcctgccttttattcgaacatccgtagaccacggcaccgcgcttgaactggcgggtcgggggcaagcggatgtcggcagttttattacggcgcttaatctcgccatcaaaatgattgttaatacccaatga

SEQ ID NO: 73818 - DNA, 1287 bp, Citrobacter koseri
atgaagaactggaaaacgctgcttctcggtatcgccatgatcgcgaataccagtttcgctgccccgcaggtggtcgataaagtcgcagccgtcgtcaataacggcgtcgtgctggaaagcgacgttgatggcttaatgcaatcagtaaaacttaatgcgggtcaggctggtcagcagcttcctgatgatgccacgctacgtcatcagatcctggaacgtttgatcatggatcaaatcgttctccagatgggtcagaagatgggagtgaaaatctctgatgaacagctggatcaggctatcgccaatatcgctaaacagaacaacatgacgctggaccagatgcgcagccgtctggcttacgatggtctgagctactcaacctaccgtagccagatccgcaaagagatgatcatctccgaagtgcgtaacaacgaagtgcgtcgtcgcgtcaccatcctgccgcaggaagtggatgcgctggcccaacaggtcggtaaccagaacgatgccagcacagagctgaacctgagccacattctgatcccgctgccggaaaacccgacgtcggatcaggtaagcgaagcggaagcccaggcgcgttcgattgttgatgaagcgcgtaacggcagtgatttcggcaaactggcgatcacctactccgccgaccaacaggcgctgaaaggcggccagatgggctggggacgtattcaggagctgccgggcattttcgcgcaggcgctgagcacggcgaaaaaaggcgacatcgttggcccgattcgttccggcgttggcttccacattctgaaagtgaacgatctgcgtggccagagccagagcatctccgtcactgaagttcatgcccgccatattctgctgaaaccctcgccgatcatgaccgatcaacaggcgcgcctgaaactggaagagatcgcagcagacattaagagcggcaaaacgacctttgctgccgcagcgaaagagttttcacaggacccaggttctgccaaccagggcggcgatctgggctgggcggcagcggatattttcgatcctgccttccgcgacgcgctgacccgcctcaacaaaggccagatgagcgccccggtgcactcctcctttggctggcacctgatcgaactgctggatacgcgtaacgttgataaaaccgacgcggcgcagaaagacagagcttaccgtatgctgatgaaccgtaagttctcggaagaagcggcaacctggatgcaggaacaacgcgccagcgcttacgttaaaatcctgagcaattaa

SEQ ID NO: 73819 - DNA, 2358 bp, Citrobacter koseri
atgaaaaaacgtattcccactttcctggccaccatgatcgccagcgccctttatagtcagcagggactggccgccgaccttgcctcgcagtgcatgttgggtgtgccaagctacgaccgtcctctggtgaaaggcgagacgaacgaattacccgtgacgatcaacgccgatcacgcgaaaggtaactacccggacgacgcggtattcaccggtaatgtcgatatcaaccagggtaacagtcgcctgcaagctgacgaggtgcaactccatcaaaaagaggcgccaggccagccggaaccggtgcgtaccgtcgatgcgctcggcaacgtccattatgacgacaatcaggttattctgaaggggccgaaaggctgggcgaacctgaacaccaaagacacaaacgtgtgggaaggcgactaccagatggtcggccgtcaggggcgcgggaaagcggacctgatgaagcagcgtggcgaaaaccgctataccattctggaaaatggcagctttacctcctgtctgccaggctccgatacctggagcgttgtgggcagcgaagtgattcacgatcgtgaagagcaggtagcggaaatctggaacgcccgttttaaactgggtccggttcccgtcttttacagcccttatttacagctgccggtcggtgacaaacgccgctccggtttcctgatcccgaacgcgaagtacaccaccaagaactattttgagttctacctgccgtattactggaacatcgcgcccaatatggacgccaccattacgccgcattatatgcaccgccgtggcggtgtcatgtgggagaatgagttccgctacctcagccaggcgggcgcgggtttaatggagttcgactatctgaattccgatcgcgtttacgacgatgagcatccgaacgacagcaactcccgtcgctggttgttctactggcgtcatggcggcgtgatggatcaggtatggcgctttaatgtcgactataccaaggtcagcgactccagctacttcaatgactttgacaataagtacggttccagtaccgacggttacgccacgcagaaattcagcgtcggctatgccgtgcagaactttgatgccacggtgtcaaccaaacagttccaggtattcagcgatcagaataccagcagttactccgctgagccgcagttagacgttaacttctaccagaatgacgttggtccattcgatacgcgtatttacggccaggccgtgaagtttgtgaacacccgagacaacatgccggaagcgactcgcgttcacctggagccaaccatcaatctgccgttatcgaatcagtggggcagcatcaatactgaagcgaagctgctggcgacgcactaccagcaaaccaatctggactcgtacaacaacaattcgcgaaacgtcaataaactcgatgagtcggttaaccgcgtaatgccgcagttcaaagtcgatggcaggatggtgtttgaacgcgatatgacgacgttggcgccgggttacacccagacgctggagccgcgcgcgcagtatctgtacgttccctatcgtaaccagagcagcatcaataactacgactcttcgttattgcaatccgactacagcggcctgttccgcgaccgcacatatggcggtctggaccgtatcgcctccgcaaaccaggtcacgaccggcgtcacatcgcgtatttatgatgatgccgcaattgaacgttttaatgtttccgtgggtcaaatctactatttcacggagtctcgcaccggcgatgacaacataacctgggagaatgacgacaaaacgggctcactggtttgggcgggcgacacctactggcgtatctccgaccgctggggactgcgtagcggcattcagtacgacacgcgtctggacagcgtcgcgaccagcagcagtacgatcgaataccgtcgcgatgaaaatcgtctcttgcagttgaactaccgttatgccagcgcggaatatattcaggctacgctgccgtcttattccactgcggagcagtataaaaacgggatttcccaggtcgggggcgttgccagttggccgattgccgatcgttggtctatcgtaggcgcttactactttgataccaatgtgaataagcctgccgaccagatgctcggcgtgcagtacaactcctgctgctatgcgattcgcttcggttatgagcgtaagctgaacggttgggataacgataaagaacacgctgtttatgacaacgtgatcggctttaacattgaattgcgtggtctgagctccaactacggtctcggcaccaaagagatgttgcgttcgaacattttgccgtatcaaagctctctgtga

SEQ ID NO: 73820 - DNA, 816 bp, Citrobacter koseri
atgcagtactggggaaagattgtaggtgtcgcagtggcgctgatgatgggaggcggcttctggggcgtggtattaggtctgctgataggccacatgttcgacaaagcccgcagccgcaaaatggcgtggttcgccaatcagcgtgaacggcaggcactgtttttcgccaccacttttgaggtcatggggcatttaaccaaatcgaaagggcgcgtgacggaagcggatattcatattgccagccagttgatggaccggatgaacttacacggcgaatcacgtaccgccgcccaacacgcgtttcgcgtgggaaaatcggataattacccgttacgtgaaaaaatgcgccagtttcgcagcgtctgctttgggcggtttgatctgatacggatgtttctggaaattcagattcaggcggcgtttgcggatggaacgctccacccgaacgagcgggaagtgctgtacgttatcgccgaggagctggggatttcccgcgctcagttcgatcagttcttacgcatgatgcagggcggggcgcagtttggcggcggttatcagcaacagcaggccggcggcggctggcagcaggcgcagcgtggccctacgctggaagatgcctgcaacgtgctgggggttaagccgacagatgatgcgacaaccattaaacgcgcgtaccgcagactgatgagcgagcaccacccggacaaactggtcgcaaaagggttgccgccggagatgatggagatggcgaagcaaaaagcgcaggaaattcagaaagcgtatgaaatgattaaagagcagaaaggttttaaataa

SEQ ID NO: 73821 - DNA, 660 bp, Citrobacter koseri
atggggatggaaaactacaatccgccgcaggagccctggctgattatcctgtatcaggatgagcacattatggtggtcaacaagcccagcggcttgttgtccgtgccgggccgccttgaggagcacaaagatagcgtgatgacgcgtattcaacgcgattatccgcaggcggagtcggtgcatcgtctggatatggcgaccagcggcgtgattgtagtggcgctgaccaaagcggcggaacgggagctgaaacgccagttccgcgagcgtgagccgaaaaaacagtacgttgcgcgcgtgtgggggcatccaacccctgccgaagggctggttgatttaccgctgatctgcgactggccgaacaggccgaaacagaaagtgtgttatgagacgggtaagcctgcacaaaccgggtatgaggtggtggacttcgctgcggataacaccgcacgggtggtgcttaaaccgattaccgggcgttctcatcagctacgtgtgcatatgctggcgttgggacaccccattctcggcgatcgcttctacgcgtcgccagaagcgctggcgatggcgtcgcgtctgttgctgcatgccgaaacgctaaccatcacccatcccgcgtatggcaacagtatgacctttaaagccccggtagatttttaa

SEQ ID NO: 73822 - DNA, 2907 bp, Citrobacter koseri
atgccttttacacttggtcaacgctggatcagcgatacagaaagcgaactgggacttggaaccgtcgtcgcgatggatgcgcgaactgtcaccttacttttcccggcgacaggtgaaaaccgtctgtatgcgcgcagtgactcccccgtgacccgcgtgatgtttaaccctggtgatacgattacaagccatgaaggctggcagctacaaatcgatgaagtaaaagaagaaaacggcctgcttgcctatactggcacccgccttgataccgaagaaaccgccgtcacgctgcgtgaagtcctgctcgacagcaagctggttttcagtaaaccgcaggatcgcctgttcgccgggcaaatcgaccggatggaccgattcgccctgcgctaccgcgcacgtaaatttcagagcgagcagtaccgcatgccgtggagcggtctgcgcggtcagcgcaccagcctgattccccaccagctcaacattgcccatgatgtcggtcgccgccacgcgccgcgcgtcctgctggcggatgaagtgggcttaggaaaaaccatcgaagccgggatgatcctgcaccaacaactgctgtctggcgcggcggaacgcgtgctgatcatcgtcccggaaaccctgcaacatcagtggctggttgaaatgctgcgccgcttcaacctgcgcttcgcgctgttcgacgacgagcgttacaccgaagcccagcacgatgcctacaacccgtttgaaaccgagcaactggttatctgctcgctggacttcgcgcgtcgcaacaaacagcgtctggaacatctgtgcgacgcacaatgggacctgctggtcgtcgatgaagctcaccacctggtgtggagcgaagacgcgccaagccgcgaatatatggcggttgaacaactggcggaacgcgtgcctggcgtcctgctgctgaccgcaacgccggaacaactgggaatggaaagccacttcgcccgcctgcgtctgctcgacccgagccgtttccacgacttcgaacaatttgtcgaagagcaaaaaaattatcgcccggtcgccgacgccgtcgccatgctgctggcaggcaacaagctgagcaacgaagagctgaacatgctcggcgacctgattggcgagcaggacatcgaaccgctgctgcaaacggcgaacagcgaccgcgatggcgcgcagaatgcccgccaggaactggtctccatgctgatggacagacacggcaccagccgcgtactgttccgcaacacccgtaacggcgtcaaaggcttcccgaaacgcgagctgcacaccatcaagctgccgctgccaacgcaatatcagacggcgattaaagtctccggcattatgggcgcgcgtaaaagcgcggaggacagagcgcgcgatatgctctacccggagcagatttatcaggaattcgaaggggatagcggcacctggtggaacttcgacccgcgcgtggagtggctgatggggcatctgaccagccaccgctcgcagaaagtgctggtgatctgcgcgaaagccgccaccgcgctgcaactggagcaggtgctgcgcgagcgcgaaggcattcgcgccgccgtattccatgaaggcatgtccattattgaacgcgaccgcgccgccgcgtggtttagcgaagaagacagcggcgcgcaggttctgctgtgctcggaaatcggttctgaaggccgtaacttccagtttgccagcaacctggtgatgtttgacctgccgtttaacccggatttgctggagcagcgtattggccgtctggaccgtatcggccaggcgcacgatattcagatccacgttccgtatctggaaaaaaccgcgcagtccgtgctggttcgctggtatcacgaagggctggatgcctttgagcacacctgcccgaccggtcgcgccatctacgatacggtgtatcacgatctgatcgcttacctggcgacgcctgaaaataccgacggttttgacgcgctgatcaaaacctgccgcgagcagcacgaagcgctgaaggcgcagctggagcaagggcgcgaccgtctgctggagatccactctaacggcggcgagaaagcgcaggcgctggcagagagcattgaagaacaggatgacgacaccagcctgatcgccttcgccatgaacctgtttgatatcgtcgggattaaccaggatgaccgtggtgagaacctgattgtgctgacgccttccgatcatatgctggtgccggacttccctggcctgccggaagatggctgcaccattacgttcgagcgtgatgtggcgctgtcgcgtgaagatgcgcagtttgttacctgggaacatccgctgattcgcaacggactggatctgattctgtctggcgataccggcagcagcacgatttcgctgttgaaaaacaaagcgttgccggtgggaacgctgctggtggaactggtgtatgtcgttgaagcgcaggcaccgaaacatttacagcttaaccgtttcctgccgccgacgccggtgcgcatgctgctggataaaaacggcaataacctggccgcgcaggtggagtttgaaaccttcaaccgccagctgagcgccgttaaccgtcataccggcagcaagctggtcaacgcggtgcaaccggacgtacacgcgattctgcaactgggcgaagcgcaggcggagaaatcggcccgggcgctgatcgacgccgcgcgtagcgaagcggatgaaaaactgtctgccgaactgtcgcgtctggaagcgctgcgcgccgttaacccgaacatccgtgatgatgaacttgcggcgatcgacagcaaccgtcagcaggtaatggaaagcctggatcaggccaactggcgtctggatgccttacgtcttatcgtcgtcacgcatcagtaa

SEQ ID NO: 73823 - DNA, 2352 bp, Citrobacter koseri
gtggcgcaggcaggttttattttaacccggcactggcgggataccccgcaaggaacagaggtctcattctggctggcaacggacaccggtcctttgcaggtcacgctcgcgccgcaggagtcggtcgcgtttatccctacgcatcaggccgcccgcgtcacctcgctgctgcgcacagaaaacggctatcgcctgacgccgctcaatttgcaggattttcatcgccagcctgtctcggggttgtactgccgctcgcaccgacagctgatgcgtctggaaaaacagttgaaagaacagggcgtaacggtctatgaagccgatgtgcgcccgccggaacgttacctgatggagcggtttatcaccgctcccgtttggctggagggcgacacaaaagacggcgcgatcgtcaatgcccgcctgaaaccgcacccagactaccgccccccgctgaaatgggtatcgctggatattgaaaccacccgacacggcgagctgtactgcattggcctgcaaggctgcgggcaacgcgtcgtttttatgctcggcccggcgaatggcgatgcctcggcgctggatttccagcttgagtatgcggcgagtcgcccgctgctgctggaaaaactcaacgactggtttgcccggcacgatcccgatgtgatcatcggctggaacgtggtgcagtttgatttacgtgtcctgcaaaaacatgccgagcgctatcgtatccctttacgtctggggcgcgacaacaccgagctggaatggcgcgagcacggtttcaagaacggcgtgtttttcgcccaggccaaagggcggttgatcattgacggcattgaggcgctcaaatccgcgttctggaatttctcatcattttcactggaaaccgtggcccaggagctgcttggcgaagggaaatcgatcgataatccctgggacagaatggacgaaattgaccgccgtttcgccgaagataagcccgcgctcgccacgtataacctcaaggactgcgagctggtgacgcagatttttcataagacggagatcatgccgtttttactggagcgcgccaccgttaacggtctgcccgctgaccgccacggcggttctgtcgccgccttcggtcatctctattttccccgtatgcatcgcgccggttacgttgcgccgaatctcggtgaagtcccgccgcatgccagtcctggcggttacgtgatggactcgcgccctggcctgtatgactccgtactggtgctggattataagagcctgtacccgtcgatcattcgcacgttcctgatcgacccggttgggctggtggaagggatggcacaaccggacccgacacacagcaccgaaggctttcttgacgcctggttctcgcgagaaacgcactgtctcccggagatcgtcacgcagatctggcatgggcgcgatgaggccaaacgccacggcaataaaccgctgtcccaggcgctgaagatcatcatgaatgcgttttacggcgtgctcgggacgacggcctgccgctttttcgatccccgactggcctcgtcgatcaccatgcgcggccacgcgatcatgcgtcagaccaaagcgctgatcgaggcgcagggctatgacgtgatctacggcgatacggattccactttcgtctggctgaaaggcgcgcattctgaagacgaggcggcaaggattggccgcgagctggtgcgtcatgtgaatgactggtggacgcaatccctgcaacagcaaaagctgaccagcgcgctggaattagagtttgaaacccacttccgccgttttctgatgccgaccattcgcggggcggacaccggcagcaaaaagcgctatgccgggctgattcaggaaggcgagaagcagcgaatggtatttaaagggctggagaccgtgcgcaccgactggacgccgctggcgcagcgattccagcaggagctttacctgcgtatcttccgccaggaaccctatcaggagtatatccgggaaaccatcgataacctgatgacgggcaagctggatgaacagctggtttaccgcaagcgactgcgccgcccgttgagcgaatatcagcgtaacgttccgccgcacgttcgcgccgcccggctcgccgatgaacaaaacatcaagctggggcgcccggcgcagtatcagaaccgaggcacgatcaaatacgtgtggacgactaacggccctgagccgctggattaccggcattcaccgctggattacgagcactatttaacccgccagctacagccggtcgcagagggaatacttcccttcatcgatgataattttgctacactactcacaggacaactggggttattttga

SEQ ID NO: 73824 - DNA, 696 bp, Citrobacter koseri
atgttagaagatctcaaacgtcaggtactggaagccaatctggcgctgccaaaacacaatctggtgactctcacctgggggaacgtcagcgccgtcgatcgcgagcgcggcgtcttcatcattaaaccttccggcgtcgactacagcgtgatgagcgcagaggatatggtggtggtcagcattgccacgggtgaagtggtggaaggaacgaaaaaaccctcctccgatacgccgacccaccgtctgttgtatcagtctttcccgtcgattggcggcatcgtccacacccattcgcgccacgcgaccatctgggcgcaggccgggcaatccatcccggcgacggggacgacccatgcggactatttttacggcacgatcccctgcacgcgcaaaatgaccgatgcggagatcaacggcgaatatgaatgggaaacgggcaacgtcatcgtcgaaacctttgaaaaacagggtatcgatgccgcgcagatgcccggcgtgctggtgcattcacacggtccgttcacctggggcaaaaacgccgaagacgcggtgcataacgccattgtgctggaggaggtcgcctgtatgggcatcttctgccgccagcttgcgccacagttgccggatatgcagcaaacgttgctggataagcactacctgcgcaaacacggggcgaaggcctattacgggcagtaa

SEQ ID NO: 73825 - DNA, 1503 bp, Citrobacter koseri
atgacgatttttgacaactatgaagtgtggtttgtgattggcagccagcatttgtatggctctgaaacgctgcgccaggttactcagcatgccgaacatgtggtaaaggcgctgaataccgaagcgaaactgccctgcaaactggtgctgaaaccgctggggacgtcgcctgacgagatcaccgcgatttgtcgtgacgccaattatgacgatcgctgtgcgggcctggtggtctggctgcacaccttctcgcccgcgaaaatgtggattaacgggctgagtattctcaacaagccgctgttacagttccacacccagttcaatgccgccctgccgtgggacagcatcgacatggactttatgaacctgaatcagaccgcgcacggcggacgcgagtttggttttatcggcgcgcgtatgcgtcagcagcacgcggtagtgaccggtcactggcaggataaacacgcgcacgcgcgtatcggctcatggatgcgccaggcggtctccaagcaggacacccgccacctgaaagtgtgccgctttggcgacaacatgcgtgaagtggccgtgaccgacggcgataaagtggcggcgcagatcaagttcggcttctcagtgaatacctgggcagtgggcgacctggtgcaggtcgtgaatgcggttagcgacggcgacattaacgcgctggtggatgaatacgaaagccgctataccctgacgcccgcgacgcaaattcacggcgacaagcggcagaacgtgctggaagccgcgcgtattgaactgggcatgaagcgctttctggaacagggcggcttccacgcgttcaccacgacgtttgaagatttacacggcctgaagcagcttccagggctggccgtacagcgcctgatgcaacagggctacggtttcgctggcgaaggcgactggaaaaccgccgcgctgcttcgcatcatgaaagtgatgtctggcggtttgccgggcggcacctcatttatggaggattacacctaccactttgagaagggccacgatctggtgctcggctcgcacatgctggaagtatgcccgtctatcgcggtggaagaaaaaccgatcctcgacgtgcagcacctcggcatcgggggtaaagacgcgcccgcccgtctgatcttcaacacccaaaccggcccggcgatcgtcgccagcctgatcgacctcggcgatcgctatcgtctgctggtcaactgcatcgacaccgtaaaaacgccgcatgacctgccgaagctgccggtcgccaacgcgctgtggaaagcccagccggatctgaccaccgcatccgaagcgtggattctcgccggtggcgcgcaccacaccgtcttcagccatgcgctggatctgaacgatatgcgccagttcgcagagatgcacgatatcgaaatcaccgtcatcgataacgatacccgcctgcccgcctttaaagacgcgctgcgctggaacgaagtttattacggtttcaaacgttaa

SEQ ID NO: 73826 - DNA, 1710 bp, Citrobacter koseri
atggcgattgcaattggcctcgattttggcagtgattcagttcgtgctctggcggtggattgcgccaccggggaagagatcgccacctgcgtagagtggtatccccgctggcaggaagggcgctattgcgacgccccgaacaaccagttccgccatcatccacgcgactacatagagtcaatggaagccgcgttgaaaaacgttctcacgaccctgagcgcgtcacagcgtggcgaggtggtcggcatcggcgtcgacagcaccggctccacccctgcccccattgatgtcgacggccacgtactggcgctgcgtcctgagttcgccgaaaacccgaatgcgatgttcgtcctgtggaaagatcacacctcggtcgaagaagcggaagccatcacccgcctgtgccatacgccgggcaaaaccgattattcccgctacatcggcggcatttactccagcgaatggttctgggcgaaaattctgcacgttacgcgtcaggacagcgccgtcgcgcaggccgccgcctcctggattgagctgtgcgactgggtgcctgccctgctctccggcaccacgcgcccgcaggatattcgccgtggtcgctgtagcgccggacataaatcgctgtggcatgagagctggggcggtttgccgcccgccagtttcttcgatgacctcgatcccatcatcaaccgccacctcgcctggccgctgtttaccgataccttcactgccgatctgccagttggcacgctgtgcgcggagtgggcgcaacgcctcggcctgccggaaagcgtggtcatctctggcggcgcgtttgactgccatatgggcgcggttggcgcgggcgcgcagccgaatgcgctggtgaaagtgatcggcacatcgacctgcgacattctgattgccgacaagcagagcgtcggcgaccgcgcggtgaaaggcatttgcggccaggtagacggcagcgtcgtgcctgattttattggcctggaagcgggacagtcggcattcggcgatatctatgcctggtttggccgcattctcggctggccgctggagcagcttgcggtgcagcatcctgaactgaaagaccaaatcgccatcagccaaaagcagctactcccggcgctgaccgaggcgtgggcgaagaatccatcgctggatcatctgcccgtggtgctcgactggtttaacggtcgccgcacgccgaacgctaatcagcgtctgaaaggggtgattagcgatctgaatctcgccaccgatgcgccagcgctgtttggcgggctgatcgccgccaccgccttcggcgcacgcgccattcaggaatgctttaccgaacagggcattgccgtcaacaacgtgatggcgctgggcggcatcgcccgtaagaatcaggtgatcatgcagacctgctgcgacgtgctcaaccgcccgctacagattgttgcctcagaccagtgctgcgcgttaggcgccgccatttttgccgccgtcgccgcaaaagcgcatgtcgatatccctgccgcacaacaaaaaatggccagcgccgtagagaacaccctgcaaccgcgcccggaacaggctcaacgcttcgaacagctttatcagcgctaccggcagtgggcggtcagcgctgaacaacactatcttccgactgccgccccggcgccaaaaaccccggtcagccaggcaaccctgacccattaa

SEQ ID NO: 73827 - DNA, 846 bp, Citrobacter koseri
atggctgaaacgcaaaatgatcccctgctgccgggttattcgtttaatgcgcatctggttgccgggctgacgcccattgaggcgaacggctatctggatttttttatcgaccgcccgctggggatgaaggggtatatccttaatcttacgattcgcggggaaggggtgatcaataaccacggcaaacagtttgtctgccgtccgggggatattttgctgtttccgcctggcgaggtacaccactacggtcgccatcctaatgcgagcgaatggtatcaccagtgggtgtacttccgaccgcgcgcctactggcaggagtggctcacctggccgacgatttttgcgcagaccggttttttccgccctgacgaagcgcaccagccgcgctttaatgagctttttggtcaaatcatcaatgccgggcagggggaagggcgctactctgaactgctggcgattaacctgctggagcagcttctgctgcgacgtatggaggcgatcaatgaatcgttgcatccgccgatggacagccgggtgcgcgacgcctgtcagtacatcagcgatcatctggcggacagccagtttgatattgccagcgtggcgcagcacgtctgcctgtcgccgtcccgcctgtcgcacctgttccgccaacagttaggcattagcgtactgagctggcgcgaggatcagcgcatcagccaggcgaagctgctgctcagcacgacgcggatgccgatagccaccgtcgggcgcaatgtcgggtttgacgatcagctttatttctctcgcgtctttaaaaaatgtaccggggccagcccgagcgagttccgcgctggttgtgaataa

SEQ ID NO: 73828 - DNA, 768 bp, Citrobacter koseri
atgcaagcattgctggaacactttattctccaatccgctctgtactcgctaattgcggtggcgctggtggcctttctggagtcgctggcgttggtcggtctgattctgcccggtacggtgatgatggcggggctgggggcgcttatcggcagcggtgagctgaatttctggcatgcgtggctggcgggcattatcggttgcctgctgggggactggatctccttctggttgggctggcgcttcaaaaagccgctgcaccgctggtcttttatgaaaaagaacaaagcgctgctggataaaaccgaacacgcgctgcatcaacacagcatgttcaccattctggttgggcgttttgtcggcccgacgcggccactggtgccgatggtggcggggatgctggatctgcccgtcgcgaaatttatcgtgccgaatattattggctgcgtgctgtggccgccgttctatttcttgccggggattctggcgggcgctgcgatcgacatcccggccgatatgcagagcggctatttcaaatggctgttgttggcaacggcgctgctgctgtggctggcggcttggctgtgctggcggttatggcgtagcggtaaggccgccgccgatcgcttaacgccgtttttaccgcgaggccgcctgttatggctggcgccggtgatgctcagcgtgggcattgtcgcgctggtgatgctgcttcgtcatccgctgatgccggtgtatatcgatattctgcgtaaagtcgtgggttactga

SEQ ID NO: 73829 - DNA, 699 bp, Citrobacter koseri
atgttaaaactgactgatatcacctggctttatcaccatttgcccatgcgctttacactgtcggtagcgcgcggtgaacaagtggcggttctcgggccaagcggcgccgggaaaagtacgttgctgaatttaatcgccgggtttctgacaccggccagcggcacaataatgattgaaggtcaggatcacaccacgacaccgccctcccgccgtcccgtttccatgctgtttcaggaaaataatctgttcagccacctcaacgtgcagcagaacatcgggctggggttaaaccctgggctaaagctgaacgcggctcagcgggagaagctgcatcatattgcacgccagatgggaatcgaaaatctgctggagcgcctgccgggcgagctttccggcgggcaacgccaacgcgtggcgcttgcgcgctgcctggtgcgcgagcagccggtattgctgctcgacgagccgttttccgctctcgatcccgccctgcgtcaggagatgctgacgttggtcggcgacgtctgccgcgaccagcaattaaccctgctgatggtgtcgcatagcgtggaagatgccgcacgcattgcgtcacgctcgattgtcgtggccgacgggcgtatcgcatggcagggcaaaacggatgagttattaagcggtcaggccagcgcttcggcattactgggcattaaagcgtaa

SEQ ID NO: 73830 - DNA, 1611 bp, Citrobacter koseri
atggcaacgcgccgtcagccgctaattcccggctggctgatacccgggctttctgccgccgcgctgatggtggcagtggctctggcggcatttctggcgctatggcttaacgcgccgcagggtgaatggtcgtcgctgtggcaggacagctacctgtggcacgtcgtgcgcttctctttctggcaggcgttcctgtcggcgctactctccgtcatcccggcgattttcctcgccagagcgctctatcgtcgccgttttcccggacgtctggcgttattgcgcctgtgcgccatgacgctgattttaccggtgctggtcgccgttttcggtatcctcagcgtctacggtcgtcagggctggctggcctcgctgtggcatacgctggggctggagtggcatttctcgccctacggcttgcaggggattttactggcgcacgtcttttttaacctgccgatggcaagccgcctgctgcttcaggcgctggaaaacattcccggcgaacagcgacagctcgccgcgcagctaggtatgcgcggctggcacttcttccgctttgttgaatggccgtggctgcgtcgtcaaatcccgccggtggcggcgctgatttttatgctctgtttcgccagtttcgccaccgtgttgtcacttggcggcggcccgcaggctaccactatcgagctggccatctatcaggcgctgagctacgactacgatcctgcccgtgcggccatgctggcgctgatccagatgatatgttgtctggcgctggtgctgctgagccagcggctgagtaaagccattgcccccggcgtcacgctggtgcaaggctggcgcgaccctgacgatcggctccacagccgcctgacggacagcctgctgatcgccctggcgctgctgttgcttctcccgccgctgctggcggttattattgatggcgtcaatcgcagcctgctggacgtgctggcgcaacccattttgtggcaggcgctgtggacctctctgcgcattgcgctggcggcgggagtgctgtgcgtcatcctgacgatgatgcttttatggagcagccgcgaactgcgcgcccgccagcaggtactggcaggccaggcgctggaactgagcgggatgttgatccttgccatgcccggcatcgtgctggcgaccggcttctttttactgctcaacaacagcgttgggctaccggagtcggctgacggtattgtgattttcaccaacgcgctaatggcgattccctatgcgctaaaagtgctggaaaaccccatgcgcgacgtgaccgcacgctacagtatgctgtgtcagtcattgggcattgagggatggtcgcggctgaaggtggtggaactgcgcgccctgaaacgccctctggcgcaggcgctggcctttgcctgcgtgctctccatcggtgattttggcgtggtggcgctgtttggcaacgacgatttccgcacgctgccgttttatctgtatcagcaaattggctcctatcgcagccaggatggcgcagttaccgcattattactgctgatgctctgctttatgctgtttaccgttatcgaaaaattaccggggcgaaatgttaaaactgactga

SEQ ID NO: 73831 - DNA, 984 bp, Citrobacter koseri
gtgttaaaaaaatgtcttcccttgctactcctgtgcgcagcgcctgccttcgccaaacctgttctgaccgtctatacctatgactccttcgctgccgactgggggcctggcccgacaatcaaaaaagcctttgaagctgactgtgattgcgaactgaagctggtggcgctggaagatggcgtttcgctgctcaaccgcctgcgaatggaagggaaaaacagcaaagccgacgtggtgcttggcctggacaacaacctgctggaagccgccacgcaaacccacctgttcgcaaaaagcggcattgcgcctgatgcggttaacgtgccaggcggctggcataacgacacattcgtgccgtttgattatggctacttcgccttcatctatgacaaaaacaaactgaaaaacccgccgaaaagcctgaaagaactggtagagagcgatcggaaatggcgcgtgatttatcaggacccgcgtaccagtacaccggggctgggtctgctgctgtggatgcagaaagtctacggcgataacgcgccggaagcctggcaaaaactggcggccaaaacggtcaccgtcaccaaaggctggagcgaatcctacggcctgttcctgaaaggcgaaagcgatctggtgctgagctacaccacctctccggcgtatcacatcatcgaagagaagaaagataactacgccgccgccagcttcagcgaaggtcattacctgcaagtggaagtggctgcgcgcactgccgccagcaaacagccggaactggcagaaaaattcctcaagtttatggtttcaccagcattccagaacgccattcccaccggcaactggatgtatccggtcgctgacgtcgccctgcccgcaggatttgaacaactgacgaagccatccaccacgctggaatttacgcctgcggaagtggcatcccagcgtcaggcatggattagcgaatggcaacgcgccgtcagccgctaa

SEQ ID NO: 73832 - DNA, 1656 bp, Citrobacter koseri
atgtcttcaggtcgtctgcaacaacagttcatccgtctgtggcaatgctgcgacggcaaaacgcaagacaccacgctcaacgagctggcggacctgctgagctgctcccgccgccatatgcgtacgctgctgaataccatgcaggaacgtggctggttgacgtgggaggcggaggtcggacgcgggaaacgctcccgtctgaccttcctctataccgggctggcgctacagcagcagcgggcggaagacctgctggagcaagatcgcatcgaccagctggtacagctggtgggcgacaaaaccgccgtgcggcaaatgctggtgtcccacctggggcgcagctttcgccaggggcggcatattctgcgcgtgctctactatcgtccaatgcacaacctgctgcctggcaccgcattgcgtcgttcagaaacccatatcgcccggcaaattttcagcgcactgacgcgcgtaaatgaggaaaatggggaactggaagccgatattgcccaccactggcaacagatttcccctttgcagtggcgtttttttcttcgtccggggattcacttccatcacggacgtgagctggagatggaggatgtcattgcctcactgacgcgcatcaacgccctgccgctctactcgcacattaccgagatagtctcccccaccgcctggacgctggatattcacctgtcgcagccggatcgctggctgccgtggctgctgggtcaggttccggcgatgatcctgccgcgggagtgggaaacgctgaataacttctccagccatccgatcggcaccggcccttacgcggtgatgcgtaatacgcgcaaccagttaaaaatccacgcctttgatgatttcttcggctatcgggcgctgattgatgaagtgaacgtctgggtattgccggacattggcgacgagccgaacggcggtctcacgttaaaagggccgaccgaagatgaaaaagccatcgaaagccgactggaagagggctgctactatatgctgttcgacgcccggacgaatcgcggcgcgaatcaggaagtcagagagtggataagccgcgtgctctcccccagcaatttgctcttctatgccgacgagcaataccagcgccactggttcccggcttacggattactgccccgctggcaccatgcccgcccgggacacggcgaaaaacccgccgggctggagacgatcacgctgacctactaccacgaccacatcgaacatcgggtgatcgcgcagatcatgagccagctgctggctgaacatcaggtccatctggatatccatgagatcgactacgatcaatggcatgcgggggaggtcacaagcgacatctggctcaacagcgccaactttacgctaccgctcgatttttccctgtttgcgcacctgtgcgaagtcccgctgttgcagcattgcatcccgctggactgggagggcgatgccgcgcagtggcgaaacggcgagatgaacctggcagtgtggtgccagcaattgctcgccagtaaagcgatcgtcccgctgatccaccactggctgatcatccaggggcagcgcagtatgcgcgggctacgtatgaacaccctcggctggtttgactttaaatcggcatggtttgcgccacccgacccatga

SEQ ID NO: 73833 - DNA, 123 bp, Citrobacter koseri
atgcgtcagttttatttgaagtactttaccgcgacagaagggttgtcctggttggcttgtccgagcgcgccgcagcgcttaaagatgcttgaagaactgatgcagtgggaggtgactgcctga

SEQ ID NO: 73834 - DNA, 1179 bp, Citrobacter koseri
atgctctggttaatgacgatgggacggcgcctcaacggtgtttatgccgcttttatgctggttgcctttatgatgggcgtggcgggagcgttgcaggcaccgacgctgagcctgtttttgagtcgtgaagttggtgcgcagccgttctgggtcggccttttttacacggtcaacgcgattgccgggattctggtcagccttgcattagcaaaacgctcggacagtaaaggcgatcgccgtaagctgattatgttctgctgcctgatggcgattggtaatgcgctactgttcgccttcaatcgccattatctcaccctgatcacctgcggcgtgttattcgcgtcgctggccaataccgccatgccgcagctatttgcgttggcgcgggaatatgccgataactccgcgcgtgaagtggtgatgttcagctcggtaatgcgtgcgcagctttcactggcatgggtgattggcccgccgctggcttttatgctggcgctgaactatggcttcacggcgatgttttccattgccgccggcatattcgccatcagcctggcgttgattgcttttattctgccctcggtggcgcgcgttgagcagcctgccgatgttccggtcacggaagcgggcggctggcaggataaaaacgtccgtatgctgtttatcgcctccacgctgatgtggacctgcaacactatgtacatcattgatatgccgctatggataagccttgagctgggtttaccggataaactggccggaatattgatgggaaccgcagcaggtctggagatcccggcgatgattctggctggctactcggtgaagcgcttcggtaagcggcggatgatggttatcgccgtggctgcgggggtactgttttatctcggcctgattttctttcacagccagacggcgttgcttatcctgcaactgtttaacgcggtgtttatcggcattgtggcggggattggtatgctgtggtttcaggatttaatgcctggccgcgccggttcagctaccacgctgtttaccaacagtatctccacgggagtgattctggcgggggtgattcagggcgcggtcgcgcaaagctacgggcatttcgctgtttactgggtgatagcggcgatttcgctggtggcgctggtgatgaccgggcgggtgaaggatgtgtaa

SEQ ID NO: 73835 - DNA, 606 bp, Citrobacter koseri
atggcagagaaatttacccaacacaccggcctggtcgtcccgctggatgctgctaacgtcgataccgacgcgattataccgaaacagtttttacagaaagtcacccgcaccggttttggcgcgcatctgttcaatgactggcgttttctggatgaaaagggtcagcagccgaacccggagttcgtgctgaacttcccggaatataaaggcgcgtcgattctgctggcgcgggaaaacttcggctgcggttcatcgcgcgagcacgcgccgtgggcgctgaccgattacggctttaaagtggtcatcgcgccgagctacgcggatatcttctatggcaacagctttaacaaccaactgctgccggtgaaactgagcgatgaagaggtcgatgaactgttcgccctggtgaaagccaatccggggattaaatttgaagtggatctggaagcgcagatagtaaaagcgggcgataagtcctacagctttaaaatcgacgacttccgccgccactgcatgttgaacggtctggacagcatcggcctgacgttgcaacacgaaagcgcaattgcggcatacgaagagaaacaaccgtcgtttatgcgctga

SEQ ID NO: 73836 - DNA, 1401 bp, Citrobacter koseri
atggctaaaacgttgtatgaaaaattgttcgatgcgcatgtggtctatgaggcgcagaacgaaaccccgctgctgtacatcgacaggcatctggtgcatgaagtgacctccccgcaggcgtttgacggtctgcgcgcccacggtcgcccggttcgccagccgggtaaaaccttcgctacgatggatcataacgtctctacgcaaaccaaagacatcaacgcctctggcgagatggcgcggattcagatgcaggagttgatcaaaaactgcaaagcgttcggcgtggagctgtatgacctgaaccacccgtatcaggggatcgtccacgtaatggggccggaacagggcgtgaccttaccggggatgaccattgtttgcggcgattcccataccgccacgcacggcgcattcggcgcgctggcgtttggcatcggcacctccgaagttgaacacgttctggcgacgcagaccctgaaacagggccgcgcaaaaaccatgaagattgaggtgaaaggcacggctgcgccgggcattacggcgaaagatatcgtactggcgattatcggtaaaaccggcagcgcgggcggtacgggccatgtggtcgagttctgcggcgaagcaattcgcaatctgagcatggaaggtcgtatgaccctgtgcaacatggcgatcgagatgggcgccaaagccggtctggtcgcgccggatgacaccaccttcaactacgtaaaagggcgtctgcacgccccgaaaggcagcgattttgacaatgccgtcgcatactggaaaaccctgaaaaccgacgacggcgcaacattcgataccgtcgtgaccctgcaagcggaagacattgcgccgcaggttacctggggaaccaacccgggtcaggttatctccgtcaacgacaacatccccgatccagcctcgtttgccgatcctgtcgagcgcgcaagcgccgaaaaggcgctggcctatatggggctgaaaccgggcattccgttaaccgacgtggcgatcgacaaagtgtttatcggttcctgcaccaactcacgtattgaagatttacgcgcggcggcggaaatcgccaaagggcgtaaagttgcaccgggcgttcaggctctggtggttcccggctccggcccggtaaaagcgcaggcagaggcggaaggtctggataagatctttatcgaagccggttttgaatggcgtttaccaggctgttccatgtgcctggcgatgaacaacgaccgactgaatccgggcgagcgctgcgcctccaccagcaaccgtaactttgaaggtcgtcaggggcgcggcggacgcacgcatctggttagcccggcgatggctgccgctgccgccgtcaccggtcatttcgccgatattcgcagcatcaaataa

SEQ ID NO: 73837 - DNA, 1092 bp, Citrobacter koseri
atgtcgaagaattaccatattgctgttttgccgggtgacggtattggcccggaagtgatggcgcaagccctgaaagtcctggaagccgttcgcagtcgttttgctatgcgcattaccaccagccattacgatgttggcggcgccgctatcgacaaccacggtcaaccgctgccgaaagcgaccgttgaaggctgtgaacaggcggatgccattctgtttggctccgtcggcggcccgaaatgggaaaatctgccgccggacagccaaccggaacgcggcgcactgctgccgctgcgtaaacacttcaaattgttcagcaacctgcgtccggcaaagctgtaccaggggctggaagccttctgcccgctgcgcgccgacatcgcggccaacggtttcgacatcctgtgcgtgcgtgaattaaccggcgggatctattttggtcagccgaaaggccgcgaaggcagcgggcaacatgaaaaagccttcgataccgaggtgtatcaccgttttgaaatcgaacgtattgcgcgcatcgccttcgaatcggcgcgtaaacgtcgccgtaaggttacgtcaatcgacaaagccaacgtcctgcaaacgtccattctgtggcgcgagatcgtcaatgaggtcgccaaagcgtacccagatgtcgaactggcgcacatgtacatcgacaatgccacgatgcagttgattaaagatccctctcagtttgacgtgctgctgtgctccaacctgtttggcgacattctgtctgacgaatgcgcgatgatcaccggctcaatggggatgttgccttccgccagcctgaacgaacagggtttcggcctgtatgaaccggcgggcggttctgcgccggatatcgccgggaaaaacatcgccaacccgatcgcgcagatcctgtcgctggcgttgctgctgcgttacagcctggatgctgacgatgcggcaaccgccattgaaagcgccattaaccgcgcattagaagaaggtattcgcaccggtgatttagcccgtggcgctgccgctgtcagtactgatgagatgggcgacatcattgcccgttatgtcgccgaaggggtgtaa

SEQ ID NO: 73838 - DNA, 1572 bp, Citrobacter koseri
atgagccagcaagtcattattttcgataccactttacgcgacggtgaacaggcgttacaggctagcctgagtgtgaaagaaaagctgcaaattgccctggcccttgaacgtatgggcgtcgatgtgatggaagtgggttttcccgtctcttcacctggcgattttgagtcggtacagactatcgcccgccaggtcaaaaacagccgcgtttgcgcgttagcccgctgcgtggaaaaagacatcgacgtcgcggcagaatcactgaaggtcgcggacgcttttcgcatccatacctttatcgccacctcgccgatgcatatcgccaccaagctgcgcagcacgctggatgaagtgattgagcgtgctatctatatggttaagcgtgcgcgtaattacactgatgacgtggagttctcatgcgaagacgcaggtcgtaccccgattgacgatctcgctcgcgtcgtggaagcggcgatcaatgcgggcgcgaaaacaatcaacattcccgataccgtgggctacaccatgcccttcgagttcggcggtattatttccgggctgtatgagcgcgtaccgaatatcgacaaggccatcatctccgtacatacccatgatgatttaggtctgggcgtcggcaacgcgctggcggccgtccacgcgggcgcgcgtcaggttgaaggcgccatgaacggtatcggcgaacgtgccggcaactgctcgctggaagaagtcatcatggcgatcaaggtacgccaggacattctgaatgtgcatacccgcatcaatcaccaggagatctggcgcaccagccagttggtcagtcagatctgcaacatgccgatcccggcgaacaaagcgattgtcggcagcggcgcgttcgcccactcctccggcattcaccaggacggcgtgctgaaaaaccgtgaaaactacgaaatcatgacgccagagtctatcggcctgaaccagatccagttgaacctgacctctcgctccgggcgtgcggccgtaaaacaccgtatggatgagatgggctataaagagagtgaatacaatctggacaacctgtacgacgctttcctgaagctggcggataaaaaaggtcaggtattcgattacgacctggaggcgctggccttcatcaataaacaacaggaagaaccagagcatttccgtctggactatttcagcgtgcagtccggctctaacgatatcgccacggcctccgtcaaactggcctgcggcgacgacatcaaagcggaagccgcgaacggcaacggcccggtcgatgccatttaccaggccatcaaccgcatcaccgattacaacattgaactggtgaaatacagcctgtcggcgaaaggccacggcaaagatgcgctgggccaggtggatatcgtcgccaactataacggccgtcgcttccacggggtcggtctggcgaccgatatcgtcgaatcctccgcgaaagcgatggtgcatgtcctgaacaacatctggcgcgccgccgaagtcgaaaaagaattgcaacgcaaagctcagaataaagagaacaataaggaaaccgtgtga

SEQ ID NO: 73839 - DNA, 945 bp, Citrobacter koseri
atgccagagatagaaatagataaaccgcatccgatagaaatggttaagcctcagcttcgtatggttgatctgaatttactgaccgtctttgatgccgtgatgcaagagcagaatatcacgcgggcggctcactccttggggatgtcgcagcctgccgtcagtaatgcggtggcgcgtctgaaagtcatgtttaatgacgagctgtttgtccggtacggacgcggtatccagccaacggcgcgcgcttatcagctatttggttccgttcgccaggcgttacagttggtgcaaaatgagttgcccggttcaggttttgaacccgccagcagcgagcgtgtattccatctttgcgtgtgcagcccgctggataatattctgacgtcgcttatttataatcgcgttgaaaagattgcgccgaatattcatgtcgtttttaaatcatcgttaaatcaaaatacggaacatcagctgcgttatcaggaaacggaatttgttattgggtatgaagagtttcgccgtcctgagtttaccagcgtatcgttatttaaagatgaaatggtgctggtcgccagcagaaaacatccgcgtatcagcggtccgttgctggagagcgatgtttataatgaacaacatgcggtcgtttcactcgatcgttatgcctcatttagccagccgtggtatgacacgccagacagacaaagctgcatcgcttatcagggaatggcgttgatcagcgtgcttaatgttgtctctcaaacgcaactggtggcagttgcgccgcgttggttagccgatgaatttgccgagtcattagcgttacagatattaccgttgcctttaaaactgaatagccggacctgttatctttcctggcatgatgccgcgggtcgggataagggtcatcaatggatggaagagttattggtttctgtctgtcaaaagtga

SEQ ID NO: 73840 - DNA, 1725 bp, Citrobacter koseri
atggagatgttgtctggagccgagatggtcgtccgatcgctcatcgatcagggcgtgaagcaggtattcggttatcccgggggcgcggtcctcgatatttatgatgcgctgcacacggtcggtggtatcgatcatgtgcttgtccgtcatgaacaagcggctgtgcatatggcggatggtctggcgcgggcaacaggtgaagtcggggtcgttctggtcacttccgggccaggcgccacgaatgcgatcaccggtattgccacggcctatatggactccattcctctggtcatcctttccgggcaagtggcgacgtcgttgattggctatgacgcctttcaggaatgcgacatggtggggatatcacgtccggtggtgaaacacagcttcctcgttaaacagacggaagacatcccgcaggtgctgaaaaaagcgttctggctggcggcaagcgggcgtcctggacccgtggtcgtggacctcccgaaagatattttgaatccggcgaaaaagttgccttacgtctggccggagtcggtcagtatgcgctcttataacccgaccacgacagggcataaagggcagattaagcgcgcgctgcaaacgctggcggcggcaaaaaaaccagtggtctacgtcggcggcggtgcagtgaatgcgggttgtcatgaacaactgcggcaaaccattgaagcgctcaacctgccggtcgtctcgtcgctgatggggctgggcgcattcccggccacgcatcgtcagtcgttagggatgctggggatgcacggcacctatgaagccaacatgactatgcatcattccgatgtgatttttgccgtcggggtacgttttgacgatcgcacgaccaataatctggcgaaatactgcccgaatgcgaccgtgctgcatatcgatatcgatccgacgtctatctctaaaaccgtgacggcggatattcccattgtgggcgatgcgcgcctggttctggagcaaatgctggaattactgccgcaggaagtcgcgcagcagccgctggatgatattcgcgactggtggcaacacattgaacgctggcgcgcccgtcagtgcctgaaatatgacacccaaagcgagagcattaaaccgcaggcggtgatcgaagctatctggcgtctgacgaaaggcgatgcgtatgtcacttctgatgtcggccagcaccagatgttcgccgcgctctactacccctttgataagccgcgtcgctggattaactccggcggtctcggcacgatgggctttggcctgccagcggctctgggcgtgaagatggcgctgccggatgaaacggtagtgtgcgtcacgggagatggcagcattcagatgaacatccaggagctgtcgacggcgctgcaatatgaactgccggtgctggtgctcaacctaaacaaccgctatctcggcatggtcaaacaatggcaggacatgatctactccgggcgccactcccagtcttacatgcagtcgctgcccgattttgtacgccttgccgaggcttatgggcatatcggtatccagattaatcatccagatgaactggagagcaagctgggcgaagcgctggaacatgtgcgtaaccatcgtctggtgtttgtcgatgtcaccgtcgatggcagtgagcatgtctaccccatgcagattcgtgggggcgggatggatgaaatgtggttaagcaaaacggagaggacctga

SEQ ID NO: 73841 - DNA, 492 bp, Citrobacter koseri
atgcgccggatattatcagtattgctggaaaacgagtcgggtgcattgtcgcgtgtgattggcctcttcgcccagcgtggatacaacattgaaagccttaccgtcgcgccgaccgacgatccgacgttatcgcgtatgaccatccagacggttggcgatgagaaagtcctggagcagatcgaaaagcagcttcacaagctggtagatgttctgcgcgtcagcgaacttgggcagggcgcgcacgttgagcgagaaatcatgctggtgaagattcaggccagcgggtacggaagggaagaggtgaagcgcaacacggagattttccgtgggcagattattgatgtcacgccttctatttataccgtccagctggcaggcaccagcgataagctggacgcgtttctggcgacgctgcgtgaagtggcgaaaattgttgaagttgcccgttccggcgtcgtcgggctttcgcgcggcgacaagatcatgcgttag

SEQ ID NO: 73842 - DNA, 1005 bp, Citrobacter koseri
gtgaaactggatgaaatcgctcggctggccggtgtatcgcgaacgactgcaagctacgttattaacggaaaagcaaagcaataccgcgtgagcgacaagaccgtcgagaaagtcatggcggtggtgcgtgagcataattaccacccgaatgctgtggccgccgggctgcgtgctggacgcacacgttctatcggactggtcattcccgatctggagaacacgagttatacccgtatcgcaaactacctggagcgccaggcgcgccagcgcggttatcaactgctgattgcctgctcagaagatcagccggataacgaaatgcggtgcatcgaacatcttctacaacgccaggtggatgcgatcattgtatcaacctcgttaccgccggagcatccgttctaccagcgctgggccaatggttcattccccatcgtggcgctggatcgcgcgctggatcgcgaacatttcaccagcgttgtcggggcggatcaggatgatgcggaaatgctggcggcagagttacgtaaattcccggcggaaacggtgctttacctgggcgcgttgccggagctgtccgtcagtttcctgcgcgagcaggggttccgtaccgcatggaaagacgatccgcgcgaagtacactatctgtatgccaacagctacgagcgggaagcggcggcgcagctgttcgaaaaatggctggaaactcacccgatgccgcaggcgctgtttaccacgtcgtttgcgctcttgcagggcgtgatggatgtgacgttacgtcgtgacgggaagctgccttccaacctggcgatcgccacctttggcgataatgaactgctcgacttcttgcagtgtccggttctggcggtcgcacagcgtcatcgtgatgttgctgaacgcgtcctggagatcgtcctggccagcctggatgagccgcgtaaaccgaagccaggtttaacgcgaatcaaacgtaatttgtaccgtcgcggtattcttagccgcagttag

SEQ ID NO: 73843 - DNA, 459 bp, Citrobacter koseri
atgttccggggagcaacgttagtcaatctcgacagtaaggggcgcttatctgtgcccacccgttaccgggatcaactgatcgagaacgctaccggtcaaatggtttgtaccattgacatccatcacccgtgcctgctgctttaccccctgcctgaatgggaaattatcgagcaaaaattatcgcgtctgtcgagcatgaacccggttgagcgccgcgtgcagcgtttactgttggggcatgccagcgaatgtcagatggatagcgcgggtcgcttattgatcgcgccgattctgcggcaacatgccgggctgacgaaagaagtgatgctggttggacagttcaataagtttgaactgtgggatgaaacgacctggtatcaacaggtcaaggaagatatcgacgctgagcagtcagtaaccgaaaccttgtcggaacgactgcaggacttgtctctataa

SEQ ID NO: 73844 - DNA, 945 bp, Citrobacter koseri
atgatgatggaaaattttaaacacactacggtgctgctggacgaggccgtaaacggtctgaacattcgccctgacggcatctacattgatgggacatttggtcgcggcggccactcacgtctgatcctctcccggcttggagaagagggacgtttgctggcgatcgatcgcgatccacaggctattgccgaagcccaggccatcaatgatcctcgcttctccatcattcatggacctttctctgcgcttgctgattatgtaagtgagcgcgaacttatcggcaagatcgacgggattctccttgatcttggcgtctcttcaccgcaactcgatgatgccgaacgtggtttttcttttatgcgcgatggcccgctggatatgcgtatggatccaacgcgcggtcagtctgccgcagaatggctgcaaaccgcagaagaagtcgatattgcctgggtgctgaaaacctttggcgaagagcgttttgcgaaacgtattgcccgcgccattgtggagcgcaaccgcgaacagcccatgacccgcaccaaagaactggcggaagtggtcgcagcggcgacgccggtgaaggacaaattcaaacatcccgcgacccgtaccttccaggcggtgcgcatttgggtgaacagtgaactggaggagatagagcaggcgctaaaaagctcgctcagcgtgctggccccgggtgggcggctttccattatcagtttccactcgctggaagatcgtattgtgaagcgctttatgcgtgagcaaagccgcggtccacaggttccagcagggttgccgatgacggaagagcagctcaaaaaactgggcggtcgtgagctaagagcattaggcaagttgatgccgggcgaagaagaagtggcggaaaatccacgcgcccgtagttcagttctgcgtattgcagagaggacgaacgcatga

SEQ ID NO: 73845 - DNA, 366 bp, Citrobacter koseri
atgatcagcagagtgacagaagccctgagcaaagtgaagggatcgacgggaatcaccaatcgccatgctttgcctggcgtgatcggtgacgatcttttgcgatttgggaagctgccactctgcctgttcatttgcatcattttaacggcggtcaccgtcgtgacaacggcgcaccatacgcgcctgttaaccgcacagcgcgagcaactggtgctggagcgtgatgcgctggatatcgaatggcgcaacctgattcttgaagaaaacgcgctcggcgatcatagccgggtagaacggatcgcaacggaaaagttgcagatgcagcatgtcgatccctcacaagaaaatatcgtagtgcaaaaataa

SEQ ID NO: 73846 - DNA, 1767 bp, Citrobacter koseri
atgaaagcagcggcaaagacgctcaaaccaaaacgccaggaagaacaagccaactttgtcagttggcgttttgcgttgctgtgcggctgtattctgctggcgctgggtttcctgctggggcgtgtggcctggctgcaaattattgcgcctgacatgttagtgcgtcagggcgacatgcgctctttgcgtgtacaggaagtctccacctctcgcggcatgatcaccgaccgctctggtcgcccactggcggtgagcgtgccggtaaaagccatctgggcggacccgaaagagctgcatgatgcaggcgggatcacgctggacaaccgctggaaagcgctggcggacgcgctgaaaatgccgctcgaccaactggcggctcgcgtcaatgcgaacccgaaaggccgctttatctatctggcgcgtcaggttaacccggatctcggcgattacatcaaaaaactgaagttgccaggcattcatctgcgcgaagagtcccgccgttactatccttccggggaagtgaccgctcacctcattggcttcactaacgtcgatagccaggggatcgaaggcgtcgagaagagcttcgataagtggctgaccggccagcctggtgaacgtattgtacgtaaagaccgctatggccgggttattgaagatatctcttctaccgacagccaggccgcgcacaatctggcgctgagcattgatgagcgcctgcaagcgttggtctatcgcgaactgaacaacgccgtggccttcaacaaagcggagtcaggcagcgccgtgctggtggatgttaatactggcgaagtgctggcaatggcgaacagcccgtcctacaacccgaataatctgaccggtacgccgaaagacgctatgcgtaaccgtaccatcacggacgtgtttgaacccggttcaaccgtcaaaccgatggtggtgatgaccgcgttacagcgcggggtcgtgcgtgaaaacaccgtgctgaacacggtgccatatcgaattaatggtcacgaaatcaaagacgtggcgcgttacagcgaattgaccctgaccggggttttacagaagtcgagtaacgtcggcgtttctaagctggcgttagcgatgccgtcctcagcgttagtagatacttactcacgttttgggctaggaaaggcgaccaatttggggttggtcggagaacgcagtggcttatatcctcaaaaacaacggtggtctgacatagagagggccaccttctctttcggctatgggctaatggtaaccccgttacagttagcgcgagtctacgcaacgattggcagctacggcgtttatcgtccgctgtcgattaccaaagttgatcctcctgtaccgggcgagcgcgtcttcccggaagcgaccgttcgtaccgtcgtccacatgatggaaagcgtggcgctgccgggcggcggcggcgtgaaggcggcgatcaaaggttatcgcatcgccattaaaaccggtacggcgaaaaaagtggggccggatggccgctacatcaacaaatacattgcttataccgcaggcgttgcgcctgcgagtcagccgcgcttcgcgctggtggttgttatcaacgatccgcaggcgggtaaatactacggcggcgccgtttccgcgccggtattcggtgccattatgggcggcgtactgcgcaccatgaacatcgaaccggatgcgctggcaacgggcgaaaaaagtgaatttgtaattaaccaaggcgagggaacaggtggcagatcgtaa

SEQ ID NO: 73847 - DNA, 1488 bp, Citrobacter koseri
gtggcagatcgtaatttgcgcgaccttctcgctccgtgggtgcctggcgcaccggagcgagcactgcgggagatgacactcgacagccgtgtggctgcatcgggcgatctctttgtggcagtggtgggtcatcaggcggacgggcgtcgatatatcccgcaggcgatagcgcaaggtgtggctgccattattgcagaggccaaagatgaggcgaccgacggggaaatccgtgaaatgcacggtgtgccggttatctatctgagccagctcaacgagcgtttatctgcactggcgggccgcttctaccacgagccatctgaacatatgcgtctggtcggcgtgaccggaacgaacggaaaaaccaccaccacgcaactgctggcgcagtggagccaactgcttggcgaaaccagcgcggtaatgggaacggtgggtaatggcctgttgggcaaagtgatcccgacggagaacacaaccggttccgccgttgacgtacagcatgtgctggccggtctggttgagcagggcgcaacattcggtgcaatggaagtctcttcccacggtctggtgcagcaccgggtcgccgcgctgaaatttgccgcctctgttttcacgaatttaagccgcgatcaccttgattatcacggtgacatggaacattacgaagcggcgaaatggatgctctattcaacgcaccattacggcgaggctatcgtcaatgccgatgatgaagtcggacgccgatggctggtgaggttgccggatgccgttgcggtctcgatggaggatcatatcaacccgaactgccacggacgttggctgaaagcggttgaggtgaagtaccacgatagcggcgcgacgatccgtttcgactccagttggggcgaaggcgagattgaaagccgtctgatgggcgcgtttaacgtcagcaacctgctgctggcgctggcaacgttgctggcgcttggctaccccctggcggatctgctgaaaaccgcccctcgactgcaaccggtttgcgggcggatggaggtgttcagcgcgccgggcaaaactacggtggtggtcgattacgcccacacgccggatgcgctggaaaaagcgttgcaggctgcgcggttgcactgtactggtcaactgtggtgcgtctttggctgcggcggcgatcgcgataaaggtaaacgtccgctgatgggggcgattgccgaagagttcgcggacgtggtggtcgtgacggacgataacccacgcaccgaagagccgcgcgcgatcattaacgacattctggcgggtatgctggatgccgggcacgcgaaagtgatggaaggccgcgcggaggcggtgacctgcgccattatgcaggcgaaagaaaacgacgtggttctggtcgcgggtaaagggcatgaggattaccagattgtcggtactcagcgccttgattactccgaccgcgtgacggctgcgcgtctgctgggggtgatcgcatga

SEQ ID NO: 73848 - DNA, 1359 bp, Citrobacter koseri
atgattagcgtaacgctcagccaactggccggtattctgcacggcgaattacagggcgccgacctgacgattgacgcggtcacgactgatacgcgtaaggtgacgccgggctgcctgtttgtggcgctgaaaggcgagcgtttcgacgcccacgattttgcggataacgcgaaagcgggcggcgccggtgcgctgctggtgagtcgtccgctggattgcgatctgccgcagctgatcgtcaaagatacgcggctggccttcggcgaactggccgcatgggttcgggcgcaggttcccgctcgcgtcgtggcgttaaccggctcctccggcaaaacgtccgttaaagagatgaccgccgccattctgagtcagtgtggcaacaccttatacaccgcgggcaacctgaataacgatatcggcgtaccgatgacgttgctgcggttaaacaacgattatgactatgccgtcattgagttaggcgccaatcaccagggcgaaatagcctggaccgtcggcctgacgcgtcctgaagcggcactggttaataatctggcggcagcgcacctggaaggattcggttcgctggcgggcgtggcgaaagcgaaaggcgaaatctataccggcttgccggtgaatgggatcgccattatgaacgccgataacaacgactggctgaactggcagggcattattggcgatcgcaaagtgtggcgtttttcaccgaatgccgccaacagcgattttaccgcgaccaatatccatgtgacctcgcacggtacggaattcacgctgcaaacgccgacgggcgacattgatgtcctgctgccgctgcctggtcgccacaatattgcaaacgcgctggcggcggctgcgctgtcgatggcggtgggggctacccttgacgccattaaaaccggtctggcgaacctgaaagccgtgccggggcgcctgttccccatccagttgaatgacaaccagctgttacttgatgactcctataacgccaacgtcggttcgatgaccgccgctgtgcaggtgctgtctgaaatgccaggctaccgggtgctggtggtcggcgatatggcggagctgggcgtggaaagcgaagcatgccatgttcaggtcggtgaagcggcaaaagcggcaggtatcgacagcgtgctgagtacaggaaaactgagtcaggcgatcggcaatgccagcggcgttggcgaacattttgcggataaatcggctctggtcgcgcgtcttaacacgctgattgcggagcatcagattattaccattttagtgaagggttcacgtagtgccgccatggaagaggtagtacgcgcattacaggagaatggaacatgttag

SEQ ID NO: 73849 - DNA, 1083 bp, Citrobacter koseri
atgttagtttggctggccgaacatttggtcaaatattattccggctttaacgtcttttcctatctgacgtttcgcgccatcgtcagcctgctgaccgcgctgttcatctccttgtggatgggcccgcgtatgattgcccgcttacaaaaattgtcttttggccaggtcgtgcgtaatgacggcccggaatcgcactttagcaagcgcggtacgccaacaatgggcgggattatgattctgacggcgattgtggtctccgtcctgctgtgggcttacccgtctaacccgtacgtctggtgcgtgctggtggtgctggtgggctacggcattattggttttgtcgatgattaccgcaaagtggtgcgtaaagacaccaaagggctgatcgctcgctggaaatatttctggatgtcggtaattgcgctgggcgtggcgttcgcgctgtatctggcggggaaagacacgccggccaccgaactggtggtgccgttctttaaagacgtgatgccgcaactgggtctgttctacgtgctgctggcgtacttcgtgatcgtcggaacgggcaacgcggttaacctgaccgatggcctggacggcctggcgattatgccgaccgtattcgtcgccgccggttttgcgctggtggcgtgggcaaccggcaacatgaacttcgccaactacctgcatattccgtacttacgccatgccggtgaactggtgattgtctgtacggcgattgtcggcgcgggcttaggcttcctgtggtttaacacctatccggcgcaggtctttatgggagacgtcgggtcgctggcgctgggcggcgcgctgggcatcatcgcggtgctgctgcgtcaggagtttttgctggtgattatgggcggcgtgtttgtcgtggaaaccctgtcagtcattttgcaggtcggttcctttaaattgcgcgggcagcgcatcttccgcatggcgccgattcatcatcactatgaactgaaaggctggccggaaccgcgcgttatcgtgcgcttctggattatttcgctgatgctggtcctgattggcctggcaacgctgaaggtacgttaa

SEQ ID NO: 73850 - DNA, 1317 bp, Citrobacter koseri
atggctgattaccagggtaaaaaagtcgtcattattggtctgggattgaccggactttcctgcgtggactttttcctggcgcgcggcgtaacgccgcgcgtaatggatacccgtgcgacgccgccgggtctggacaaattaccggaagcggtagagcgtcacgtcggcagcctgaatgatgactggctactggcggcggatctgatcgtcgccagccctggtattgctctggcgcacccttcactgagcgctgccgccgatgcgggtattgagattgtcggcgatatcgaactgttctgtcgcgaagcgcaggcgccgatcgtggcgatcaccggatcgaacggtaaaagcaccgtgaccacgctggtaggtgagatggcgaaagcggcgggcgtgaacgtgggcgttggcggtaacatcggtctgcctgcgttgatgctgctggacgccgctcgcgagctgtacgtactggagctttccagcttccagctggaaacgacatccagcctacaggccgttgccgcaaccatcctgaacgttaccgaagaccatatggatcgatatccgtttggtctgcaacagtatcgcgcggcaaaactgcgcgtgtatgagaatgcgaaagtttgcgtggtgaatgccgatgacgcgctgaccatgccggtacgcggcgcggatgcgcgttgcgtcagttttggcgtcaacatgggggattatcacctcaatcgccagcagggcgagacctggctgcgggtgaagggtgaaaaagtgttgaacgtgaaagagatgaagctttccggccagcacaactacaccaatgcgctggcggcgctggcgctggccgatgcggcgggtttaccgcgcgccagcagcctgaaagcgttgacgacctttaccggcctggcgcatcgcttccagctggcgctggagcataacggcgtgcgctggattaacgattccaaagccaccaacgtaggcagcacggaagcggcgctgaatggcctgcacgtagacggtacgctgcacctgctgctcggcggcgatggtaaatcggcggatttctcttcgctcacccgttacctgggcggcgatcgcgttcgcctgtactgctttggtcgtgatggcgcgcagctggcggcgctgcgcccggaaatcgcagaacaaactgagacgatggaagaggcgatgcgtctgctggcgccgcgtttgcaaccgggcgatatggttctgttgtctccggcctgcgccagcctcgatcagtttaagaattttgagcaacggggcgatgtctttacccgtctggcgaaggagttaggttga

SEQ ID NO: 73851 - DNA, 1245 bp, Citrobacter koseri
atgcgtttatctctccctcgcctgagaatgccgcgcctgccgggatttggaatcctggtatgggtctttacggcgcttaaaggctgggtgatggcgtcgcgcgataaagacgacgatagcctgatcatgtacgaccgcacgttgctctggctgacatttggcctggcggcgatcggtttcatcatggtgacgtcggcgtcaatgcctgtcggacaacgtctggcgaacgatcctttcctgtttgccaagcgtgacgcgctgtacatactcctggcgttttgcctggcgatgatcacgctgcgtttaccgatggagttctggcaaaagtacagcaccacgatgctgatcgcgtcgatcatcatgttgttgatcgtgctggtggtgggtagctcagttaacggggcatcgcgttggattgcgctggggccgctgcgtattcagcctgcggaatttaccaaactgtcgctgttctgctacctcgccaactatctggtgcgcaaagttgatgaagtgcgtaataacctgcgcggcttcttaaaaccgatgggcgtgattctggtgctggcgattttgctgctggcgcagcccgatctcgggacggtggtggtgctgttcgttaccacgctggcgatgctgtttctcgccggggcgaagttatggcagttcattgccatcatcggcatggggatatcggcggtgatcctgctgatcctcgccgaaccgtatcgtattcgccgtgtgacctctttctggaacccctgggaagatccgtttggcagcggctaccagctgacgcaatccctgatggcatttggccgtggtgagatgtgggggcaggggctggggaactcggtacaaaaactggagtatctgccggaagcgcatactgacttcatcttcgccattattggggaagaactgggttatatcggtgtggtactggcgcttttaatggtattcttcgtcgcttttcgcgcgatgtcgattggccgtaaggcgctggagattgatcaccgtttttcaggattcctggcctgctcgattggaatctggttcagcttccaggcgctggtcaacgtcggcgcggcggcaggcatgctgccaacgaagggtctgacgctgccgctgatcagttatggtggttccagtttactgatcatgtcgacggccatcatgtttttgttacgtattgattatgaaacgcgtctggaaaaagcgcaggcgtttacacgaggttcacgatga

SEQ ID NO: 73852 - DNA, 1068 bp, Citrobacter koseri
atgagtggtcaaccgaagcggttaatggtgatggcgggcggtactggcggacatgtgttcccgggactggccgtcgcgcaccatttaatggaccagggctggcaagtacgctggctcggaaccgccgatcgtatggaagcggatttagtgccgaagcatggcattgagattgatttcattcgcatttccggtttgcgcggaaaaggcgtgaaagcgctgctggcggcgccgctgcgtatttttaacgcctggcgccaggcgcgggcgatcatgaagcagtttaagcctgatgtggtgctcggcatgggcggctatgtctctggccccggcggtctggcggcgtggtcgctgggtattccggttgtgctgcatgagcaaaacggcattgcagggttgaccaataagtggctggcgaaaatcgccacgacggtgatgcaggcttttcccggcgcgtttccgaaagcggacgtggtcggaaacccggtacgtactgacgtactggcgctccccttgccgcaagaacgcctggccggacgtgaagggccgattcgcgtgctggtggtgggcggctctcagggggcccgggtattaaaccagacgctgccgcaggttgcggcaaaactgggcgatacggtcactatctggcatcaaagcggtaaaggagcgcagcagaccgtagagcaggcttatgccggggcggggcaaccgcagcataaggtgacggaatttattgatgacatggccgcagcctatgcgtgggcggatgttgtcgtttgccgctctggcgcgttaacggtgagtgaaatcgccgccgccggtttgcccgcgctgtttgtgccgtttcagcataaagaccggcagcagtactggaatgccctgccgctggagaaagcgggggccgccaaaatttttgagcagccgcagtttactgtggatgccgtcgccagcaccctggccgggtggtcgcgagaaacgttattaaccatggcagaacgtgcccgcgctgcatctattccagatgccaccgagcgtgttgcaaatgaagtgagccgggctgcccgggcgtaa

SEQ ID NO: 73853 - DNA, 1476 bp, Citrobacter koseri
atgaatacacaacaactggcaaaactgcgttccatagtgcccgaaatgcgtcgcgttcggcacatccactttgtcggcatcggtggtgccggtatgggcggtattgccgaagttctggccaatgaagggtatcagatcagtggttctgatttagcgccgaatccggttacgcagcaactggcgaacctcggcgccaccattttctttaatcatcgcccggaaaacgtgcgcgatgcgagtgtggtggtggtttccagcgcgatctctgcggataacccggagattgtcgcggcgcatgaagcgcgtattccggtgatccgccgcgcggagatgctggcagagttaatgcgttttcgtcacggcatcgccattgccgggacgcacggtaaaacaacgaccaccgcgatggtctccagcatttacgcggaagcggggctggacccgaccttcgtcaacggtgggctggtgaaagcggctggcgtgcatgcgcgtttaggccacagccgttatctgattgcggaagcggatgagagcgatgcgtcgttcctgcatctgcaaccgatggtggcgattgtcaccaatattgaagccgaccatatggatacttaccagggcgacttcgaaaatttgaagcagacctttattaatttcctgcacaatttgccgttttatggtcgtgcagtgatgtgtgttgacgatccggtgatccgcgagctgctgccgcgcgtgggccgtcagaccacaacgtatggttttagcgacgacgctgacgtgcgtgtggaagagtaccagcaggttgggccgcaggggcattttacgctgctgcgtcaggataaacctgcaatgcaggtgacgctgaatgcgccgggccgccacaatgcgctgaacgcggcggctgccgtggcggtggcgaccgaagaaggaattgacgacgaggcgattctgcgcgcgctggaaagcttccagggcaccgggcgtcgcttcgatttcctcggtgaattcccgcttgagccggtaaacggtaaagcagggacggcgatgctggtcgatgattacggccatcatccaacggaagtcgacgccaccattaaggccgcgcgtgcaggctggccggataaaaatctggtgatggttttccagccgcaccgcttcacgcgtacgcgcgatctgtacgacgatttcgccaacgtgctgacgcaggttgacgcgctgttaatgctggatgtttacgccgcaggcgaagcgccaattccgggagcggacagccgttcgctgtgccgtacgattcgcggtcgcggtaaaattgacccgattctggtctccgatccggcgcaggttgcgcaaatgctggcgccggtattaaccggtaatgatttgattttggtgcaaggcgcgggaaatatcggcaaaattgcgcgcaccttagctgaaatcaaactgaagccgcaagcccaggaggaggagcaacatggctga

SEQ ID NO: 73854 - DNA, 921 bp, Citrobacter koseri
atggctgataaaatcgcggtcctgttgggtggaacctccgccgaacgtgatgtttcgctgaattccggcgcggcggtgctggccgggttacgcgaaggcggcgtggatgcgcatccgatcgatccgaaagaggttgatgtcaccctgctgaaatcaatgggttttcagaaggtgtttattgcgttgcatggtcgcggcggcgaagatggcacgctgcaagggatgctggatctgattggcctgccctataccggcagcggggtgatggcttcagcaatctcaatggataaactgcgcagcaaattgctgtggcagggcgccggattaccggttgcgccgtgggtggcattgacgcgcgctgagtttgaaaaaggacttagcgacgacgcgctaacgcgaatttctgcgctgggtttgccgctgattgtgaagccgagccgtgaaggttccagcgtcggcatgtcgaaagtggtagaagaaaatgctttgcaggcagcattagcattggcttttcagcatgatgaagaagtactgattgagaaatggctcagtggcccggaatttacggttgcgatactcggtgaagaaattttaccgtcaattcgtatccaacccgccggaaccttctatgattatgaggcgaagtatctctctgatgagacacaatatttctgcccggcaggtctggaagaggaacaagaggctattttgcagacattggtcctgaaagcgtggaccgcgttgggttgcaaaggatggggccgcatcgacgtcatgctggacagcgatggccagttttatctgctggaagcgaatacctcgccgggtatgaccagccacagtctggtgccgatggcggcgcgtcaggcgggcatgagcttctcgcagttggtggtacgaattctggagttggcggactga

SEQ ID NO: 73855 - DNA, 831 bp, Citrobacter koseri
atgtcgcaggctgcgctgaacacgcgaaacagtgatgaagaggtgtcttcttcacggcgcaataatggaacgcgtcttgcaggaatactgttcctgctgacggtgctctgcaccgtgtttgtcagcggctgggttgtgttgggctggatggaagacgcgcagcgtttgccgttgtcgaaactggtgttgaccggcgagcggcattacacgcgcaatgatgacatccgccagtcgattctggcgttgggcgcgccgggtacgtttatgactcaggatgtgaacattatccagagccagatagagcgtttaccgtggattaaacaggccagcgtcagaaagcaatggcctgatgaattgaagattcatctggttgaatatgtgccgattgcgcgttggaatgatcagcatatggttgatgccgaaggcaataccttcagcgtaccggcagagcgaaccagtaaacaggtattacccatgttgtatggcccggaaggcagcgcgagtgaagtgttgcaggggtatcgcgatatggggcaggtgctggctaaggacagattcaccctgaaggaagcggcaatgaccgcgcgtcgttcctggcagttgacgctgaataacgatattaagctcaacctcggcaggggcgatacgatgaaacgtttggctcgctttgtagaactttatccggttttacagcagcaggcgcaaaccgatggcaaacggataagctacgttgatttgcgttatgactcgggggcggcagtagggtgggcacccttacctccagaggaatctaatcagcaacagaatcaggcacaggcagaacaacaatga

SEQ ID NO: 73856 - DNA, 1263 bp, Citrobacter koseri
atgatcaaggcgacggacagaaaactggtagtaggactggagattggcaccgcgaaggttgccgctttagtaggggaagttctgcccgacggtatggtcaatatcattggcgtgggcagttgcccgtcgcgaggtatggataaaggcggggtgaacgacctcgagtcagtggtgaaatgcgtacagcgcgccattgaccaggcggagctgatggcggattgccagatttcctcggtgtatctggcgctttctggcaagcacattagctgtcagaatgaaattggtatggtgccgatctccgaagaagaagtgacgcaggaagatgtggaaaacgtcgtgcataccgcgaagtcggtgcgcgtgcgtgatgagcatcgtgtactgcatgtcattccgcaggaatatgcgatcgattaccaggaaggcattaagaatccggttggcctttccggtgtgcgtatgcaggcaaaagtgcacttgatcacatgccacaacgacatggcgaaaaacatcgttaaagcggtggaacgttgtggcctgaaagttgaccaactcatatttgccgggttagcggccagttactccgttttaacggaagatgaacgtgaactgggcgtctgcgtggttgatatcggtggtggtacaatggatatcgccgtttatactggcggggcgttgcgccataccaaggtaatcccttacgcagggaatgtcgtgaccagcgatatcgcgtatgccttcggtacgccgccgagcgatgctgaagccatcaaagtgcgtcacggctgcgcgctgggctctatcgtcggcaaagacgaaagcgttgaagtgccgagcgtgggcggtcgtccgccgcgtagtctgcaacgtcagacgcttgcggaggtgattgagccgcgttacaccgagctgctcaacctggtcaacgaagagattttgcaattacaggaacagcttcgccagcagggtgtgaaacatcatctggcggcggggattgtattaaccggcggcgcggcgcaaattgaaggtcttgctgcctgtgctcagcgcgtgttccatacgcaagtgcgtattggcgcgccgctgaatattaccggactgacggattatgcccaggagccgtactactcaacggcggtggggctgcttcactacgggaaagagtcccacttaagtggcgaagcggaagtggaaaaacgtgttacggcatcagttggctcgtggatcaagcgacttaatagctggctgcgaaaagagttttaa

SEQ ID NO: 73857 - DNA, 1152 bp, Citrobacter koseri
atgtttgaacctatggaactgaccaacgacgcggtgattaaagtcatcggcgtcggtggcggcggcggtaatgccgttgaacacatggtgcgcgagcgcatcgaaggtgttgaattcttcgcggtgaataccgacgctcaggcgttgcgtaagactgcggttgggcagaccattcagattggtagcggcatcaccaaaggtctgggcgcgggtgcaaacccggaagtcggtcgcaatgcggcggacgaagatcgtgaagcactgcgtgcagcgcttgacggcgcagacatggtgtttatcgcagcaggcatgggcggcggtaccggtaccggtgcagcgccagtggttgcggaagtggcaaaagatttaggtatcctgaccgttgccgtggtgacgaagcctttcaacttcgaaggcaagaagcgcatggcattcgcggagcagggtattactgagctgtccaaacatgtggactcgctgatcaccatcccgaacgacaagctgctgaaagtgctgggacgcggtatctccctgctggatgcgtttggcgcggcgaacgacgtgctgaaaggcgcggttcagggtatcgctgagctgattacccgcccgggtctgatgaacgtcgactttgcagacgtgcgcaccgtgatgtccgaaatgggctacgcgatgatgggctctggcgtggcaagcggtgaagaccgtgcggaagaagcggcagaaatggcgatctcttctccgctgctggaagatatcgatctgtctggcgcgcgcggcgtgctggttaacatcactgcgggcttcgacctgcgtctggatgagttcgaaaccgttggtaacaccatccgtgcttttgcgtcggataacgcgaccgtggttatcggtacttctctggacccggatatgaacgacgaactgcgcgtcaccgttgtggcaaccggtattggtatggacaagcgtcctgaaatcaccctggtgaccaacaaacaggtacagcagccggtgatggatcgttaccagcagcacggcatggcgccgctgacgcaagagcagaagccggtcgcaaaagtggtgaacgacaatacgccgcaaacggcaaaagaaccggattatctggatatccctgcgttcctgcgtaagcaagccgattaa

SEQ ID NO: 73858 - DNA, 918 bp, Citrobacter koseri
atgatcaaacaaaggacacttaaacgtatcgttcaggcgacaggtgtcggtttacataccggcaagaaagtcaccctgaccttacgccctgcgccggccaacaccggggtcatctatcgtcgcaccgacttgaatccaccggtagatttcccggccgatgccaaatctgtgcgtgataccatgctctgtacgtgtctggtcaacgagcatgatgtacggatttcaaccgtagagcaccttaacgctgctctggcgggtctgggtatcgataacatcgttatcgaagtcgatgcaccggaaatcccgatcatggatggcagtgctgctccgtttgtctacctgctgcttgatgcgggtattgatgagctgaactgcgccaaaaaatttgtacgcatcaaagagacggttcgcgtcgaagatggcgacaagtgggctgaatttaagccgtacaatggttttacgttggatttcaccatcgactttaaccatccggcgattgattccagcagccagcgctatgcgatgaacttctctgcggacgcgttcatgcgccagatcagccgtgcgcgtaccttcggtttcatgcgtgatatcgaatatttgcagtcccgtggcctgtgcctgggcggcagcttcgattgtgccatcgttgttgacgattatcgcgtactgaacgaagacggtctgcgttttgaagacgaatttgttcgtcacaaaatgctcgacgcgatcggtgacttgttcatgtgcggtcacaacattattggtgcgtttaccgcgtataagtccggtcacgcattgaataacaaactgttgcaggctgtcctggcgaaacaggaagcctgggaatatgtgaccttccaggacgacgcagaactgccgttggctttcaaagcgccttcgactgtactggcataa

SEQ ID NO: 73859 - DNA, 507 bp, Citrobacter koseri
gtgagtggaatactgacgcgctggcgacagttaggtagacggtacttctggccgcatctcttattggggatggtcgcggctagctttggtctgcccgctctcagtaacgcagccgagcctaatacgccggcgaaagcgaccgccagtaaccacgatcaatccgttaaggttaacttcagccagctcgcgctgctggaggcgagtaaccgccgcccgaattttaccgtcgactactggcatcagcatgcgattcgcacggttatccgccatctctcttttgccatggcgccgcaaacgctgccggttgttgaagagtcttcgccacttcaggcgcaccatattgcgttactgaacacgctcagcgcgatgctgacgcaggaaggcacaccgccaacgattgtacgtcgcgtagcccgtgcgcactttacgcctcaggcctcatttagcgttcccgcctggataagtcaggcgcagggaatccgcgctggccctcaacgcctcagctaa

SEQ ID NO: 73860 - DNA, 2706 bp, Citrobacter koseri
atgctaatcaaattgttaaccaaagtattcggtagtcgtaacgatcgtaccttgcgtcgtatgcgtaaagcggtcggcatcatcaatgccatggaaccggagatggaaaaactctccgatgacgaactgaaagggaaaacggcagagtttcgcgcgcgtctggagaaaggcgaaagcgttgaaagcctgatcccggaagcgttcgccgtggttcgtgaagcgagtaagcgcgtattcggcatgcgtcactttgacgtccagttgctgggcggtatggtgctgaacgatcgctgtatcgcggaaatgcgtaccggtgaaggtaaaaccctgaccgcaacgctgcctgcttacctgaacgcgttaagcggtaagggcgtacacgtcgtcacagtgaacgactatctggcgcaacgtgatgctgaaaacaaccgcccgctgtttgaattcctcgggatgagcgtcggtattaacctgccgggcatgcctgccccagcaaaacgtgaagcttacgccgccgacatcacttacggcaccaacaacgaatacggctttgactacctgcgcgataacatggcgttcagcccggaagagcgcgtacagcgtaaactgcactatgcgctggtggatgaggtcgactccatcctgatcgatgaagcgcgtacgccgctgatcatttccggcccggctgaagacagctcggaaatgtacaagaaagtaaacaagatcatcccgcatctgattcgccaggagaaagaagactctgataccttccagggtgaaggccacttctccgttgatgagaaagcgcgtcaggtcaacctgacggaacgcggtctggtgctgatcgaagaactgctggtgaaagaaggcattatggatgaaggcgagtccctgtactctccgggcaacatcatgctgatgcatcacgtaaccgccgcgctgcgcgcgcacgcgctgtttacccgcgacgtggattacatcgttaaagatggcgaagtgattatcgttgacgaacacaccggtcgtaccatgcagggtcgccgctggtccgacggtctgcaccaggctgtggaagcgaaagaaggcgtggaaatccagaacgagaaccagacgctggcatccatcaccttccagaactatttccgtctgtatgagaaactggccggtatgaccggtaccgcagataccgaagcgttcgaattcagctccatctataagctggataccgttgtggttccgaccaaccgtccgatgatccgtaaggatatgccggatctggtctacatgaccgaagcggaaaaaattcaggcgatcattgaagacatcaaagagcgtaccgcgaacggccagccggtactggtgggtacgatctcgatcgaaaaatctgaagtggtctctaatgagctgaccaaagcgggcatcaagcataacgttctgaacgccaaattccacgccaacgaagcggcgattgttgcacaggcgggctatccggctgcggtcactatcgccaccaacatggccggtcgtggtacggacatcgtgctgggcggtagctggcaggctgaagtggcggagctggaaaacccaacgccagagcagatcgcgcagatcaaagcggactggcaggttcgtcatgaggcggtgctggcgtcaggcggtctgcacatcatcggtactgagcgccacgaatctcgccgtatcgacaaccagttgcgtggtcgttccggtcgtcagggtgatgcgggctcttcccgtttctacctgtcaatggaagatgcgctgatgcgtatttttgcctctgaccgtgtgtcgggcatgatgcgtaaactgggtatgaaaccaggtgaagccattgagcacccgtgggtgactaaagcgattgctaatgcgcagcgtaaagttgaaagccgtaacttcgatattcgtaagcagctgctggaatacgacgatgtcgcgaacgatcagcgtcgcgctatttacacccagcgtaacgaactgctggatgtcagcgacgtcagcgaaaccatcaacagcattcgtgaagacgtctttaaagtgacgatcgatgcgtacattccgccgcagtcgctggaagagatgtgggatattccgggtttgcaggaacgtctgaaaaacgacttcgatctggatatgccaattgccgagtggctggataaagagccggagctgcacgaagagacgctgcgtgagcgtattctggcgcactcaatcgaagtgtatcagcgtaaagaagaagtggttggcgcagagatgatgcgtcacttcgaaaaaggcgtcatgctgcaaactctcgattcgctgtggaaagagcacctggcggcgatggattacctgcgtcagggtatccacctgcgtggctatgcgcagaaagatccgaagcaggaatacaaacgcgagtccttctccatgtttgcagcaatgctggaatcgctgaagtatgaagtggtcagtacgctgagcaaagttcaggttcgtatgcctgaagaagtggaagcgatggaacaacagcgccgcgaagaagccgagcgtttagcgcagatgcagcagctcagtcatcaggatgacgacagcgcagcggcggccgctctggcagcgcaaacgggcgatcgtaaagtgggtcgtaacgatccttgcccttgcggttccggtaaaaaatacaaacagtgccacggccgtctgagctaa

SEQ ID NO: 73861 - DNA, 390 bp, Citrobacter koseri
atgaaaaaactgcaaatcgctgtcgggattattcgcaacccgaaccacgaaatttttattacccaacgtgcggccgatgctcatatggccaataaactggagtttcccggcgggaaaatcgaagcgggcgaaacgccggagcaggcgctgatccgggagttgcaggaagaagtggggatcaccccgcgtgaagcaacgctatttgaaaagctggaatatcagttcccggacaggcacatcacactgtggttctggttagttgatcactgggaaggggagccgtggggaaaagaggggcaaccggggcggtggattgcgcaagatgctctgaatgcggaagatttcccgcccgcgaatgcgccagtaattgaaaaactgattgctggctaa

SEQ ID NO: 73862 - DNA, 195 bp, Citrobacter koseri
atgtcagaaactatcaccgttagctgcccaacctgcgggaaaaccgttgtctggggcgaagtgagtccgttccgtccattttgttctaaacgctgccagttgatcgatctcggcgagtgggccgctgaagagaagcgtattccaagctctggcgacttgtcagaaagcgacgactggagtgaagaacagaagtaa

SEQ ID NO: 73863 - DNA, 744 bp, Citrobacter koseri
atgcacacccaggtcctttttgaacaccctctcaatgagaagatgcgtacatggctgcgcattgagtttctgattcagcaactctccgtcaatttacccctcgcagatcatgcggacgctctgcattttttccgtaacatcggggatttgctggatgtgttcgaacgtggtgaagtgcgaaccgagttgctaaaagagcttgagcgtcagcagcgcaaacttcaggcctgggttgaagtgccgggggttgaccagagtcgaattgaggctctgcgccagcaattgaagacggcgggcagcattctgatttctgctccgcgtatcgggcagcagttacgtgaagatcgcctgattgctctggttcgtcagcgcctgagtattcctggcggttgttgtagttttgatttgccgaccctgcatatctggctgcatttgccgcaggaacagcgtgatgcgcaggttgaaacctggatcgccagcctgaatccgctcaatcaggcattaacgctgatcctggatttgattcgtaattcctcgccgttccgtaagcaaaccagtctgaatggtttttatcaggacaatggcgatgatgccgacctgctgcgtttgcaactggcgcttgattcacagctctatccgcaaatttccgggcataagagccgctttgcgattcgctttatgccgctggatagcgaaaatggcctggtgcctgagcgcctcgatttcgaactggcatgttgttaa

SEQ ID NO: 73864 - DNA, 621 bp, Citrobacter koseri
atgaggtatacagtagccttaaccggcggcattggcagtggtaaaagcaccgttgcgaatgcattcgctgacctcggaataaacgttatcgacgccgatattattgcgcgtcaggtggttgaacccggtcaacccgcccttatggcgatcgctgaacattttggttctgcacttatcgcgccagacggttcgctacaacgtcggatgttgcgcgaacgtatctttgccagtcctgaagagaaatcctggctgaatgccctgctccatccgttaattcagcaggaaacccggcgtcagtttcagcaggcaacgtccccttacgtgctatgggttgtgcccctgctcgtcgaaaatgcgctgtataaacaagccaatcgcgttctggtggtcgacgtgacgcccgaaacgcagctcttgcggaccatgcagcgcgatgatgtgacgcgtgaacatgttgaacaaattctggctgcccaggcaacgcgtgaagcacgccttgccgtggcagatgatgttattgataataatggcgcaccggacgctatcgcgtcggatgttgcccgcctgcacgcgcgctatttacagcttgcgtcgcagtttgtctcacaggaaaaaccgtaa

SEQ ID NO: 73865 - DNA, 1044 bp, Citrobacter koseri
atgcgtatcgaagaagatctgaaattaggtttcaaagacgttcttatccgccctaaacgctctactctcaaaagtcgttctgatgttgaactggaacgtcaattcacctttaaacattcaggtcagacctggtccggcgtgccgattatcgcggccaatatggacaccgtcgggactttcgagatggcaagcgctctggcatcgttcgacattctgactgccgtacataagcactattccgttgaggactggaacgccttcaccagtaccgcctctgaggatgttctcaggcatgtgatggtttcaacaggcacctccgatgctgatttcgaaaaaaccaaacagattctggcgcagagcccggcactgaactttgtttgtattgatgtggcaaatggttactccgaacacttcgtgcagtttgtttcaaaggcgcgtgaagcatggccgacaaaaaccatttgtgccggtaacgtggtgaccggtgaaatgtgtgaagagttggttctctccggcgcggatattgtaaaagtcgggattgggcctggctccgtatgtaccacgcgtgtgaaaactggcgtgggctatccgcagctttctgcggtgattgaatgcgccgatgccgcgcatggtctgggcggtatgattgtcagcgatggcggatgcaccatgcctggcgatgtcgcaaaagcgttcggcggcggcgcggatttcgtgatgctgggcggtatgctggcaggccatgaagaaagcggcggtaaaattgttgaagagaatggcgagaaatttatgctgttctatggcatgagttctgaatccgctatgacccgtcacgttggcggcgttgcgcaatatcgtgcagcagaagggaaaaccgttaagctgccgctgcgtggcccggtggaatacaccgcgcgtgatatcctcggtggcctgcgttcagcctgtacctacgttggcgcctcccgtctgaaagagctgacgaaacgcacgacgtttattcgggtacaggaacaagaaaaccgcgttttcaatagcctgtaa

SEQ ID NO: 73866 - DNA, 1236 bp, Citrobacter koseri
ttgaagaacttttgcgcgttctggggctaccccatgtcagctaaacagctttggcgctggcaagggattaacgccacgggccattcggaagagggggcattatgggctgacgatcgtgccgcactgctcgttgctctggagcatcagcacatcatgccgatacgcgcaaaacgcctgagcgttaaagcggcacactggcgcgcagaacaaagcgcggagatcgtccaccaactggcgacgcttctcaaagcggggcttacgctttccgaaggactgacattgcttgccgggcagcatcccagtcgacaatggcaggcgctgctgcaaacgctggcccataacctggagcaaggcgccccgctttcttccgcgctggcgcaatggccgcaggtctttcctccactctatcaggcgatgatccgtaccggggaacttaccggaaaactcgatgaatgctgctttgagctggcacgtcagcaaaatgcccaaaaacaacttgctgacaaagtcaaaaaagcgctgcgttatcccatcataattctgacgatggccgtgatggttgttttcaccatgctgcactttgtcctgccagagtttgccgctatttaccggacattcaatacgccgttaccggcactgacgcagggcatcatcacactggcgcagtggagtgcccaatggggctggctgatggcgctgcccggtatcgcaacgggggtaatctacggtttgataataaaaaaaccgtactggcagattcaacgccagcgtcttctgctgcactgtcccgttatcgcacgcctggtcagaggccaaaaactcacgcagattttcaccatcctggcattaacgcaacgcgccggaatccccttttcacaagggctggaaagtgtcgcagaaaccctgaattgcccttactggtctcagcgtttagctcaggttcatcgcgatattcatgccggaaaaccggtctggcaggcgcttaaaaatgccggtgagttcagcccattgtgcatacagttggtcatgaccggtgaaacttccggcgcgctggatgcaatgttgcataaccttgcccggcaccacggcgagaatacgctatcgctggcggataacctggcggcgctactggaacccgccttgcttgttatcacaggggtcattattggtacgttggtcgtggcaatgtatttgcccgttttccatctgggggatgcgatgagcggtatgggataa

SEQ ID NO: 73867 - DNA, 1386 bp, Citrobacter koseri
atgaacatcacgcaacttacggcgctgtgcctgcgtcatcagggaatattgctcgatgccgataacgaggtggttcacgtcgcggtcgtagattcaccgtcccatgaactgctggacgccctgcactttgccacaacaaagcggatcgacattgtctgctggactcgtcagcaaatggaaggccatatgcataagccgcggaaaatgctcccggccgtcatcgccgacgatagccgcacggcggcggaacttttgcagcagacgctggaatccgcgctggcaaaacgcgcttccgacatccacattgaacctgcggaaaaccactaccgaatcaggctgcgcgtggatggcgtacttcatgccttgcccggcgtgtcatccgtcactggcgcggcactgacggcaaggttaaaggtactgggcaatctggatattgccgaacatcgactcccgcaagacgggcaatttaccgtgacgattgcgggcaatgcggtttcatttcgtgtcgcggtcctcccctgccgggacggtgagaaagtggtactgcggttacttcaccaggtcgagcaggcgcttgatctcaacgcgttaggcatgtttgatacgcaactcgccctgctcatgcaggcgctacggcaaccgcagggactggttctggtgacaggccctaccggcagtggaaaaaccgtaacgctctacagcgcgctacaggcgcgcaacacccaggatgtgaatctctgtagcgtagaggacccggtcgaaattcctgtcgagggccttaatcagacacaaattcatccgcgcgccggacttacctttcagagcgtattacgcgcgctgctgcgtcaggaccccgacattataatggtgggtgaaatccgtgatggcgaaacggcagaaattgcgattaaagccgcgcaaaccggccacctggtgctgtccacgctgcataccaactccaccagtgaaacgctgatacgtttacaacagatgggcgtcgcgcgttggatgatctcatccgccctgacgctggtcgtcgcccagcgactggtcagaaaattatgtccgtactgccgtcatcttgccgcagagcctgtctcgcttcccgccgcgctatggcctaccacgcttccccgctggcaagcgcccggttgcgaacgttgctaccacggattttatgggcgtaccgcgctcttcgaggttttgcctgttacgcccgcattgcgacagttgcttatcaacaatgcaaccgttgaggcgctggagtcctgcgcccgacaggaagggatgagtacgctttttgagaacggctgtcatgcggttgaacaaggattgacgacctttgaagaacttttgcgcgttctggggctaccccatgtcagctaa

SEQ ID NO: 73868 - DNA, 438 bp, Citrobacter koseri
atggacaaacaacgcggatttacgcttatcgaactgatggtggtgatcggcattatcgccatcctgagcgccatcggcattccggcctaccagaactacctgcgcaaagccgcactgacggatatgttgcagacattcgtaccttaccgtaccgccgtcgaactctgcgcgctggaacacggcggcattgcaacctgcgacgccagcagcaacggcatcccctctccgaccaccacccgctacgtctctggcatgagcatagaaaaaggcgtggtaatgctcaccgggcaggagagcctcaacggtctgagcatcaccatgacgcccaactgggataacgccaacggcatcaccggctggacgcgcagttgcaacatccagagcgacagcgcgctgcaacaggcctgtgaagatgttttccgctttgacgccagctaa

SEQ ID NO: 73869 - DNA, 894 bp, Citrobacter koseri
atgccgcctcgccgctacaaccctgactaccgacgtgacgcgctgttggaacgcataaatctggatatccccaccgctgtcgcccaggcgctgcgtgaagatttaggcggagaagttgacgcaaataacgatattaccgcgcagcttttaccggagaacacccgttctcacgccacggtgattacccgtgaagatggcgtattctgcggaaaacgttgggtagaagaggtctttattcaactggccggcgatgatgtcagcatcacctggcgcgtacaggacggcgacagcattaaagccaaccagccgctgtttgaactggacggcccgtctcgcatcctgctgaccggcgagcgcaccgcgttgaactttgttcagacgctttccggcgtcgcaagcgaagtccgtaaatacgttgatttgctggcggggacaaaaacgcaactgctggacacccgcaaaaccctgccgggtctgcgaaccgcattaaaatacgccgtattgtgcggcggcggcgcgaatcaccgcctggggctttccgacgcctttctgattaaagagaaccacatcatcgcttccggctcagtgcgccaggcggtcgagaaagccttctggctgcatcctgatgtgccggttgaagttgaagttgagaatctggatgagctggacgacgcgctgaaagcgggcgcagacatcatcatgctggataacttcgaaacggatcagatgcgtgaagcggtgaaacgcaccaacggacaggcgcggctggaagtttccggcaatgtcactgatgaaaccctgcgcgaatttgccgaaaccggtgtggattttatctccgttggcgcgctgaccaaacatgtgagagcgctcgatctctccatgcgttttcgctaa

SEQ ID NO: 73870 - DNA, 564 bp, Citrobacter koseri
atgctgttagacaagggctggctggcggaggcgcgacgcgtcccctctccccattttgactgccgcccggatgacgaaaccccttctttgctggtggtgcacaatatcagcctgccgccaggcgagtttggcggtccgtggattgatgcgctattcaccggaacactcgatcccgctgcccatcctttttttgccgagattgcccatttgcgcgtttcggcacattgtctgattcgccgtgatggcgaaattgtgcagtatgtccctttcgacaagcgtgcctggcatgcgggcgtgtcgaactatcaggggcgtgagcgctgtaatgatttttccattggtatcgagctggagggaacggacacgctggcttataccgatgcgcagtatcagcaactggccgccgtgacgcgcacgctgattgcgctttacccggcgatagccgacaacatgaccggacactgcaatattgcgcctgagcgtaaaaccgatcccggtccgtctttcgactgggcgaagtttcgcgcgctggtcaccgcctcgtcacacaaggagatgacatga

SEQ ID NO: 73871 - DNA, 855 bp, Citrobacter koseri
atgacgctgtttacgacattactggtgctgattgttgagcgcctgttcaagctgggtgagcactggcacctcgaccaccgactggaggtcctgttccgccggacgacgcatttttcgatggtgcgtacgctggggatgacgattgttgcgatggcggtgacgttcctgctgctgcgtgcgctggaaggtttactgtttaacgctcccacgctggtggtctggatactgattggtgtgttgtgtattggcgctgggaaggttcgtctgcattatcacgcgtacctgaacgcggcttcccgtaatgatacccatgcccgtgaagcgatggctaacgaactgacgctgatccacggcgtgccgccagactgcaacgaacgggagtttttgcgcgagctgcaaaatgcgctgctctggataaatttccgcttctatctggcgccgctgttctggtttattgtcggcggcccgtgggggccggtgacgctggtcggctatgcgtttctgcgcgcctggcagtcctggctggcgcgttatcaaacgccgcatcaacgtttacagtccggcattgatgcgattcttcatgttctggactggattccggtgcgtctggctggcgtggtttatgcgctgctggggcatggcgagaaagcgctgcctgcctggtttgtttcgctggcggatctgcgcacgtctcagtaccaggtgttgacgcgtctggcgcagttctcactggcccgcgagccgcacacggataaggtcgaaacgccgaaagccgctgtctcaatggcgaagaaaacgtctctggtggtggtggtggcgatcgcacttctgaccatttacggagcgctggtgtaa

SEQ ID NO: 73872 - DNA, 951 bp, Citrobacter koseri
atgcaaaactggcccaacccgtttattgaacaacgcgccgatccgtttattcttcgcgacggcaaccattattactttatcgcctcggtgccggagtatgaccggctggagatccgtcgggcaaactcgctggaaaacttacgcaccgcctcccctgtcgttgtctggcgtaaacctgaaagcggcccgatgtgcgagcttatctgggcgccagagattcaccgcatcgacggcaagtggtacatctatttcgccgccgcgcatacccaggcgctcgacaaactgggaatgttccagcaccgtatgtttgtcctggagtgtacagatgccgacccactcagcggcgtctgggaagaaaaaggtcagatcaaaacaccatttgataccttcgcgctggatgccacgacttttagccatcagggaaaacagtggtatttgtgggcgcagaaagcgccggatatcgccggaaattccaatatctatcttgccgggctggaaaatccgtggacgatcaaaggcgcgccggtgatgctcagcaagccggaatacgactgggagtgccggggttttcgcgtcaatgaagggcctgcggttatcacgcacggcgataagctgtttatcagctattccgccagcgccaccgacgaaaactactgtatgggtctgctgtggattgatatgcatgccgatccgcaaaacccggcaaactggcacaaatcaccgcgtccggtctttaccaccagcaatgaaaactgccagtatgggccagggcacaacagctttacccaaacgccggaaggcgatgatgtactggtctaccatgcgcgaaattatacggagattgaaggcgatccgctgtacgatccgaaccgtcatacccgcctgaagctgattcgctgggacgaaaacggaatgccagattttggcatcccgcctgcggataccgtctga

SEQ ID NO: 73873 - DNA, 1407 bp, Citrobacter koseri
atggaaaagggtaagctgtcgataaaagaaaaaatcggctatggcatgggtgacgccggatgcaacatcatctttggcgccataatgctgtttgttaactatttttatacagatatttttgggctggctcccgctctggtcggcgtattactcctctccgttcgcgtgattgatgccgttaccgacccgattatgggcgcaatcgccgatcgtacccaaagcaaatacgggcgatttcgtccctggctgctgtggattgccttcccttatgcgctgttcagcatcctgatgttcaccaccccggaatggacatataacagcaaggttatctatgcgtttgtcacctattttctgctgtcgattacctacaccgccatcaatattccctactgctcattaggcggcgtcatcaccaacgatccgcaagagcgcgtggcctgccagtcataccgctttgtgctggtcgggattgccactctgctgttgtcattaacgctgctgccgatggtggagtggtttggcggcgacgataaagccaaaggctaccagatggcgatgaccgtactggcgattatcggcatgtgcatgttcctgttctgcttcgccaccgttcgtgaacgcattcgtcctgccgttcctacccatgatgacatgaagaacgatttcaaagacgtatggaaaaacgatcaatgggtgcgcatcctgctgctgacgttgtgcaacgtctgtccgggttttatccgcatggcggcaaccatgtattacgtgacctgggtaatggggcaaagcactcacttcgccacccttttcattagccttggcgtggtgggaatgatgatcggcagtatgctggcgaaagtgctgaccgaccgctggtgcaaactgaaggtcttcttctggaccaatatcgcgctggcgctgttctcctgcgccttttacttcttcgatccaaaagccactacgcttatcgtggtgctctacttcctgcttaacatcctgcatcagatcccttccccgctgcactggtcgctgatggcagacgtcgatgactacggcgaatggaaaaccggcaagcgcatcaccggcatcagcttttccggcaacctgttcttcctgaaactgggtctggcgattgccggagcaatggtcggtttcctgttatcctggtatggctacgacgctggcgccaaagcgcagagcgatacggcaatcggcggtattgttctgctcttcacggtgatccccggcgtcggctatctgatcaccgccggcgtggttcgcctgctgaaagtggatcgcgaactgatgaaacagattcagaaggacctggaaaaacgccgcgccagctaccgcgagctcaacgatgacccgcaatttaacgtcgctgaaacagtaaggaaagcctga

SEQ ID NO: 73874 - DNA, 1371 bp, Citrobacter koseri
atggaaggtcaacagcatggcgagcagctaaagcgcggtcttaaaaaccgccatatccagctaatcgccctggggggcgcaatcggtaccgggctgtttctgggcagcgcatccgttatccagtcagcagggccagggattattctgggttatgccatcgcgggctttatcgcttttctgatcatgcgtcagttaggtgaaatggtggttgaagagccggttgccggttcgttcagccacttcgcctataaatactggggcggatttgcaggcttcgcttccggctggaactattgggtgctgtatgtgctggttgcgatggcggaactgacggcggtcgggaaatacattcagttctggtggcctgaaatccccacctgggtctccgctgcggccttctttgtgctcatcaacgccatcaacctgaccaacgtgaaagtgtttggtgagatggagttctggtttgccatcattaaagttatcgcagtggtggcgatgatcctcttcggcggctggctgctgtttagcggcaacggcggcccgcaggcaaccgtgcgtaacctgtgggaacaaggtggcttcctgccgcatggtttcaccgggctggtcatgatgatggcgattatcatgttctccttcggcggactggagctggtcgggatcacggcggcggaagcggacaacccggagcaaagcattccgaaagcgacgaaccaggttatctaccgtattttgattttctatattggttcgctggcggtgctgctttctctgctgccgtggacgcgcgtaacagcggataccagcccgttcgttctgatcttccacgaactgggcgataccctcgtagccaacgcgctgaatatcatggtactgactgcggcgctgtccgtctataacagctgcgtatactgcaacagccgtatgctgttcggcctggctcagcagggcaacgcgccgaaagtgtttttaagcgtggataaacgcggcgtaccggtgaacaccattctggtttccgcactggttaccgcgctctgcgtgctgattaactatatggcgccggactcggcattcggcttgctgatggcgctggtggtctctgctctggtgatcaactgggcaatgatcagcctcgcgcacataaagttccgtcgcgccaaacagcagcagggagtgaaaactcgcttcccggcgctgttctacccgctgggtaactgggtctgcctgctgtttatggcggcggtgctggtcattatgctgatgacgccaggcatggccatctcggtctacctgattccggtgtggattgtcattctgggcgtaggctatctgtgtaaacagaaaaccgcaaaaaccgttaaagcgcattaa

SEQ ID NO: 73875 - DNA, 765 bp, Citrobacter koseri
atggcctacagcaaaatccgccaaccaaaactatccgatgtgattgagcagcagctggagtttttaattcttgaggggactttgcgccccggcgaaaaactcccaccggaacgtgaactggctaaacagttcgacgtctcccgcccctctttacgcgaggcgatccaacgtctcgaagcgaagggtttgctgcttcgtcgccagggcggcggaacttttgtgcagagcagtctgtggcagagctttagcgacccactggtagaactgctctccgatcatcctgaatcccaatttgacctgcttgagacgcgccatgcgctggaaggcattgccgcttattacgcggcattgcgtagcacggatgaagacaaaacccgcattcgtgaactccatcatgccatcgagcttgcacaacagtccggcgatctggatgccgaatccgacgcggttctccagtatcaaatcgctgtcaccgaagcggcgcacaatgtggtgctgctccatctgctaaggtgtatggagccgatgctggcgcaaaacgttcgtcagaactttgaattgctgtatgcgcgccgggagatgcttccgctggtgagcagtcatcgcacccgtatttttgaagcgatcatcgccggtaacccgatcgatgcgcgtgaagcgtcgcatcgtcacctggcgtttatcgaagagattctcctggacagaagccgtgaggaaagccgtcgtgaacgcgccttacgccgtctggagcaacgaaagaattag

SEQ ID NO: 73876 - DNA, 2664 bp, Citrobacter koseri
atgtcagaacgtttcccaaatgacgtggatccgatcgaaactcgcgactggctacaggcgatcgaatcggtcatccgtgaagaaggtgttgagcgtgctcagtatctgattgaccagcttctttctgaagcccgcaaaggcggcgtgaaagtagcggcaggtgcaggggctagcaactatgtaaacactattgccgttgaagatgaaccggaatacccgggcaatctggaactggagcgtcgtatccgttcagctatccgctggaacgccatcatgaccgtactgcgtgcgtctaaaaaagacctcgaactgggtggccacatggcttccttccagtcttccgcaactgtttatgatgtttgcttcaaccacttcttccgcgcacgcaatgagcaggatggcggcgacctggtatacttccagggccacatctccccgggcgtgtatgcacgcgcattcctggaaggccgtctgactgaagaacagatggacaacttccgtcaggaagttcatggcaaaggcctctcttcctacccgcacccgaaactgatgccggaattctggcagttcccgaccgtatctatgggtctgggcccaatcggcgcgatctaccaggctaaattcctgaaatatctggaacaccgtggtctgaaagacacgtccaaacagaccgtttacgctttcctgggcgacggcgagatggacgagccggaatccaaaggggctatcaccatcgccacccgtgagaaactggacaacctggtcttcatcatcaactgtaacctgcaacgtctggacggcccggtaactggtaacggcaagatcgttaacgaactggaaggcatctttgacggcgctggctggaacgtgatcaaagtgatgtggggcggtcgttgggatgagctgctgcgtaaagacaccagcggtaaactgatccagctgatgaacgaaaccgttgacggcgactaccagaccttcaaatccaaagatggcgcttacgtacgtgagcacttcttcggtaaatatccagaaaccgcagccctggttgctgactggactgatgagcagatctgggcactgaaccgtggtggtcacgatccgaagaaagtctacgctgcactgaaaaaagcgcaggaaaccaaaggcaaagcaacggtaatcctggcccataccatcaaaggttatggcatgggtgacactgccgaaggtaaaaacatcgcgcaccaggttaagaaaatgaacatggacggcgttcgttacgtccgcgatcgtttcaacgtgccggtatccgatgctgatatcgaaaaactgccgtacattaccttcccggaaggttctgaagagcacacttatctgcacgcacagcgtcagaaactgcacggctacctgccgagccgccagccgaacttcactgagaagctggaactgccgaccctggaagacttcggcgcgctgctggaagagcagaacaaagaaatctccaccactatcgctttcgttcgtgccctgaacgtgatgctgaagaacaagtcgatcaaagatcgtctggttccgatcatcgctgacgaagcgcgtactttcggtatggaaggtctgttccgtcagatcggtatttacagcccgaacggccagcagtacaccccgcaggaccgtgagcaggttgcttactacaaagaagacgagaaaggtcagattttacaggaaggcatcaacgagctgggcgcaggttcttcctggctggccgctgcgacctcttacagcaccaacaacctgccgatgatcccgttctacatctactactccatgttcgggttccagcgtatcggcgacctgtgctgggcagcaggtgaccaacaggcgcgcggcttcctgatcggtggtacttccggtcgtacgacgctgaacggcgaaggtttgcagcacgaagatggccacagccacattcagtctctgactatcccgaactgtatctcttacgatccgtcttacgcgtacgaagttgcggtcatcatgcacgatggtctggagcgtatgtacggtgagaaacaagagaacgtttactactacatcaccacgctgaacgaaaactaccacatgccagccatgccggaaggtgctgaggaaggtatccgtaaaggtatctacaaactcgaaaccctcgaaggtaagaaaggtaaagttcagctgctgggctccggttctatcctgcgtcacgttcgcgaagcagcagagatcctggcgaaagattacggcgtaggttctgacgtttacagcgtcacctccttcactgaactggcgcgtgatggccaggattgtgagcgctggaacatgctgcacccgctggaaactccacgcgttccgtacattgctcaggtaatgaacgacgcgccggcagtggcatcgactgactatatgaaactgttcgccgagcaggttcgtacttatgtaccggctgatgattaccgcgtactgggtactgacggtttcggccgctctgacagccgtgagaacctgcgtcaccacttcgaagtggatgcatcttatgtggttgttgcggctctgggcgagctggctaaacgtggcgaaatcgataagaaagtggtagcggaagccatcaccaaattcaacatcgatgcagataaagttaacccgcgtctggcgtaa

SEQ ID NO: 73877 - DNA, 1893 bp, Citrobacter koseri
atggctatcgaaatcaacgtaccggacatcggggctgatgaagttgaaatcaccgagatcctggtcaaagtgggcgacaaagttgaagctgaacagtcgctgatcaccgtagaaggcgacaaggcttctatggaagttccatcgccgcaggcgggcgtcgttaaagagattaaagtctctgttggcgacaaaaccgcgacgggcgcacttatcatgattttcgattccgccgacggtgcagctgacgctgcgcctgctccggcagaagagaagaaagaagccgctccggcagccgctcctgctgctgcggcagcgaaagacgtacacgtaccggatatcggcggcgacgaagttgaagtcaccgagatcctggtgaaagtgggcgacaccgttgcggctgagcagtcgctgatcaccgtagaaggtgacaaagcctctatggaagtgccggcgccgttcgcgggtacggttaaagagatcaaagtcaacgctggcgataaagtgtctaccggctctctgatcatggtcttcgaagtggcgggcgctgcgcctgctgctgcgccggctcaggcggcagcaccagcagcggcggctccggcagcagcagctggcgcgaaagacgttaacgtaccggacatcggcggcgacgaagttgaagtcaccgaagtgatggttaaagtcggcgataaagttgaagctgaacagtcgctgatcaccgtagaaggcgacaaagcctctatggaagtgccggcgccgttcgcgggcgtggttaaagagctgaaagttaacgttggcgacaaagtgtctaccggctctctgattatggtcttcgaagtggaaggcgctacccctgccgcggctccggctgctgctgctccggcacctgccgctgcacctgctcaggccgctaaaccggctgctgcgcctgcggcaaaagcggaaggcaaatctgagtttgctgaaaatgacgcttacgttcacgcgaccccgctgattcgccgcctggcgcgcgagttcggcgttaacctggcgaaagtgaagggtactggccgtaaaggtcgtatcctgcgcgaagacgttcaggcttacgtgaaagacgctatcaagcgcgctgaatccgcgccagcgggcgcaaccggcggttctctgccgggtctgctgccgtggccgaaagtggacttcagcaagtttggtgaagtggaagaagttgaactgggccgcatccagaaaatctctggtgctaacctgagccgtaactgggtgatgatcccgcacgttacgcacttcgacaaaacggatatcaccgatctggaagcgttccgtaagcagcagaatgcggaagctgaaaaacgtaagctggacgtgaaattcacgccagtggtcttcatcatgaaagccgttgccgctgctctggaacagatgccgcgcttcaacagctctctgtctgaagacggtcagcgcctgacgttgaagaagtacatcaacattggtgtcgcggtcgacacgccgaacggtctggttgttccggtgttcaaagatgtgaacaagaagagcattactgagctgtcccgtgaactgacgaccatctctaagaaagcgcgtgatggtaagctgaccgctggcgaaatgcagggcggttgcttcactatctccagcatcggcggcctgggcaccacccacttcgcgccgattgtgaacgcgccggaagtggctatcctcggcgtttctaagtccgcaatggaaccggtgtggaatggtaaagagtttactccgcgtctgatgatgccgatttctctctccttcgaccaccgcgtgattgacggtgctgatggtgctcgctttatcaccatcatcaacaacacgctgtctgacattcgccgtctggtgatgtaa

SEQ ID NO: 73878 - DNA, 1425 bp, Citrobacter koseri
atgagtactgaaatcaaaactcaggtcgtggtacttggggcaggcccggcaggttactctgctgccttccgttgcgctgatttaggtctggaaaccgtaatcgtagaacgttacaacacccttggcggtgtttgtctgaacgtcggctgtatcccttctaaagctcttctgcacgtagcaaaagttatcgaagaagccaaagcactggctgaacacggtatcgtttttggcgagccgaaaaccgatatcgacaaaattcgtacctggaaagagaaagttatcactcaactgaccggcggtctggctggtatggcgaaaggccgtaaagtgaaagtggtaaacggtctgggtaaattcaccggggccaacaccctggaagtggaaggcgagaacggcaaaaccgtgatcaacttcgacaacgcgattatcgcagcaggttcccgtccgatccaactgccgtttattccgcacgaagatccgcgcgtctgggactccaccgacgcactggaactgaaatccgtaccgaaacgtctgctggttatgggcggcggtatcatcggtctggaaatgggtacggtgtaccatgcgctgggttcagagatcgacgtggttgaaatgttcgaccaggttatcccggcggctgacaaagacatcgttaaagtcttcaccaaacgcatcggcaagaaattcaacctgatgctggaaaccaaagtgactgccgttgaagcgaaagaagacggtatttacgtttccatggaaggcaaaaaagcaccagcagaagcacagcgttacgatgcggtgctggtggctatcggccgtgtgccgaacggtaaaaacctcgatgctggcaaggctggcgtagaagttgacgaccgtggcttcatccgcgtagacaaacagctgcgcactaacgtaccgcacatctttgctatcggcgatatcgtcggtcagccgatgctggcgcacaaaggtgttcacgaaggtcacgttgccgctgaagttatcgccggtaagaaacactacttcgatccgaaagttattccgtccatcgcctacactgagccagaagttgcatgggtaggtctgacggagaaagaagcgaaagagaaaggcatcagctacgaaaccgccaccttcccgtgggctgcatctggccgtgctatcgcttctgactgcgcagacggtatgaccaagctgattttcgacaaagaatctcaccgtgttatcggtggtgcgattgtcggcaccaacggcggcgagctgctgggcgaaatcggtctggcgatcgagatgggctgtgatgctgaagacatcgcgctgactatccacgctcacccgactctgcacgagtccgttggcctggcagccgaagtgttcgaaggcagcatcaccgacctgccgaacccgaaagcgaagaagaaataa

SEQ ID NO: 73879 - DNA, 792 bp, Citrobacter koseri
atgaaaaaaatcctgttaagcaccctgctgctgtcgctgccgttgttgagctacgcgcaacaacgcttcccttcgcctgacgacgcggcaacggcgttcgcgaccgcagtcgccacgcaaaacgaggcgcagttgactgcgctattgggcgacaactggcgacagtttctgccgcaggaaggcgccgcctccgaagccgttgcccgctttaaccgcgactggaaaatcagccaccgtatcgtgcagcaaggcgataccgcgcacctgaacgtcgggcgcgacgagtggcaactgcctgtaccgatgatgaaagatgctgatggctggcattttgatatggcggccgctcaggacgagatcctcacccgcgccatcggccgcaatgaactgtcggcgatagaagcgatgcgcgcctatgtggatgcccaatacgattactggcaacgcaaacagaggttcgcgacaaaactcatcagtagcaaaggtcagcaggatggactgtactggccggtacaacccggcgagatgcccagcccgttaggcccggcattcagtccttcggcacccggtgagggttatcacggctaccatttccgcattattcccgatagcgaaaaggacggtttcgccctgctggcctggccggtaatttgggggaagacgggcgtcatgagctttatggtgaatcagggcgataaggtgtatcaggcgaacctgggaagagagacggagaagaacgtcgcgaaaatcaataaattcaatgccgatgcccattggcagaccgttgagtaa

SEQ ID NO: 73880 - DNA, 1542 bp, Citrobacter koseri
atgacgttgccctttaagccccatgtaattgcgctggtatgcagcgcagggttatttgccgcttcgggtgtgttgtatgtaaaaagccgcacgcccgaagccccgcttcaacccgcgcccgtcgccgtgcagccgcagccgaccgccgccgcggaacctgaagcaaaagccgcgtttaccgcagcgcaaatcgatcaatgggtcgccccaatagcgctctaccctgactcgctgctttctcaggtgctgatggccgccacctatccagcgaacgtggttcaggcagtgcagtggtcgcatgacaacccaaccctgcaaggcgatgcggcaatacaggccgtctccggtcagccctgggacccgagcgtgaaatcactggtggcgtttccccagttgatggcgctgatgggcgaaaacccaacgtgggtacaaaaccttggcgacgcttttctggcccagccgcaggacgtcatggacgcggtgcaacggctgcgtttactggcgcagcaaaccggctcgctgaaatccacgccgcagcaaacggtcagcagcacgccgaagcagaacgccgccgctaacgtacagagcacgacgccgacggtgatcaaaattgagcccgccgatccacaggtcgtctatgttcccaactataatcccgcgaccgtttacggcgcctggccgaacaccgcttacccgcccgtgtatctgccgccgcctcccggacagcaattcgccgacagtttcgtgaaaggctttggttatagcctcggcgtcgccaccacctacgcgttgttcagcagcatcgactgggacgacgatcatcatcaccacgacgatgaccatcaccaccacgatgataacgaccatcacggcggcaatggctaccagcacaacggggataacatcaatatcaatgtgaataacttcaatcacattaccgggcaaaatctcaaagggcagacaatggcctggcagcacaacccggcgtatcgcaacggcgtgccctatcagaacaacgcggtgtcccaacgttttcatcaaaccgatgtcagcggcgggttaagcgccactcaacagacgccggcctcccgcgacggccagcgccaggcggcgatggcgcaattccagcagcatagccacgcgtctcccgccacgcgaacccaaccgcctggcgcgacgtcccgcgatgctcagcgcaaagcggcctcgcagcagctaaaccagattgcccagcggaataactatcgcggctacgacacccggcaagacagcgttcacagggagtcggttcagtcacattcactgtcacagcagcaacgggagaccgttcaccagcgcgtcgcatccgccacgccgcagcagcgtcagaccttccggcagaaccatgccaatgtgttcagcggtaacgacagccgttcgccctcctggcaatctcagcagcagcgcggccagcagagtcgtcacgtcggcaatctcaatactgaacagcgtgccgctgcgcgtgaacacctttccgagcgccatgaatttcgccgtcgttaa

SEQ ID NO: 73881 - DNA, 2598 bp, Citrobacter koseri
gtgctagaagaataccgtaagcacgtagctgagcgtgccgcccttgggattgtgcccaaacccttagatgcaacccaaatggccgcacttgtcgagctgctgaagaccccgcctgtgggcgaagaagaattcctgttagacctgttaatcaaccgtgttccccctggcgtcgatgaagccgcctatgtaaaagcgggctttctcgctgccgtcgcgaaaggcgacaccacctccccgctggttactccagaaaaagccattgaactgctgggcaccatgcagggtggttacaacattcatccgctgatcgacgcgctggacgatgccaaactggcgccgattgccgccaaagcgctgtcccataccctgctgatgttcgacaacttctacgatgttgaagaaaaagccaaagcgggcaacgaatatgcgaagcaggtgatgcagtcctgggccgatgccgaatggttcctgaaccgtcctgctctggctgaaaaaatcaccgttaccgtctttaaagtgaccggtgaaaccaacaccgacgacctctctccggcgccagatgcctggtctcgcccggacattccgctgcacgcgctggcgatgctgaaaaacgcccgtgaaggtattgagccggatcagcctggcgtggtggggccgatcaaacagatcgaagcgttgcagcaaaaaggctatccgttagcctacgtgggcgacgttgtcggcaccggttcttcgcgtaaatccgctaccaactccgtgttgtggttcatgggcgatgacatcccgaatgtgccgaacaaacgcggcggcggtctgtgtcttggcggcaaaattgcgcctatcttctttaacacgatggaagatgcgggcgcgctgcccattgaagtggacgtgaataacctgaacatgggcgatgtgattgacgtttacccgtacaaaggtgaagtccgccatcacgaaaccggcgaactgctggcgagctttgaactgaaaaccgacgtgctgatcgacgaagtgcgcgcgggcggtcgtattccgctgatcatcggtcgcggcctgaccaccaaagcgcgtgaagcgctgggtctgccgcacagcgatgtgttccgtcaggcgaaagacgtggcggaaagcgctcgcggctactcgctggcgcagaagatggtgggccgcgcctgcggcgttgccggtatccgtccgggcgcttactgcgaaccgaaaatgacctccgtaggctctcaggataccactggcccaatgacccgtgacgaactgaaagacctggcgtgcctgggcttctcgtctgacctggtgatgcagtctttctgccataccgcggcgtatccgaagccggttgacgtaactacgcaccacacgctgccggatttcatcatgaaccgtggcggcgtctctctgcgtccgggcgatggcgtaatccactcctggctgaaccgtatgctgctgccggataccgttggtaccggcggcgactcccatacccgtttcccgattggtatctccttcccggcgggttctggcctggtggcgtttgcggcggcgaccggcgtcatgccgctggatatgccggaatcagtgctggtgcgcttcaaaggcaaaatgcagccgggtatcaccctgcgcgatctggtacacgcgatcccactgtacgcgatcaaacagggtctgctgaccgttgagaagaaaggtaagaaaaacatcttctccggccgtattctggaaatcgaagggctgccggacctgaaagtggaacaggcgtttgagctgaccgatgcctctgcggagcgttctgcggcaggctgtaccattaagctcaacaaagagccgatcatcgagtacctgaactccaacattgttctgctgaagtggatgatcgcggaaggttacggcgatcgccgcaccctggagcgccgtattcagggcatggaaaaatggctggcggacccgcagttgctggaagcggacgcggatgccgattatgcggcggtgatcgagatcgatctggctgatatcaaagagccgatcctctgcgcgccgaacgatcctgacgatgcgcgtctgctgtctgatgtgcagggcgagaagattgacgaagtctttatcggttcctgcatgaccaacatcggtcacttccgtgcggcaggtaaactgctggatgcgcacaaaggccagctgccgacccgcctgtgggtggcgccgccaacccgtatggatgccgcgcagttgaccgaagagggctactatagcgtctttggtaagagcggcgcgcggattgaaattccaggctgttcactgtgcatggggaaccaggcgcgtgtggctgacggggcgacggttgtttctacctcaacccgtaacttcccgaaccgtctgggaaccggggcgaacgtctatctggcttctgcggaactggcggcggttgcggcgctgatcggcaaactgccgacgccggaagagtaccagacctacgttgcgcaggtggataaaaccgccgtggatacctaccgttatctgaacttcgatcagctttcccagtacaccgagaaagccgacggcgtgattttccagaccgcggtgtaa

SEQ ID NO: 73882 - DNA, 363 bp, Citrobacter koseri
atggattacgaatttctgcgcgatattaccggagtggtaaaagtgcgaatgtccatgggccacgaggtggtggggcactggtttaacgaagaagtgaaagagaacctggccttgcttgatgaagtggaacaagcggcgcgtgcgctaaagggcagtgagcgttcctggcaacgggcgggacatgaatatacgctctggatggatggcgaagaggtgatggttcgcgctaatcaactggagtttaccggcgacgaaatggaagaggggatgaactactacgacgaagagagcttatcgctctgcggcgtggaggactttcttcaggttgttgcggcttaccgtcatttcattcaacaacgctaa

SEQ ID NO: 73883 - DNA, 795 bp, Citrobacter koseri
ttgaaaaaactgaaactgcatggctttaataatctgaccaaaagtctgagtttttgtatttacgatatctgctacgccaaaaccgcagaagagcgcgatggttacattgcctatatcgatgaactctataacgccaatcgcctgacggaaattctgtcagagacgtgctccatcatcggcgcgaatatcctgaatatcgcccgccaggattatgaaccccagggcgccagcgtcactattctggtaagcgaagagccggtcgacccgcagcttatcgacaaaacagagcatcccggcccgctgcccgaggccgtcgtcgcccatctggataagagccatatctgcgtgcatacctacccggaaagccacccggaaggcggattgtgcaccttccgcgccgacattgaagtttcgacctgcggcgtgatttccccgctgaaggcgctgaattacctgatccaccagttagagtccgatatcgtcaccatcgactaccgcgtgcgtgggtttacccgcgacgtcaacggcatgaaacactttatcgatcatgagattaactccattcagaactttatgtccgacgacatgaagtcgctgtatgacatggtggatgtgaacgtgtatcaggaaaatatcttccataccaagatgctgcttaaagagttcgatcttaagcactacatgttccacactaaaccggaagatctgacggaaaccgagcgcaaagagattaccgctgcgctgtggaaagagatgcgcgagatttactacggccgcaatatccctgcggtataa

SEQ ID NO: 73884 - DNA, 867 bp, Citrobacter koseri
atggccgaaaatacgaagtggcatgaaacgctacacgaccagtttggtcagtactttgccgtggacaacgtgctgtatcacgagaaaaccgatcaccaggatctgattattttcgagaacgccgcgtttggccgcgtaatggcgctggacggcgtggtgcaaaccaccgagcgcgatgagtttatctatcacgagatgatgacccacgttccgctgctggcgcacggccacgcgaaacatgtgctgatcatcggcggcggcgacggcgcaatgctgcgtgaagtaacacggcataaaaatgtcgaaacgatcacgatggtggagatcgacgcaggcgtggtctctttctgccgtcagtatctgccgaatcacaacgcaggcagctatgacgatccgcgttttaatctggtgatcgacgatggcgttaacttcgtgaatcagaccagccagacctttgatgtgatcatctccgactgtaccgatccgatcggccccggcgagagtctgttcacctcaaccttctatgaaggttgcaagcgctgtttgaatccgggcgggatctttgtcgcacagaacggcgtctgcttcctgcaacaggatgaagccattgacagccaccgcaagctcagccattactttggcgatgtcagcttctaccaggcagccattccgacctactacggcggcattatgaccttcgcgtgggcgacggacaatgacgcgctgcgccacctgtcgaccgagattattcaggcacgtttccatacctccggcctgaaatgccgttactacaatccgtctgttcacacggcagcttttgccttacctcagtatttgcaagacgcgctcgcaacaccgtcgtcctaa

SEQ ID NO: 73885 - DNA, 348 bp, Citrobacter koseri
atgaagacgtttttcagaacagtgttgttcggcagcctgatggccgtatgcgcaaacagctatgcgctcagtgaatccgaagccgaagatatggcagatttaacggcggtgttcgtctttctgaaaaatgactgcggttaccagaatctcccgaacggtcagattcgtcgcgcactggtcttttttgcccagcaaaaccagtgggacctcagcaattacgactccttcgacatgaaatccctcggtgaagacagctaccgcgatctgagcggcatcggtattcccgtcgccaaaaaatgcaaagcgctggcgcgcgattccctgagtttactggcctacgtaaaataa

SEQ ID NO: 73886 - DNA, 1551 bp, Citrobacter koseri
atgcaacgtcgtgatttcttaaaatattctgtggcgcttggggtcgcatcggcactgccgttgtggagccgcgccgtgtttgctgcggaacgtcccgcgttacccattcccgatcttttaaccgccgacgcgcgcaatcacatttcgctgattgtcaaagccggacagtcgaccttcgcgggtaaaacggcaacgacctggggctacaacggcacgctactcgggccggcgcttaagctgcacaaaggtcagcgtattaccgtggatattcataaccagcttgccgaggagacgacgctgcactggcatgggctggaagttcccggcgaggtggacggcggcccgcagggggtgattgcggcgggcggcaagcgctccgtcaccttcacgcctgaacagcgtgcggcaacctgctggttccaccctcatcagcatgggaaaaccggtcgtcaggtggcgatgggactggcgggcctggtactgattgaagatgaagacattggcaaactgctcctgccgaaacagtgggggatagacgatgtgccggtgattattcaggacaaacagttttcccctgacggacaaatcaattatcagctggatatgatgaccgccgccgttgggtggtttggcgacacgctgctgaccaacggggcgatttatccgcaacatgctgcgccaaaaggctggctgcgtctgcgcctgctgaatggttgcaacgcgcgttcactgaacatcgccaccagcgacaaccgcccgctgtatgttatcgccagcgatggcggcctgctggcggagccggtgaaggtaaacgcactgctcatgttaatgggggagcgtttcgaagtgcttatcgacatcagagacggcaaagcgtttgagttgatgacgctgcccgtcagccagatggggatgacaatcgcgccgtttgataaaccgcacccggttatgcatattcagccgctggcgatcacggcctccggcactttgccggatacgctgaccacgatgcctgcattgccttctcttgatggcctgacgcagcgaaaactgcaactgtcgatggacccgatgctcgacatgatgggtatgcagatgctgatgcaaaagtatggcgaccgggcgatggcgggaatgaatcatgggcagatgatggggcatatgaatcacggtagtggtggtcatatgaaccacggcgggaagttcgatttccacaatgccaataagatcaacggccaggcgtttgatatgacgacaccgatgtttgccgccgccaaagggcagtatgagcgctgggttatttccggcgaaggcgacatgatgctgcatccgttccatattcatggtacgcagtttcgtatcctgtcggaaaacggcagcgctccggcggcgcatcgcgcaggctggaaggatacggtgcgggttgaaggcgggatcagcgaggtgctggtgaagtttgatcacgaggcatcgcaagaacatgcttacatggcgcactgccatctgctggagcatgaagatacaggcatgatgcttggctttacggtataa

SEQ ID NO: 73887 - DNA, 2391 bp, Citrobacter koseri
atggcaaataacaacgcaaaagcgccacggcttctcgtgacgctgacagccctcttcgctgcactctgcgggctgtatctgctgatcggcggcggctggctggtcgccatcggcggctcctggtactacccgattgcgggcatcgtcatgcttggcgtcgccgggctattatggcgcagcaagcgttccgcgctgtggctgtatgccgccctgctcctcgccaccatgatttggggcgtgtgggaagtcggcttcgacttctgggcgctgaccccgcgtagcgacattctggtcttcttcggcatctggctgattttaccgtttgtctggcatcgcctgagcgtcccttccagcggcgctgtcagcgcgctggtggttgccctgctgataagcggcggcatcctcacctgggctggcttcaacgacccgcaagagatcaacggtacgctaagcgcggacgcggtgcctgccgaaccgatctctccggtagcggaccaggactggcctgcctatggccgcaatcaggaagggcagcgctactccccgctgaagcagatcacggctgataacgtccacaacctgaaagaggcgtgggtgttccgtaccggcgatctgaagcagccgaacgatccgggtgaaatcaccaacgaagtgaccccgattaaagtcggcgatacgctgtatctgtgtaccgcccaccagcgtctgtttgcgctggacgcggcgagcgggaaagagaagtggcatttcgacccgcagctcaataccgatcccagcttccagcatgtcacctgccgtggcgtctcctatcatgaagccacggccgataaagcctcgccggatgtcgtttcagactgcccgcgccgcattattctgccggtgaacgatggccgtgttttcgccctcaacgcggacaacggcaagctgtgcgaatcctttgccaacaacggcattctgaacctgcaaaccaatatgccggtcactacgccgggcatgtatgaacccacatcaccgccggtcgtgaccgacaaagtgatcgtcattgcaggcgccgtcaccgataacttctctacccgcgagccgtccggggttattcgcggctttgacgtgaacagcggtaaactgctgtgggcattcgatcccggtgcgaaagacccgaacgcgatcccgtcggatgagcaccacttcacgccaaactcgccaaactcctgggcgccagccgcgtatgacgcgaagctggatctggtctatctgccgatgggcgtcaccaccccggatatctggggcggcaaccgtacgccagagcaggagcgctatgccagctcgatcctggcgctcaatgcaacgaccggtaaactggcctggagctatcagaccgttcatcacgatctgtgggatatggatatgccgtcccagccgacgctggcggatatcaccgtgaaagggcaaaccgttccggtcatctacgctccggcaaaaactggtaatattttcgtgctggaccgtcgcaatggtcagcttgtggtgcctgccccggaaaaaccggtgccacagggcgcggccaaaggggattacgtcaccaaaacgcagccgttctctgatttgagcttccgtccgacgaaagacctgaccggtgcggatatgtggggcgccaccatgttcgatcagctggtgtgccgcgtgatgttccatcagatgcgttatgaagggatctttacccctccgtcagaaaaaggcacgcttgtcttcccgggcaacctcggtatgttcgaatggggcggcatttccgtcgatccgaaccgtcaggtggcgattgccaacccgatggcgctgccgtttgtctctaaactgatcccacgcggcccaggtaatccgatggagccgccggaagatgccaaaggcaccggttcggaatcgggtattcagccgcagtatggcgtaccgtatggcgtgacgctgaacccgttcctgtcgccgtttggtctaccgtgtaaacagcctgcctggggttacatctccgcgctggatctgaaaaccaacgaagttgtctggaaaaaacgtattggtacgccgcaggacagcatgccgttcccgatgccgtttaaggtgccgttcaatatggggatgccaatgctgggcggcccaatctctaccgctggcaacgtgctgtttattgccgcgaccgcagataactacctgcgcgcttacaacatgagcaatggtgaaaaactgtgggaaggccgtctgcccgcaggcggtcaggcaacgccgatgacgtatgaagtcaacggtaagcagtacgtcgtgatttccgccgggggtcacggttcgttcgggacgaagatgggcgactatattgtcgcgtacgctctgcctgacgacgcgcagtaa

SEQ ID NO: 73888 - DNA, 537 bp, Citrobacter koseri
atgaaacatactgtagaagtaatgatccccgaagcggagatcaaagcgcgcattgccgaactgggtcgtcagattactgaacgttataaagacagcggcagtgacatggtgctggtaggtctgctgcgtggctcatttatgtttatggcggatctgtgccgcgaggtacaggtgtctcatgaagtcgattttatgaccgcctccagctacggtagcggcatgtccaccactcgcgatgtgaaaattctcaaggacctggatgaagatatccgtggcaaggatgtgctgattgtcgaagatattatcgattccgggaatacgctgtcgaaagtgcgggaaatcctgagcctgcgtgagccaaagtctctggcgatttgtacgctgctggataagccgtctcgccgtgaagttgacgtcccggttgagtttatcggtttctcgatcccggatgagttcgttgtgggttacggcatcgactatgctcagcgttatcgccatctgccgtatgttggtaaagtggtgctgctggacgagtaa

SEQ ID NO: 73889 - DNA, 663 bp, Citrobacter koseri
atgaaagacatagatacactcatcagcaacaatgcactatggtcaaaaatgctggtggaagaggatcccggattttttgagaaactggcgcaagcgcaaaaaccgcgctttctatggattggatgttccgacagccgcgttcccgcagaacgtttaaccggccttgagccgggcgaattatttgttcaccgcaatgttgccaacctggtcattcacaccgatctcaactgcctctccgtggtgcagtatgccgtcgatgtactggaagttgaacacattattatttgtggtcactacggttgtggcggcgtccaggcggctgttgaaaacccggaactggggttaattaacaactggttgctgcacattcgcgatatctggttcaaacatagctcattactcggagaaatgccgcaggaacgtcgaatcgataccctgtgcgagctgaacgtgatggaacaggtatataacctgggccactcaaccatcatgcagtccgcgtggaagcgcggtcagaaagtgacgattcacggctgggcctacggtattcacgacggcctgctgcgcgatctggaagtcacggcgaccaaccgtgaaacgctggaacagcgctatcgtcggggggtttcaaacctcagcaaaaagcatattaaccacaagtaa

SEQ ID NO: 73890 - DNA, 927 bp, Citrobacter koseri
atgaccattgcactggaacttcagcaacttaaaaaaacgtatccgggcggcgttcaggcgctccgtgggatcgatttgcaggttgaagcgggtgatttttatgcgcttctggggccaaacggagcggggaaatcaaccaccattggcattatcagctcgctggttaacaaaacctccgggcgcgtctgcgtctttggttacgaccttgaaaaagatgtggtcaacgccaaacgccagcttggcctggtgccgcaggaatttaacttcaacccgtttgaaaccgtccagcagatcgtcgtcaatcaggcggggtactacggcgttgagcgtaaagaagccgttgcgcgcagcgaaaagtacctgaaacaactcgatctgtgggaaaaacgtaacgaacgcgcgcgtatgctctccggcgggatgaagcgtcgtttgatgatcgccagggcgctgatgcatgagccgaaactgttgattctggatgaacccaccgcaggggtggatattgaacttcgccgctcaatgtggggctttttgaaggatttaaacgacaaaggcaccacgattatcctgacgacgcactatcttgaagaagcggaaatgctgtgtcgcaacatcggtatcattcagcacggcgcgctggtggaaaacacctcgatgaaaaatctgctctctaagctgaaatccgagacgtttattctcgatctggcggcgaaaagcccgctgccgaggctggaaggctatcagtaccgtctggtggatacctcgacgctggaggtcgaagtattgcgggagcagggcatcaatagcgtcttttcgcaactgagcagccagggcgttcaggttctcagtatgcgtaacaaggcaaaccgcctggaagaactgtttgtctctctggtgcatgataaaaaaggagatcgcggatga

SEQ ID NO: 73891 - DNA, 768 bp, Citrobacter koseri
atgcagctgtattgggtcgcgctgaaaagcatctgggcgaaagagattaaccgctttatgcgtatctgggtgcagacgctggtgccgccggtcatcaccatgacgctctattttattatcttcggtaatctgattggctcacgcattggcgagatgcacggttttagctatatgcagtttatcgtgccgggcttaatcatgatggcggtgatcaccaacgcgtatgccaatgtggcctcatccttctttagcgccaaattccagcgcaacattgaagagctgctggtggcgcctgtcccgacgcacgtcattatcgtcggatatattggcggcggcgtggcgcgcgggctgtgcgtaggggttctggttacggtgatttcgctgttctttgtgccgttccaggtacactcctgggtgttcgtggcgttaacgctggtgctgacggcggtgctgttttcgctggcagggctgctgaactcggtctttgcgaaaacctttgatgatatcagcctgatcccgacgttcgtgctgacgccgctcacctacctgggtggggtgttttattccctgacgctgctaccgccgttctggcaaggattgtcgcatctgaacccgattgtctacatgatcagcggcttccgctatggtttcctgggcattcacgacgtaccgctggtcactacgttcggcgtgctggccgtgtttatcctggcgttttacctgctgtgctggtacttaattcagcgcggacgcggcttgcgcacgtaa

SEQ ID NO: 73892 - DNA, 441 bp, Citrobacter koseri
atgttgggttgggtgattacctgtcatgacgatcgcgcgcaggagctacaggatcgtctggaagaaaaacatggcccgctggcgcagtgccgggcggtgaacttctggcgtggtctgagtaccaatatgctcagccgtatgatgtgtgaagcattacaccaggcggattccggcgatggggtgatctttttaacggacacgtccggcgccgcgccttatcgtgtggcgtcgctgatgagccataaacattccggctgcgaagtgattgccggtgtgacgtattcattgcttgaagaaatgcttgtcgcgcgggaatccatgagcagcgcggcgttccgtgacactattgtttccctcggcgcgcccgatgtcaccagtctctggcatcaacagcaaaaaaatccgccttttgtgctgaagcatgatttgtacgcgtactga

SEQ ID NO: 73893 - DNA, 1116 bp, Citrobacter koseri
atgatgaaattacgctatttactgccgctattattttgcgtgctctccattttcgccaggcaagcgttagcagacaccgcatgtcattttacgacacagcaggccagtatacctgctttctggactgccagaacgctcatcggccccatcggaggcatcgatacgccgctcatcattatgaaccctcagtctatggagggtgatttccctttattccagggagcggcgcccatcacatgcggaggtagtgggagcaatgccgtaacgttgaccggccctaccgacgccaatttgtgggatcaatataccactcaggggtcagatggccctaccgggctgctcaaaacctcgattcccggcattgtttacacctattccgtgaggtgtatcgggaactgccacaacggcaacaacactaacgatctggatttaaacctgccgctgcccggaggaacgtcaaccttcccaagccatggcgatgccccctggacggggcctagcgcaacacgcaactgggatatcttcgtcacgatgtatcagacgccagactaccacccccgaaatggtcagacggacgggaacgcgctgccagggaaaatcggtactctgcacataggagatgccgggcaaaacgatctcgaccttatgatgagtggagcatcgatggcgttttccgtcatggagccgacctgccaggggatggggataaataatgacgaatacgaccgggacgtggattttggcgacttttaccgttccgatttcgaaaaaacgggcgagtcggtagaaaagccgtttacgtttaacttattccgctgctcattgacgaccgttaccgtcaccctgaccggcaatcatggcgcagacaatacgattctcaccaactcttcagggagcgccgagggcgtgggcgtaaaaattcgttccattatcaataacaacacacaaacaatgaaggtagacggttcggagcgtgtcggtatcacctacagcggaaatcgtgagtggtatcatgaatctattggtctggatttcaccgggcagttaatcaaaatcggtacaattaaagccggcacttttgaaaccgtcggtactttcaccctcagctacgaataa

SEQ ID NO: 73894 - DNA, 609 bp, Citrobacter koseri
atgcgacagacactattttttatgcgatttactttcgccctgctggtgggcctggcaggactgtggcctgtcgtcagtcaggctgacgacagcggaatggacgtcaattttaaggcgaagattctggccaatacctgccaagtaagcctggaaaatggcggtaatgtcgagttgccaaccgtcacgcgcagttggttttacaatacggacaacagcgatcgcctgcggccggaaacggacgctggcggtacatcgtttaccattcaggttgtcaactgcgacgtgccgccagcaggaagcgaaggaagccagcagcttcattttcgatttgaaccgcaattcggtataaaccccgacaacagccaggtatttatcaataacgcggtcaacgatcaggccagaaatgtcggtgtggttgttttttccgccacacaccacacgaacgtattgaatagcgatggcagttccgacgtagcgtatgaccttagcgggcaagcggcaccgctctttccagcagattatgtgttttacgcccgctaccagaacacgggcgatgtcggcaacggcctggtgaccagcaatgtggtggtcaatgtaacctatcagtaa

SEQ ID NO: 73895 - DNA, 567 bp, Citrobacter koseri
atgaaatctaattctctttttctcgcgctggcggtagctggtggattattcagcggcctgacccacgccgccccggtgacaggcaccaatcagttgcaggctatctttaccactgagatcctccctggcacctgtaacacccaggtgacggatgcagatggcccgaccagcacgattgacttcggcgatctgtataagaacgaagtcggtacgcgtaccgaatcctttaatatcgcactgaccgaatgcgcgggcgtgttaaccacaaccgtggcggctcagccaggggcgggcaatacctgttccggcgactcctacgcgacaacaggcgccacgaataccgccgttgagatctgggaaaccgccgcagactcaggcacccagttagcctgccagacgggcaacccttcgaatgtactgacgcattcgtttggttcgaagaatatgaaccagagctacacctatcctctggtggctcgctgggtcgttgcgaatggtaaaacagccgctgatatcacaacaggtgaagcgacgtcgcttatcacctttttagtcacctaccagtaa

SEQ ID NO: 73896 - DNA, 633 bp, Citrobacter koseri
atgactttaaaaagtaataaatatctccgcagtttacctgtcgctatgttagcgctggcggtgtgttcatccgttcatgcagacaacggcgacagcatcgacattaccttccgagccaatatccgggacacaacctgtgatatgacgattaatgactcggacagtagctccaccatcatcatcggcgccgacggcaaagtgtcgctgggcgatatcattaaataccagaccagcgagacagcgtcaggaccaacgatggcgcaattcgccctgaaaattaaaaactgcccggaatccgtaaccggaattaaagcctccatcagcggcacgacctccggttacgacggcggtacgccgaaaaccatcctcctccccggtacgggtgagacaggccccaccggggttggcctgaaattctctcgtgtcagtgcaccaaccagctattttgctatttttgccaacgaaacggagacctcagataacgatgccgaggtgattaaatggagtcctgctgaaatagacagcaaacaggtcgaccttgtggcgcgtctggtgacgacaaggatctccggtacaaccccggcggttggcgccttccaggcaacagcaacctttaactttagctatgaataa

SEQ ID NO: 73897 - DNA, 2601 bp, Citrobacter koseri
atgatttttcgacgatctctattatgtctcgccattagtgcggcattgccgttctctgttcatgcgacgggaaatacgcctgcacagtcctctgctcccgactcagaggaaatggtagagtttaacgatcaattcctgctgaatatggggagtgcagtcgatgtaagccgttatgctcagggtaatccaatattaccgggaacctaccgggcgaaaataagcctgaacggtgaaaataaatcgacgcaaaacatcgaatttaaagataacggaacgccacgcgccacgccatgtattaccgcattgttgctgaaacaagcgggcgttgatagcagcgtgctggggaatactatttccgacgatgatacaacctgtattgatatcaaaaaatattacccccactcgtcggtgaatttcgatacctcaaaacttaccctggaattgacgatgccgcagctttacgttctcaaacgcccggcgggatatgtcgatccatcattatgggatgcaggtattccggcggcgttgctgtcgtacaacctcaacgcctggcatagcgaaagcgatggcaataattccgacacggcttatgccggtctgcaatatgggctgaatttgggcgcatggcggctgcgctcccgcggcacctacaactgggataaagacaacggctcagactactccagccaggacatttacctccagcgcgacattccggcgttaaccgcgcaggttgtggcgggcgaaacctacaccaacggcgataccttcgactccgtcagcctgcgcgggatgcgcctgtacagcgacgatcgcatgcgcccggaaggccgtaccaactactcaccggtcattcgtggcgtcgccaacagcaacgccaaagtcaccgtcatgcaaagcggcagcaaaatttatgaaaccaccgtaccgcctggcccgtttgaactgagcgatctcagcaccactggctacggtaacgatctacaggtgactgtagaagagtctgacggcagcaagagaaccttcacggttcctttttcctcggttacgcagatgatgcgtccggggacctcacgctgggagtttggcgcgggcgaactgaacgacgattcgctgcatgacagaccgaacattggttacgccacctggtattacggtctcaacaacacctttaccggctacgcgggcgtgcagtacagcgacatggatttttacgccggtttgcttggcgtggcgatgaacaccgcgatcggcgccttcgcgttagacgtcacgcagtcacatgcacaaattgacgagctggggacgctgaccggccaaagctatcgcctgacgtacagcaaggtcatcgaaaccaccgacacctcattcaatgtggcggcataccgtttctcgacggaagactacctcagcttgcgggacgccgccgcgctacaggacgacgtgaaatacggcagctataagaatcagtcatatgagtccagcgacgaactctattctgactatcagcgtatgaaaaaccagtttcagattagcgtcagtcaaccgctggcgttcaatggtgaaaactacggctcgctctatgtcaccggcacctgggaagactactggaatgagagtggttccacctcaaactacagcgcaggttacagcaatgacttccgctatggcagctacagcatctcgctccagcgtacctatgatgaagatggcgaaaaagatgacagcgtttatctcaacgtcagcattccgttaagcacgttctccagtgaacgtaaaaatattgccggttttaacaacgtcaatatgagcgcgcgtacggatatggaaggcagtgccaactttaacaacaccgccagcggtaatactgaagacggtaagattaactactccatcagtacggcaagcaataccggtgattatggcgatttgaatcagatcagcggttacggctcgtggagcagtccgtatggccccctgtcagtctctacctcttttagcgatgacagcagcaaacaatattccgccaactatagcggcggcatggtggttcacactggcggcctgacgatggcgccaggaacattaagtgacaccggccccatcattctggttcatgccagcggcgcaaaaggcgcgcagctcggttacggcaaaggtgaaataggtcgttcaggatacgcgattatgccgtatgcctcggcttaccgtgagaaccgcgttgggctgaatatcagttctctggacgccgacgtcgaggtcaaaaacaccagtgaaaccatcgtcccgcgtgatggcgccgtggtgctggtcaacttcgaaaccgacgaaggtcgttctctcatccttgaacttctacgcaacgataaaggctttattccactcggcgcagacgtcctgaccgataaaggcgagctggtcggcgccgtcggtcaggccgggcaggcttatgtgcgcggcgtagaagatcagggcaccctgcgagttgtctggggtaaagaagcaggtagcgcctgtacggtgaattatcacattaccgacagcgcacaaaaggcaggattaaccacgatcctgaacaatcaactctgtcatatgcaataa

SEQ ID NO: 73898 - DNA, 744 bp, Citrobacter koseri
atgttcagcctgacgttaaaaaccggattaaaaactctcaccgccgccatgatcggcgtcgcctcgtttcaggcatgcgccgacgtggttatctccggcacacgcatcgtatatcaacaatccatgaaagatgtgattgtgaacctggataaccgaggcaaaaacccgctgttacttcagatctggctggatgacgggagcccgaacgttaacccgcaggaattaaaactgccttttgtcattaccccgcccatttcacgcatcgatccagggaaaggccagtctgtgcgtgtgacatatttacagcagccgctgccgcaggatcgggaatccttattctggtttaacgtgctggaaatccccaaaaaagcaacggcgaaagacggtgaaagccagaaccaactgcaactcgctttccgtacccgtattaagctatttttccgcccggacggcttaaaaggcaccccaggtgaggcgatgaagcaggttaaatggtcgcaaatgcgccagggcaacaccctgtctttagttggccgtaacgactcgccctataacgtttcactctccagcgcaacgtttaaggtcggcgccaaagagtatgaaattgacagtaagtcgattaagccgttctccagcgaaaccatgacggttaaaggattaacgaataacgccagcggagaagtggtgtatatcgctatcaatgattttggcggaacggaaaaactcaccgccaacgttaattaa

SEQ ID NO: 73899 - DNA, 591 bp, Citrobacter koseri
atggcattgaaaaaatacgcattagctgcggcagttctggcaactatttccagttcagcattcgcagcagacgcggatcgtggcaccatcaccttccacggcctggtcaccccgaatacctgtaacatcacgctgaaagatgatccactgagttcccagacaactaaagacttcaacgtcactctgccgaccgtgtcagtagaagacttcgccgctggtactgctgccgacgttaacagcaccctgggccaggctaagttcgcgctgtccgtttcctgtgcggatactgagttgcagtctgctgatgcgcagtttgattcctggggcggttcttccgcaaacaacgaaggcgcgctggttccaccaactggcctgcaaggttcagcaaccaacgtaagcctggttctgcacaacgatggcaacacgaagaccgatctgatcaaaatcgatcatcctaacaacactcagtcaaccacgctgactgatggcaaaggcgaactgaactacaccgtcgcttatatgggcccggctactggcgtaaccagcggttccgtgcaggcacaggttgccttcaccatgaactaccaataa

SEQ ID NO: 73900 - DNA, 381 bp, Citrobacter koseri
atgattcgcactatgttgcagggcaaactccaccgcgtgaaagtgactcaggcggacctgcactacgaaggttcctgcgccattgatcaggattttctggacgcagccggtattcttgaaaacgaagccattgatatctggaacgtgactaacggcaagcgcttctcaacctatgcgattgccgccgagcgtggttccagaatcatctccgtgaacggcgcagcggcgcactgcgctgcggtgggcgatatcgtgatcatcgcaagtttcgttaccatgtcagacgaagaagcgcgtcgctggcagcccaacgtcgcctattttgaaggcgataatgaaatgaagcgcaccgcgaaagcgatcccggtacaggttgcctga

SEQ ID NO: 73901 - DNA, 855 bp, Citrobacter koseri
gtgctaattattgaaaccctgccgctgctgcgacagcatattcgccgcctgcgccaggacggtaaacgcattgcgctggtgccaacgatgggcaacctgcacgatggtcatatgaaactggttgaggaagcgaaagcgcgcgctgacgtcgtggtggtcagtattttcgtgaacccaatgcagtttgaccgcccggacgatctggtacgctacccacgaacgttgcaggaagattgcgaaaagctgaacaaacgcaaagtggatttcgtgttcgcgccggcgccagcggaaatttacccgcaaggcaccgacggccagacttacgttgatgttcctgggctgtccaccatgctggaaggcgccagccgtccgggccattttcgtggtgtttccaccatcgtcagcaaactcttcaatctcgtccagccggacatcgcctgctttggcgaaaaggacttccagcaactggctttaatccgcaagatggtggccgatatgggctacgacatcgagatcgtcggcgtaccgattattcgcgccaaagatggtttagcgctgagttcgcgtaacggttacctgaccgccgaacagcgcaaaattgctcctggcttaaataaggtgatgaacagcgtcgccgagaaattgctggcgggtaatcgcgatctggaagagatgattgccgtcgccgagcaggagctgaatgaaaaaggcttccgcgcggatgacattcagattcgcgacgcggacacgctgctggaactcaccgatagcagcaaacgcgcggtgatcctgatggcggcatggctgggtcaggctcgcctgatcgacaatcagtccgttacattaacccagtag

SEQ ID NO: 73902 - DNA, 792 bp, Citrobacter koseri
atgaaaccgacgactatcgccttgctgcaaaaatgtaagcaagagaaaaagcgcttcgcgactatcaccgcctacgattacagctttgccagactcttcgctgacgagggtatcaacgtgatgctggtaggcgactcgctgggcatgacggttcagggacacgattccaccctgcctgttaccgtagaagatatcgcttaccacacgcgtgcggtgcgccgtggcgcgcctaactgtctcctgctctccgacctgccgtttatggcctatgccaccccggagcaggcgtttgaaaacgccgccgtggtgatgcgcgcgggggcgaatatggtcaaaatcgaaggcggcgcctggctggtcgatacggtaaaaatgctcaccgaacgcgcggtgccggtgtgcggccatctgggcctgacgccgcagtccgtcaacatatttggcggctataagatccaggggcgcggcgatgcggggcaggtactgctggatgatgcgctggcgctggaagcggcaggcgcgcagttgctggtgctggaatgcgtaccggttgagcttgctaaacgcgtcaccgaagcgctctccattccagtcatcggcattggcgcaggcaacgtaaccgacggtcagatcctggtgatgcacgacgccttcggcattaccggcggccacattccgaaatttgctaaaaatttcctggcggaagcaggcgacatgcgcgccgccgtgcggcagtatattgccgaggttgagtccagcgtctatccgggcgaagaacacagcttccattaa

SEQ ID NO: 73903 - DNA, 480 bp, Citrobacter koseri
gtgacggttgcctatatcgcgctcggcagcaacttagcctctccgctggagcaggttaatgctgccgtgaaggctgtcggcgacatcccggacagccgcattgttgccgtttcctcgttttaccgcactcccccgctaggcccgcaggatcagcctgactacctgaacgccgccgttgcgctggaaactcaactggcgccagaagaactgctcaaccacacgcagcgtatcgagttacaacagggccgcgttcgcaaagccgaacgatgggggccgcgcacgctcgatctcgacatcatgctgtttggtgatgacgtaataaacacgccccgcctgacgataccgcactacgacatgaaaaatcgcggttttatgctgtggccgctctttgaaatcgcccccgacctggtgttcccggacggcgtcacgctgcatcattacctcacacgcctcgcagcagaaaaacctgcccactggtaa

SEQ ID NO: 73904 - DNA, 1365 bp, Citrobacter koseri
gtgctaaaccgcgaggagagcgaggccgagcttgccgtcgcccgtccacatatgacggtaatcccgcgtgagcagcacgctatttcccgcaaagatatcagtgaaaatgctctgaaagtaatgtacaggctcaataaagcgggatatgaggcctggctggttggcggcggcgtgcgcgatcttctgctcggcaaaaaaccgaaagatttcgatgtcaccaccaatgcaacgccggatcaggtgcggaagttgttccgtaactgtcgtctggtgggtcgccgtttccgtctggcgcacgtcatgttcggcccggagattatcgaagtggcgacatttcgtggtcaccatgaaggcaacgacagcgaccgcgccacctcccagcgcgggcaaaacggcatgctgttgcgcgataacatcttcggctccattgaagaagacgcccagcgtcgtgacttcaccattaacagcctctattacagcgtggcggatttcaccgtgcgcgactatgtcggcggtatgcaggatctgaaagacggcgtgattcgcctgatcggtaaccctgaaacgcgttaccgcgaagatccggtgcgaatgctgcgtgcagtccgtttcgccgcaaaactcgatatgcgcatcagcccggaaaccgcagagccgattccgcgcctggcgaccttactcaacgatattccgcccgcgcgtctgtttgaagagtccctgaagcttctgcaagcgggatatggtttcgaaacctacaaaaagctgcgtgaatacagcctgttccagcccctgttccccaccattacgcgttatttcaccgaaaacggcgacagcgcgatggagcgcatcattgcgcaggtgctgaaaaataccgataaccgcattcataacgacatgcgcgttaacccggcgttcttgtttgccgccatgttctggtatccgttgctggaaatggcgcagaaaatcgctcaggagagcggcctggcctattacgacgcctttgcgctggccatgaacgaggtgctggacgaagcgtgccgttcgctggcgatcccgaaacgcctcaccacgttaacccgtgatatctggcaactccagttgcggatgtcccgccgccagggcaaacgcgcctggaagctgctggagcacccgaaattccgcgccgcatacgatctgctggcgttgcgcgccgaggtggaaaacaacgctgaactgcaacgtctggcgcagtggtggggcgagttccaggtttcagcgccgcccgatcagaaaggtatgctgaatgaactggatgaagaccccgcgccgcgccgccgccatcgtcgtccgcgcaaacgcgcgccacgccgcgagggaaccgcgtga

SEQ ID NO: 73905 - DNA, 966 bp, Citrobacter koseri
ttgcgccgccatccggcaaaatccgggcggggttatctcccgccttattcttttatattgtccaccggtatgaccaacgcacactatattggccgcttcgccccgtccccctctggcgagctgcactttggttcactgatcgccgccctcggtagttacctgcgagcccgctctcagcatgggatctggcgagtacgcattgaagatatcgatccccctcgtgaagttcccggtgccgcagagacaattctgcgtcagctggaacattacggcctgcactgggatggcgatatattgtggcagtcccaacgccatgacgcctaccgcgacgcgctcgcctggctgcgccagcagaatttaagctactactgcacctgcccgcgcgcgcgcattcaacgcatcggcggcgtttacgacggccattgccgaaccttgcagcatgggccggaaaatgccgccgtgcggattaaacagttcagcccggtgatgcaatttcatgacgtgctgcgcggcgatatccaggccgacccgctgctggcgcgcgaggattttattattcatcgccgcgatggtctgttcgcctataacctggcggtggtcgtggacgatcattttcagggcgtcacggaaatcgtgcgcggcgcggatttaatcgaacccacggtacggcaaatttcgttgtaccagcagttcggctggcgcgcgccggactatattcatctgccgttggcgctcaacgaacaaggcgctaaactttccaaacagaatcatgccccagccttgccggagggcgatccacgccccgtactcattgccgcgctgcgctttctgggccagaacgccacggcgcaatggcaggatatgcataccgacgaattattgcagtatgcggtggataactggacgcttacgacggtgccggaatcggcaagtgtaaatccagcattctcaaatgcgtcttgctga

SEQ ID NO: 73906 - DNA, 456 bp, Citrobacter koseri
atgcaagaagggcaaaaccgtaaaacatcgtccctgagtattctcgccatcgctggggtggagccgtaccaggagaaaccgggcgaagagtatatgaacgaagcccagctgtcgcacttcaagcgtattcttgaagcatggcgtaatcaactcagggatgaagtcgatcgcactgtgactcatatgcaggacgaagcggctaacttccctgatccggttgaccgtgccgcgcaggaagaagaatttagccttgagctgcgtaaccgcgaccgtgagcgcaaactgatcaaaaagatcgagaaaacgctgaagaaagtggaagacgaagattttggctactgcgaatcctgcggtgtcgaaattggtattcgccgtctggaagcgcgtccaacagccgatctgtgcatcgactgcaaaacgctggctgagatccgcgaaaaacaaatggcgggctaa

SEQ ID NO: 73907 - DNA, 705 bp, Citrobacter koseri
atgcagttctctccgccattgcagcgcgccaccttaattcagcgctacaaacgttttttagccgatgtcattacgccggacggcacggaattaacgttacactgcccaaataccggtgcgatgaccggatgtgccacgccgggcgataccgtctggtattcgacatcagaaaatattaaacgcaaatatccgcacacctgggaattaacgcaaacccggacaggcgcacttatctgcgttaacaccctgtgggcaaacagattaacgaaggaagcgattcagaatgagcagctttcagaactttcaggctacagcctgttaaaaagcgaagtaaaatacggcgcggaacgcagccgtattgatttcatgttacaggcagattcccgacccgactgctatattgaagtgaaatcggtcacattagcggaacaagagtatggttattttcccgatgccgtcaccttacggggacaaaaacaccttcgggaactgatgagcgtagcggctgaaggccatcgcgccgtggtgttattcgcggtgctgcattcagccattacacggttttcacccgcgcggcatatcgatgcaaaatatgcgcaactattgattgaagcacagctaaagggggtagaaattctggtttataaagccgaactttctgccgaaggtatgactctaaaagaaccgttacccatgactttataa

SEQ ID NO: 73908 - DNA, 531 bp, Citrobacter koseri
atgtctgagccgaaaaggctgttctttgccattgaattgcccgacgaggttcgtgagcagatcatcgcctggcgcgccggtcatttttccccggacgacggcaggccggtcgccgcagcgaatttgcacctgacgctggcgtttttaggcgaggtgagcgcgagcaaacaacaggcgttatcacagcttgccggacgcatccgtcagccgggctttacgctcaggctggatgacgcgggccagtggctacgttcgcgggtcgtctggctggggatgcgacagccgccgcgcgggctgctgcaactggcgaacatgttacgcgcccaagcggcgcgcagcggttgttatcaaagcccacagccttttcatccgcatattacgctgctgcgcgacgccagccatgcggtcgccattccagcgccgggtttttgctggtcgtttccggtcaatgaatttgcgctttatgcctcgtcgttcgaacgcggccgcacacgttacacacaactacagcgctggacgcttgccgaataa

SEQ ID NO: 73909 - DNA, 2430 bp, Citrobacter koseri
gtgacgtcgttgcccgttgccgccgtactgcccgaattacttgccgcgcttgaaagcgcgccccaggttttgctcaccgccccaaccggcgcggggaaatcgacctggctgccgttgcagtttctgacgcataaaggcattcaggggcgaattatcctgctggagccgcgccgtctggcggcacgtaatgtggcgcagcggctggcggaactcctgaacgagaagcccggcgagacggtcggttatcggatgcgcgcgcaaagctgtgttggcccgcagacgcggcttgaagtagtgacggaaggggtgctgacaagaatgatccagcgcgatcccgagctgaacggcgtcgggctggtgatcctcgatgaatttcatgagcgcagtttgcaggcggatctggcgctggccctgctgctggacgtgcagcaagggctgcgtgacgatctgaaactgctgatcatgtctgcgacgctggacaacgggaagctgcaacagcggcttcctgatgcgccgcaggtggtgtctgaggggcgtgcctggcccgttgagcgtcgctaccagtcacttccggcccaactgcgttttgatgaggcggtggccatcgccacggcagatttgctgcgtcacgaaaccggctctctgctgctgtttttaccgggcgttggggaaattctgcgcgtacaggaacacctggccgcgcgcgtggcggatgatgtgctgttatgcccgctgtatggcgcgttgtctctggaggcgcagcgtaaagcgatactgcctgcgccgcgcgggatgcgcaaagtcgtgctggcgaccaatattgccgaaaccagtttaaccatcgagggtatccgtctggtggtggacagcgcgcaggagcgcgtggcgcgctatgacgtgcgaaccggcctgacgcggctgattacccagcgcgtcagtcaggcctccatgacgcagcgagccggacgcgccgggcgtctggaaccgggcgtgtgtgttcacctgctggcgaaagagcaggcggaaagggcggcggcgcaaagcgagccggagattttacaaagcgatctgtccggtttattgctggagctgttgcaatggggatgcagcgatcccgcgcagctcaactggctggaccttcccccggccgccaacgtgcaggcagcccggcggctgttgcagatgctgaatgcgctggatggtgagcggctgagcgcgacggggcagaaaatggcgcggcttggcaacgacccccgtctggcggcgatgctggtcagcgccggcaatgacagcgaaaaggcgacagcggcgaaactggcggcgattctggaggagccgccacgcgcgggcaataccgacctcagcgtggcgttttcgcgccagcaaccgggctggcagcagcgtagccagcagctcctgaaacggctcaacgggcgaggcggcgaagtggacggcacgatgctggcgccgctgcttgcgcaggcgtttgccgatcgtattgcgcgtcgacgcggtcaggaagggcgctatcaactggcgaatggcatgggcgcggtgcttgacgccgatgacgcgctgggtcgccatgagtggcttatcgcaccgttgctgttgcaggggagcgcgtcgccggatgcccgtattctgctggctttaccgctggatattgaggcgcttattcaggcatgtccggcgctgttgcagcagtccgacacggtagagtgggacgacgcgcagggaacgttaaaggcgctgcgccgaatgcgcatcgggcaactgacggtaaaagttcagccgctggctaagccttcggaagaggaactgcaccaggcgatgctcaatggcattcgcgataaagggctaagtgtgctcaactggacgccggaggctgaacagttccgcctgcgtctgctgtgcgcggcgcaatggttgccggagtacgactggcccgccgttgatgacgcttctcttctggcgacgctggaaagctggctgctgccgcacatgacgggcgttcatacgctgcgcgccctgaaagccctgaatattacccaggcgttacgtggcctgctggactggtctatgctgcaacgtctggatagtgagctgcccgcgcattacactgtgccgacgggaagccggatagccattcgttatcacgaagataacccgccagcgctggcggtcagaatgcaggagatgtttggcgaagcgaatacgcctgctatcgcgcaggggcgcgtgccgctggtgctggagttgctctcaccggcccaacgcccgctacagattacgcgcgatttaagcgcgttctggcagggagcgtaccgcgaggtacaaaaagagatgaaagggcgttatcccaaacatgtctggccggacgatccggcgaataccgcgccaacgcggcgcacgaagaagtattcatga

SEQ ID NO: 73910 - DNA, 2541 bp, Citrobacter koseri
atggccgggaatgaccgcgagccaattggacgcaaagggaaaccaccgcgtccggtgaaacaaaaggtaagccgtcgtcgactcagagatgaagagtacgacgacgattatgatgatgactatgaggatgaagaaccgatgccgcgtaacggtaagggcaaagggcgtaagcctcgtggcaagcgtggctggctctggctactgctaaaactgtcgattgtttttgtcgtgctgattgcgatctacggtgtctatctggatcaaaaaatccgtagccgtattgatggcaaagtctggcagcttcctgcggcggtatatggccggatggttaaccttgagccggaaatgcccgtcagcaagaatgaaatggtgaaattgctggaggccacccagtaccgtcaggtgacgaaaatgacgcgtcccggcgagtttaccgtgcaggcgaacagcatcgagatgatccgccgtccgtttgacttcccggacagcaaagaagggcaggtgcgtgcgcgtctgacctttgacggcggccatctggatacgatcgtgaatatggataacaaccgtcagtttggtttcttccgtctcgatccgcgcctgatcaccatgctctcttcgccgaatggcgaacagcgcctgttcgtgccgcgcaacggtttcccggatctgctggtggatacgctgctggcgacggaagaccgtcatttctatgagcacgatggcgttagcctgtattccatcggtcgtgcggtgctggcgaaccttaccgccgggcgcacggttcagggggcgagtacgctgacgcaacagctggtgaaaaacctgttcctcaccagcgaacgctcctactggcgtaaagcgaacgaagcttacatggcgctgctgatggatgcgcgctacagcaaggacagaatccttgagctgtacatgaacgaagtctatctcggccagagcggcgataacgagattcgcggcttcccgctggcgagcctgtactactttggccgcccggtcgaagagttgagcctcgatcagcaggcgctgctggtggggatggtgaaaggggcgtcaatctacaacccgtggcgtaacccgaaactggcgctggagcgtcgtaatctggtgctgcgtctgctgcaacaacagcaggtgatcgaccaggagctgtacgacatgctgagcgcgcgtccgctgggcgtgcagccgcgcggcggggtgatctcgccacagccagcctttatgcagatggtgcgtcaggagttgcaggcgaagctcggcgacaaagtgaaagacctttctggcgtgaagatcttcaccacctttgattccgtggcgcaggatgcggctgaaaaagcggccgttgagggcattccggcgctgaagaaacagcgtaatctgagcgatctggaaaccgcgattgtggtggtagaccgcttcagcggtgaggtgcgtgcgatggtcggcggggcggagccgcagttcgccgggtataaccgtgcgatgcaggcgcgccgttctatcggctctctggcaaaaccggcgacctatctgacggcgttaagccagccgaagctgtatcgcctgaacacctggattgccgacgcgccgatcgcgcttcgtcagccgaacgggcaggtctggtctccgcagaacgatgaccgtcgttacagcgaaagtggcaaagtgatgctggtggacgcgctgacgcgctccatgaacgtgccgacggtgaatctggggatggcgctgggacttcctgccgtcaccgatacctggatgaagctgggcgtgccgaaagatcagctgcatccggttccggccatgctgctgggggcgctgaacctgacgccaatcgaagtggcgcaagcgttccagaccatcgccagcggcggcaaccgggcgccgttgtcagcattgcgttcggtgattgcggaagacggtacggtgctgtatcagagcttcccgcaggctgagcgcgcggttccggcgcaggcggcgtatatgacgttgtggacgatgcagcaggttgtgcagcgcggcaccgggcgtcagctgggcgcgaagtatccgggtctgcatctggcgggtaaaaccgggaccaccaacaacaatgtcgatacctggtttgcagggattgatggcagccaggtgacgattacctgggtggggcgcgataataaccagccgacgaaactgtacggcgccagcggcgcgatgtcgatttatcagcgttatctggcgaaccaaacgccaacgccgctgacgctgacgccgccggaagatttggtggatatgggcgttgattacgacggtaatttcgtctgtagcggtggaatgcgtgcgctgccggtctggacgaccgacccggacgcgctgtgccagcagggcgaaatgatgcaacagcagcagccgaccgggaatccgttcgatcagtcttcttcacagcaacagcagcctcaacagcagcaaccggcgcagcaggagaagaaagacagcgacggcgtggcggggtggatcaaggatatgtttggtagtaactaa

SEQ ID NO: 73911 - DNA, 2250 bp, Citrobacter koseri
atggcgcgtcttaaaactgctcagccaaactcttcgctgcgtaaaatcgcagtcgtagtagccacagcggttagcggcatgtctgtctatgcacaggcggcggttgaaccgaaagaagaaactatcaccgtaaccgctgcacctgcccagcaggaaagtgcctgggggccggcggcgaccatcgcggccagacaatccgccacagcgaccaaaacggatacccccattcaaaaggtgccacagtctatttctgtggtaactgccgaggagatggcgctgcatcagcctaaatcggtgaaagaggcgctcagctacactcctggtgttgccgtgggcacccgtggcgcgtctaacacttatgattacctgatcatccgcggtttcgccgctgacggccaaagtcagaacaactatctgaatggcctgaagatgcagggtaacttttacaatgatgcggtgattgacccttatatgctggagcgcgctgaagtcatgcgcggcccggtttccgttctctacggaaaaagcaaccctggtggtttgttgaacatggtcagcaagcgtccaaccacggaaccgctgaaagaagttcagttcaagatgggcaccgacagcctgttccagaccggttttgactttagtgatgctctggatgacgatggtgtttactcttatcgcttaaccggccttgcgcgttctgcgaatgcccagcagcaaggtgcggaagaacagcgttatgccattgcgccatctttcagctggcgtccgaatgataaaaccaactttaccttcttatcttatttccagaatgaaccggaaacaggttattacggctggctgccgaaagaagggacagtgactaagttaccgaacggtaagcgtctctctaccgatttcaacgaaggtgcgaacaacaatacctattctcgtaacgagaagatggtgggctacagcttcgaccacgaatttaacgacacctttaccgtgcgtcagaacctgcgttacgcgcaaaataaagtctcgcagaacagcgtgtatggctacggtatgtgctccgatccgctctatacaaaggatccggctaatagtccttgcgccagcgttcctcagtcagattggggtcatacgctgactcgtcagtacgttatcgataatgagaaattgcagaacttcgctgtcgatacccaactgcaaagcaagtttgcaacggccgatgtggatcacacgctgctgaccggcgttgactttatgcgtatgcgtaacgatattgactcctggtttggctatgctggttctgtaacgccgtccgacatctataaccttgatcgcagtgacttcgattttggctcacatcctggcccttcaggcccttacaaagtgctgaacaagcagaagcaaactggcttgtacgtgcaggatcagatgcagtgggataaggtgctggttaccctgggtggtcgttatgactgggctgaccaggagtccttcaaccgtgtttacggtactaccgataagcgcgatgacaaacagttcacctggcgtggcggtgttaactacctgttcgacaatggcgtaaccccgtatttcagctatagcgagtcgtttgaaccggcttcgcagacgggggaaagcggtaatatctttgctccatccaaaggtaagcagtacgaagctggcgtgaaatacgtgccgagcgatcgtccgatcgtgattaccggtgcagtgtatcagctcaccaaaaccaacaatctgatgcccgacccgaatggatcgtcctggtcagtcgaaggcggtgaaattcgttcacgcggtgtggaaattgaagcgaaagccgcgctgtctgcaagcgtcaacgtggttggttcttatacctataccgatgcggaatataccaccgacaccagctacaaaggcaacacgcctgctcaggtgcctaaacatatggcatcattgtggggtgattacaccctctatgacggcgcgctttccgggctgacgttgggtacgggtgttcgttatactggctccagctatggcgacccggcaaactccttcaaagtggggagctatacgctggtggatgcgttagtacgttacgatctggcgcgcgttggtatggctgggtctaacgtggcgctgcatgtgaacaacttgtttgaccgtgagtacgtcgcaagctgctttaacacctatggctgcttctggggcgcggagcgtcaggtcgttgcaaccgcaaccttccgtttctaa

SEQ ID NO: 73912 - DNA, 798 bp, Citrobacter koseri
atgcaggaaaacataacccgtcccgacacgactttcgccctacgtaatgtctcctttcgtgtgcctggccgcacgcttctgcatcctctttcgctgacctttccggtgggtaaagttaccgggcttattggtcacaacggttcaggtaaatcaaccttactgaaaatgctggggcggcatcaaccgccgtcggaaggcgacgtgttgctcgacgatcagccgttgaacagctggaacagtaaagcgtttgcccgcaaggtcgcctatctgccgcagcagcttccgcaggcggaagggatgacggtgcgcgagctggtggcgattgggcgttatccgtggcacggtgcgctgggtcgttttggcgtaaccgacagagaaaaagtggaagaggcgattacgctagtgggactaaaaccactggcgcaccgtctggtagacagcctctccggcggggaacgtcagcgggcgtggatcgccatgctggtggcccaggatagccgctgcctgctactcgatgaacccacctccgcgctggatatcgcgcatcaggttgatgtgctggcgctggtgcaccgcttaagccagcagcgtgggctgacggtgattgccgtcctgcacgacatcaacatggcggcccgctactgtgattatctggtggcgctgcgcggtggcgaaatgattgcccagggaacgccagcagagttgatgcgtggtgaaacgctggagctgatttatggcatcccgatgggaattttgccgcatccggctggtgccgcacccgtgagttttgtctattaa

SEQ ID NO: 73913 - DNA, 891 bp, Citrobacter koseri
atgagcggtttacattctattacccgacgtcgattgttaacggcgatggcgctttctcctctgctctggcaaatggggcaagcccgggccgcaaccgtcgatcctcatcgtattgtcgccctggagtggttgccggtagagctgctgttagcgctcggcatcatgccttacggcgtggcggatattcccaattatcgcctgtgggttaacgagccggcattgccggagtcggtcattgacgttgggctgcgtaccgaacctaatctggaactgctgaccgaaatgaagccctcatttatggtctggtcggcaggctatggcccttcgcctgaaaagctggcgcgtatcgcgccggggcgcggctttagcttcagcgacggcaaaaaaccattagcggtagcgcgtcagtcgttaattgaaatggcgcaactgcttaatcttgagtctgcggccagccgccatctggcggaatacgatagctttatcgacagccagaaaccgcgctttgcccggcgtggcgaccggcctctgctgctaatgacgttgctcgatccgcgccatatgctggttttcggcccgaactgcttattccaggagacgctggacgcgttcggcattcgcaatgcctggcagggggaaaccaatttctggggcagcactgcggtcggtatcgaccggctggcggcctataaagacgctgacgtcctctgttttgatcacggcaataacccggatatggccgcgttgatggcgacgccgctgtggcaggcgatgccgtttgtgcgcgccggacgttttcagcgcgtgcctgccgtctggttttatggcgcgacgctgtcgagcatgcgtttcgtgcgcattctggataatgcgctgggaggtaaagcgtga

SEQ ID NO: 73914 - DNA, 1983 bp, Citrobacter koseri
gtgagtcgacgtattgcgctatttccggcgttgctgctggcggtgttatttatcgctgctgcctggctgacctggtttaacttctccatcgcattgccgcgcagccagtggcagcaagcgttctggtcgccggatatcgacagcattgagcaaatgattttccactatagcctgctgccacgcctggcgatcgccttgctggtcggggccggacttgggctggtgggcgtattgttccagcaggtgctgcgtaacccgctggcggagccaacgacgctcggcgtggcgacgggggcgcagctcgggattacgctaacgacgctgtgggtgattcccggcgcgatggctacgcaatttgcggcgctggcaggcgcgtgcgtggtgggggcgctggtgtttggcgtcgcctggggaaaacgcctgtcaccggtcacgctgattctcgccggtctggtggtgagcctgtattgcggggcgattaaccagctgatggtgattttccaccacgaccagttgcaaagcatgttcctgtggagcactggaacgctgacgcaaactgactggagcggggtgcagaggctgtggccgcagctgctgggcggcgtgatgctcaccttgctattgctgcgtccgatgaccctgatggggctggatgacggcgtagcgcgcaatctggggctggccttgtcgctggcgcgtctggcggctttatcgctggcgatcgtgctcagcgcgatgctggttaacgccgttgggattatcggttttatcggcctgttcgccccgctgctggcgaaaatgcttggggcgcgtcgcttactggcgcgcctgatgctggcgccgctgattggcgcgctgatcctctggctttccgatcagaccattttgtggctgacccgcgtctggatggaggtctctacgggttccgtgacggcgctgattggcgcgccgctgttgctgtggctgctgccgcgtctgcgcagcatgagcgcgccggcaatgaacgccagtgaccgcgtagcggcggaacgccagcatgtgttgagttttgcgctggcaggcggtgtcgtgctgctgctggcggtgttcgtggcgctctcttttggccgtgacgcgcacggctggaactgggcgagcggcgcgctgctggatgaactgatgccctggcgctggccgcgtattctggcggcattgattgcgggcgtgatgctggcggtagcggggtgcattattcaacgcctgaccggaaacccgatggccagcccggaagtgctgggtatcagctccggcgcggcgttcggcgtggtgctgatgctgttcctggtgccgggtaacgcctttggctggttgctgcctgccgggagcatcggcgcggcggcgacgttgctgatcatcatggtcgcggcaggacgtgggggcttttctccgcaccgtatgctgctggcggggatggcgctcagtacggcgtttacgatgctgttgatgatgttgcaggcgagcggcgatccgcgtatggcgggagtgctgacctggatctccggttcgacctacaacgcgtcggaagaacaggtggtacgcaccggcattgtgatggtgattctgttggcgattacgccgctgtgtcgtcgctggttaaccattttaccgctgggcggcgagacggcgcgggcggtgggtatcgcgttgacgccatcgcgtgttgggctgttgttgctggcggcctgtctgacggcgaccgcgacgatgaccattgggccgctgagcttcgtcgggctgatggcaccgcatatcgcgcggatgctcggttttcgccgcacgatgccgcatatgattatgtcggcgctggcggggggaatactgctggttttcgccgactggtgcggcagaatggtgttgttcccgtatcagatcccggcgggattgctctcgacgtttatcggcgcgccgtattttatttatctgttacgtaagcagagccggtaa

SEQ ID NO: 73915 - DNA, 1281 bp, Citrobacter koseri
atgagcaagtctgaaaacctctacagcgcagcgcgcgagcttatccccggcggcgtcaactcccctgttcgcgccttcactggcgtgggcggcaccccgctgtttatcgaaaaagcagacggcgcgtatctgtatgatgtcgatggcaaagcgtacatcgattacgtcggctcctggggtccgatggtgctgggccataaccaccccgccatccgtaatgcagtgattgaagccgctgcgcgcgggctgagcttcggcgcgccgaccgagatggaagttaaaatggcggagctggtcaccgaactggtgccgactatggacatggtgcggatggtgaactccggcaccgaagccacaatgagtgcgattcgcctggcgcgcggcttcaccggtcgcgacaagatcatcaaatttgaaggctgctaccacggccacgccgactgcctgctggtgaaagcgggttccggcgcactgacgctgggccagccgaactcaccgggcgttccggctgatttcgccagacataccctgacctgcacctataacgatctggcctctgtacgcgcggcgttcgagcaatatccgcaagagattgcctgtattatcgtcgagccggtggcgggcaatatgaactgcatccctccgctgccggaattcctgccgggcctgcgcgccctgtgcgacgaattcggcgcgctgctgatcattgacgaagtgatgaccggtttccgcgtggcgctggcgggcgcacaggattattacggcgtagtgccggatctgacctgtctgggcaaaatcatcggcggcggcatgccggtaggcgcatttggcggacgccgcgatgtgatggacgcactggcgccgactggcccggtttaccaggcgggaacgctttccggcaacccgattgctatggcggcgggtttcgcctgcctgaccgaagtcgcccagccggggattcacgagacgctggacgaactgacgacccgcctggcagaaggcctgctggacgccgcgcaggaagccgatattccactggtggtgaatcacgtcggcggtatgttcggcatcttctttaccgacgcggaatccgtaaactgctatcaggatgtaatggcatgcgacgttgatcgcttcaaacgtttcttccacatgatgctggatgaaggcgtttacctggcgccgtccgccttcgaggcaggctttatgtccgtggcgcacagcatggacgatatcaacaacaccattgatgccgcgcgtcgggtatttgcgaaactgtaa

SEQ ID NO: 73916 - DNA, 1422 bp, Citrobacter koseri
atgaacacagacactcccactttcgaagcacagcaagttgtgcgcttacggcgcggggatctgatccgcagactacttcagcgggataaaacgccgctggccatcttattaacggcggcggtggtcggcaccgtcacgggtcttattggcgttgcgtttgagaaagccgtgacctgggtgcagaacttacgcatcggcgcgctcgttcagacggccgattacgcgattctggtctggccgctggcctttattctctctgcgctgctggcgatggtcggttattttctggtgcgtaagtttgcgccggaagccggtgggtcgggcatcccggaaatagaaggcgcgctggaagagttgcgtcctgttcgctggtggcgcgtgctgccggtgaaatttgtgggcggtatgggaacgctgggcgctggcatggtgctggggcgggaagggccaacggtacaaatcgggggcaatatcgggcggatggtgctggacctcttccgtatgcgtagcgccgaggcgcgtcacaccttactggcaaccggcgcggccgcagggttatcggcagcctttaacgcgccgctggcggggatcttatttatcatcgaagagatgcgcccgcagtttcgctacaatttaatttcgatcaaagccgtgtttacgggcgtgatcatgtcgagcattgtgtttcgtatttttaacggtgaagcgccgattattgaggtcgggaagctctcaaacgcaccggttaatacgctatggttatatttaatcctcggcatgatttttggctgcgtcgggccgctgttcaatcatctggtattgcgcactcaggatatgttccagcgttttcacggcggcgaaatcaaaaagtgggttctgatgggcggcgcgatcggcggcctgtgcggtattctcggcttaattgagccagaagcggcgggcggtggatttaatttgatccccattgcggcggcggggaattacagcgtaggcctgctgctgtttatttttatcgcccgcgtccttaccacgctgctttgtttctcatccggcgcgccgggcggaatttttgcgccaatgctggcgctggggacgttgctcggcaccgcatttggtatggcggctgcggcgtgttttccgcagtaccatctggaggccggaacattcgcgattgccggaatgggcgcgctgctggcggcgtcggtgcgtgcgcctttaacgggaatcgtgttagtgctggagatgaccgataactatcagctcattttgccaatgattattacctgtcttggcgcaacactattagcacaatttatgggcggaaaaccgctatactccaccatccttgcgcgcacgctggcgaaacaggatgcggagcaggcggcaaaaagccagcggtcggctgctggtgagaatacttga

SEQ ID NO: 73917 - DNA, 345 bp, Citrobacter koseri
atgagtgatgacgtagcgctgccactgcaatttactgaagcagcagccaagaaagtaaaaagcctgatcgctgacgaagataacccgaatctgaaactgcgcgtgtatatcaccggcggtggttgcagcggtttccagtacggttttacctttgatgatcaggtgaacgaaggtgatatgaccatcgagaagcagggtgttggcctggtggttgacccgatgagcctgcaatatctggtaggcggcgctgtcgattacaccgaaggtctggaaggttcccgctttgtggtcaccaacccgaatgcgaaaagcacctgcgggtgtggttcgtcctttagtatctga

SEQ ID NO: 73918 - DNA, 624 bp, Citrobacter koseri
atgctcgtctattggctggatattgtaggcacagctgtctttgctatctctggcgtattgctggccggaaagttgcgtatggacccgtttggcgtactggtattgggcgtcgtgaccgcagtgggcggcgggacgatccgcgatatggcgctggataacgggcccgtcttttgggtcaaagatccgaccgacctggtggtggcgatggtcaccagcatgctcaccattttgctggtgcgccagccgagacgattgcctaaatggatgcttcccgtgctggatgccgtcggcctcgcggtgttcgtcggtatcggcgtcaataaggcgttccttgccgaaacaggcccgctggtcgccatctgtatgggcgtgattaccggcgtcggcggcgggattatccgcgacgtgctggcgcgtgaagtgccgatgatcttacgcacggagatttatgccacggcctgtattatcggcggcatcgtgcatgcgacggcgttttataccttttccgtgccgctggaaagcgccagtatgatggggatggttgtgacgttaatgattcgtctggccgcaattcgttggcatttaaaattaccgacgtttgctctggatgagaacgggcgttga

SEQ ID NO: 73919 - DNA, 801 bp, Citrobacter koseri
atggctaaattattctccagggcgctggccgccctgcttttagcccttccgctgtggctttgcgccgcaccgcgcgtcgtttccctctccccttccaacaccgaacttgcctttgccgcagggattacacccgttggcgtcagcagttattccgactatcccccgcaagcgaaaaacatcgaagaagtctccacctggcaagggatgaatctggaacgtattgtggcgctcaaacccgatcttgtcatcgcctggcgaggaggcaatgctgaacggcaggttaaccagctggcgtccctgggcattaaaatcatgtgggtggatgccgtaaccattgagcaggtcgccgacgcactgcgccagcttgccgcatggagtcctgagccagaaaaagccagacgcgcggcgcaaacgctgctggacgagtatgccgcgctaaagtcgcagtacgccgataaaccgaaaaaacgcgtttttctccagtttggcgcgaatccgttattcaccagcggaaaaggctccatccagcaccaggttcttgaggtctgcggcggagaaaatatttttgcgggcagtcgcgtcccctggccgcaggtcagccgcgagcaggtgctggcccgacatccgcaggcgattgtcgttaccggtgatgcgggcgaaattcctaaaatagaacaatactggcaaaatcagctaaaaatcccggttataccgctgaatggtgactggtttgaacgcgcgagcccgcgtatcatcctcgccgcaaaacaactctgtaatgcgctttcacaagtagaatag

SEQ ID NO: 73920 - DNA, 699 bp, Citrobacter koseri
atgaaaatcggcatcattggtgcaatggaagaagaagttacgctgctgcgtgacaaaatcgaaaaccgtcagacgatcaccctgggcggttgtgaaatttacaccggccaactgaacgggaccgagattgcgctgctgaaatccggcatcggtaaagtcgcggcggcgctgggcgcaacgttgctgctggaacgttgcaagccggatgtcattattaataccggttccgctggcggtctggccccgacgctgacagtcggcgatatcgtcgtttccgatgaagcgcgttatcacgatgccgacgttaccgcgtttggttatgaatttggtcagctccctggctgcccggcaggttttaaagccgacgacgcgctgatcgcggcggcggaatcctgcatcgcaaaactcaacctgaatgcggttcgcggactgatcgtcagcggcgacgctttcattaacggctccgtgggcctggcgaaaatccgccacaatttcccgcaggcgattgccgtggaaatggaagcgaccgcgatcgcgcatgtctgccataacttcaacgtgcctttcgtggtggttcgcgccatctctgatgtggccgatcagcaatcccacctcagctttgacgaattcctggccgtagccgcgaagcagtccagcctgatggttgaaacgctggtgcagaaactggcgcatggctaa

SEQ ID NO: 73921 - DNA, 1515 bp, Citrobacter koseri
atggcacagatcgatttccgaaataaaattaattggcatcgtcgttatcgttcaccgcagggtgtgaagaccgaacatgagatcctgcggatctttgaaagcgatcgtggacgcatcatcaattccccggcgatccgtcggcttcagcaaaaaacgcaggtctttccactggaacgtaacgccgccgttcggacgcggttgacgcattctatggaggtgcagcaggtcgggcgttatatcgcgaaagagatcctgagccggttaaaagagttaaaactgctggaacaatacggtctggatgaactgaccggcccctttgagagcattgtggaaatgtcctgcctgatgcatgacattggcaatccgccgtttggtcatttcggcgaggcggcgatcaatgactggtttcgccagcgcctgcacccggcggatgcggaaagccagccgcttagcgacgatcgctgcgcggtggcggcgttgcgtctgcgtgaaggcgaggagtctttgaatgatattcgtcgcaaggtgcgccaggatttatgtcatttcgagggcaacgcgcagggcatccgcctggtgcatacattaatgcgcatgaatctgacctgggcgcaggtgggcggcattttaaaatacactcgcccggcatggtggcgaggagaaacgcccgcgacgcaccgttatttaatgaaaaagccggggtattatctctctgaagcgccgtatattgagaggttacgtaaagaacttgcgttagcgccttacagccgcttcccattaacatggattatggaggccgccgatgatatctcttattgcgtggccgacctggaagatgccgtcgagaaaagaatcttcagcgttgagcagttatatcaccatctttacgaagcatggggccaccatgaaaaagggtcgctgtttactcaggttgttgagaatgcctgggaaaaatctcgctcaaattcgctaagtcgcagtacggaagatcagttctttatgtatttgcgcgtgaatacgctaaataaactggtgccctacgccgctcagcgttttattgataatctgccgcaaatctttgacggcagtttcaatcatgcgctgctggaagacgccagcagcttcagccagttgcttgagttatataaaaatgtggcgataaaacatgtgtttagccacccggatgttgaacaactggaattacagggctaccgcgtcatcagcgggttattagaaatttatcaaccgttattacgtatgtccctggtagatttcagggaactggttgaaaaagagcgggtgaagcgttttccaatagaatctcgtttattccagaagctctctacgcgccatcgcctggcttacgtggaggccgtcagtaaattatcgtcggaggcgccggagtatcccacgctggaatattattatcgctgccgtttgatccaggattatatcagcgggatgacggatctgtacgcctgggatgaataccggcgtctgatggcggttgaataa

SEQ ID NO: 73922 - DNA, 1422 bp, Citrobacter koseri
atgaaaaaaaccacattagcaatgagtgcactggctctgagtttaggtttggcgctgtcccccctgtctgcaacggcggctgagacggcgtcttcggcaacgactgcccagcagatgccaagtctggcaccgatgctcgaaaaagtgatgccatcggtggtgagtatcaacgtggaaggtagcacaaccgtcaacacgccgcgcatgccgcgtaatttccagcagttctttggcgatgattcgccattctgccaggacggttcgccgttccagagttctccgttctgccagggcgggggtcagggcggcggtcagcaacagaaatttatggcgctgggctccggcgtcattattgatgccgcaaaaggttatgtcgtcaccaacaaccatgtggtggataacgcgacggtcatcaaagttcaactgagcgatggccgtaaatttgacgctaaggtcgtcggtaaagatccgcgctctgatatcgcgctggttcaaattcaggacccgaaaaatctgacggccattaagctggcggattccgatgcgctgcgcgtgggggattatactgtcgctatcggcaacccgtttggtctgggcgaaacggtgacttccggtatcgtctccgcactgggtcgtagcggtctgaacgcggaaaactacgaaaactttatccagacggatgccgccatcaaccgtggtaactccggtggcgcgctggtgaacctgaacggcgagctgatcgggattaacaccgcgattcttgcgccggacggcggcaacatcggtattggttttgctatccccagcaacatggtgaaaaacctgacctcccagatggtggagtatggccaggttaaacgcggtgagctgggtatcatggggacggagctaaactctgaactggcgaaagcgatgaaagtcgatgcccagcgcggcgcgtttgtcagccaggtgatggcgaactcttctgcggcgaaagccggtattaaagccggggatgtgatcacgtccctgaacggtaagccgatcagcagctttgccgcgctgcgcgcccaggtgggtacgatgccggtaggcagcaaaatcagccttggtctgctgcgtgatggcaagccggtgactgtcaacctggaactgcaacagagcagccagaatcaggttgattccagctccatcttcaatggtattgaaggcgcggaaatgagcaacaaaggccaggataaaggcgttgttgtcagcaacgtgaagccgaatacgccggctgcgcagattggcctgaagaaaggggatgtgattgtgggggccaaccagcaggcgattaagaacatcgctgagctgcgtaaaatcctcgacagcaaaccttctgttctggcgctgaatattcagcgcggcgatagcaccatctatctgctgatgcagtaa

SEQ ID NO: 73923 - DNA, 1158 bp, Citrobacter koseri
atggctggctggcatcttgataccaaaatggcacaggatattgtggcgcgcacaatgcgcatcatcgataccaatatcaatgtaatggatgcccgtgggcgtattatcggtagcggcgatcgggagcgcattggtgaattgcacgaaggcgcgctgttggtgctgtcgcaggggcgcgtggtcgatattgatgatgcggtggcgcggcatctccacggcgtgcgccaggggatcaacctgccgttgcgcctggaaggggagatcgtcggcgttattggtttaaccggtgagccgcaacacctgcgaaaatacggtgagctggtctgtatgacggccgaaatgatgctggagcagtcgcggctgatgcatctgctggctcaggacagccgtctgcgtgaagaactggtgatgaacctgattcaggccgaggaaaatacgccagcgttgacggagtgggcgcagcggctgggtatcgacctgaaccaaccgcgtgtggctgccgtggtcgaagtggacagtgggcagcttggcgttgacagcgcgatggaggagttgcagcagctgcaaaatgcgttaacgacgcctgaacgcaacaatttgattgctatcgtttctttgacggaaatggttgtgctgaaaccggcgctgaatcagtttgggcgctgggatgcggacgatcatcgcaagcgtattgagcagttgattgcccggatgaaggagaacgggcaattgcgctttcgggtcgcactggggaactattttaccggcccgggcagtatcgcccgttcctggcgcactgcgcgtactaccatgatggtgggcaagcagcgtatgccggagcaacgcagctacttttaccaggatttgatgctgccagtgctgctggacagcctgcgtggtggctggcaggccaatgagctggcgcgcccgctctcaaagctgaaggcgatggataataacgggctgttacgccggacgctggccgcgtggtttcgccataacgtgcagccgctggcaacgtcgaaggcgctctttattcaccgtaatacgctggaataccgtctgaaccgcatctctgagttgacggggctggatttgggcaattttgacgatcggctgttgctgtatgtcgcgctgcaactggacgagcagcggtga

SEQ ID NO: 73924 - DNA, 402 bp, Citrobacter koseri
atgaagggtaccgctatgtatgacaatctgaaaagtctgggcattaccaatcctgaagaaatcgatcgttacagcctgcggcaagaagccaacaacgatatcctgaaaatctatttccagaaggatagaggcgagttctttgccaaaagcgtaaagttcaaatatccccgccagcgtaaaaccgtcgtcgccgatggtatcggacaaggttacaaagaggtgcaggagatcagtcctaacctgcgctatgtgatcgatgagctggatcagatctgccagcgcgatcgcacggaagtcgatctcaaacgtaagatcctggatgatttacgtcatctggaaagcgtggtcgccaacaagatcaacgaaatcgaagcggatctggaaaaactaacgcgtaagtaa

SEQ ID NO: 73925 - DNA, 825 bp, Citrobacter koseri
atgcagcagttacagaacgttattgagtccgctttcgagcgccgtgccgacatcactccggcgaatgtagataccgtgacccgcgaagcggttaaccaggtcatttctctgctggattccggtgtgctgcgtgtagcagaaaagattgatggtcagtgggtgactcaccagtggctgaagaaagcggttctgctctctttccgtattaacgataaccaggttatcgacggtgcggaaagccgctacttcgataaagtaccgatgaaattcgccgactatgacgaagcgcgcttccagaaagaaggcttccgcgtagtgccgcctgccgctgtgcgtcagggcgcgtttatcgcacgcaacaccgtgctgatgccatcctatgtaaacatcggcgcattcgttgatgaaggcacgatggtagatacctgggcgaccgtaggttcctgcgcgcagattggtaaaaacgtacacctgtccggcggcgtcggcatcggcggcgtactggaaccgctacaggcgaacccgacaatcatcgaagataactgcttcatcggcgcgcgttctgaagtggttgaaggggtgatcgttgaggaaggttccgtgatctctatgggcgtgtacatcggtcaaagcacccgtatttacgatcgcgaaacgggcgaaatccattatggccgcgtaccggcaggctccgttgtggtttccggcaacctgccgtcgaaagacggtaaatacagcctgtactgtgcggtcatcgtgaaaaaagtcgacgcgaagacgcgcggcaaagtcgggatcaacgagctgttacgtaccatcgactaa

SEQ ID NO: 73926 - DNA, 2673 bp, Citrobacter koseri
atgaatactcttcctgaacagcacgcgaatacggctctccccaccctacccggccaaccgcaaaatccgggagcctggtcgcgtgacgagcttaccgtcagcggaattaaagcccacattgatattttccagcagtggctgggagacgcttttgacagcgggatttccgcagagcaattgattgaagcccgcaccgaatttatcgaccagttgttgcaacgactgtggatcgatgccggattcgggcaaattgccgatctggccctggtggccgtcggcggctatggccggggcgagctgcatccgctttccgacattgacctgctcatcctgagccgtaaaaagctgcccgacgctcaggcgcaaaaagtcggggaactgctgaccttgctgtgggatgtgaagctggaagtcgggcatagcgtgcgcacactggaagagtgtctgctggaagggctgtcagacttaaccgtcgccaccaatctgattgaaacacgtctgctgatcggcgacgtggcgctttttctggagctgcaaaagcatattttcagtgaaggtttctggccgtcggagaaatttttcgctgccaaagtcgaagagcaaaaccagcgccaccagcgctatcacggcaccagctataaccttgaacccgatattaaaagcagccccggcggcctgcgtgatatccacaccctgcaatgggtggcccgccgccacttcggcgcaacgtctctcaatgagatggtcggcttcggcttcttaacccaggcagaacgcgccgagctaaacgaatgcctgcatattttgtggcgcattcgcttcgcgttgcacctggtggtcagccgttacgacaaccgcctgctgttcgacaggcagctcagcgttgcccagcggctcaactacactggcgaaggcaacgagccggttgagcacatgatgaaagactatttccgggtcacgcgtcgggtgagcgaactgaaccagatgctattgcagctgtttgatgaagcaatcctcgccctacccgccgatgaaaaacctcgcccgattgatgacgattttcaactgcgcggcacgctgatcgacctgcgcgatgacgatctgtttatccgttcgccggaagcgatcctgcggatgttttatatgatggtgcgcaatagcaccatcactggcatctattccaccacgctgcgccatctgcgccatgcccgccgccacctgacccagccgctgtgctacatcccggaagcgcgctctctgtttctcagtatgctgcgtcatccgggcgccgtcagccgcggtttgctgccaatgcatcgccacagcgtactttgggcttacatgccgcaatggtcgcatatcgtcggccaaatgcagttcgacctgttccatgcctatacggtggatgagcacaccattcgcgtaatgctgaagctggaaagtttcgccaaagaagagacccgccagcgccatccgctgtgcgtcgatctctggccgcgcctgcggcaaccggaactgatcctgatcgcggcgttgttccatgatatcgccaaagggcgcggcggcgaccactcggtactcggcgcgcaggacgtgctcaaatttgccgaactgcacggcctgaactcacgcgaaacgcaactggtcgcctggctggtacgccagcacctgctgatgtcggttaccgcccagcggcgcgatatccaggaccctgaggtcatcaaacagttcgccgaagaggtgcaaacggaacaccgtctgcgcttcctggtatgcctgacggtcgctgacatttgcgccactaacgaaacgttgtggaacagctggaagcaaagcctgttgcgcgaactgtacttcgccaccgaaaaacagctacgtcgcggcatgcaaaacacgccggatatgcgcgaacgcgtgcgccatcatcagcttcaggcgctggcgctgctgcgaatggacaatataaacgaagaggcgctgcatcaaatctggacacgctgccgcgctaactatttcgtgcgccatagcccgaatcagctggcctggcatgcgcgtcatctgttacagcacgatctgacccgaccgctgattctggtcagcccacaggccacgcgcggcggaacggagatcttcatctggagtcctgaccgcccttatctgtttgccgccgtttgcgcagaactggacaggcgcaatctgagcgttcatgacgcgcaaatcttcaccacccgcgacggcatggcgatggatacctttattgtgctggagccggacggcagccctctctccgccgaccgtcacgaagccatccgttttggactggagcaggcaattacccagagcagttggcaacctccgcaaccgcgtcgccagccagccaaattgcgccactttaccgtcgataccgaggtcacttttctgcctactcacaccgacagaaaatcgttccttgaacttatcgctctcgatcagccgggcctgctggcgcgggtcgggcaaatttttgccgatctgggaatttcgcttcatggcgcccgaattacaaccattggcgagcgagtagaagatttattcataatcgcgacagccgaccggcgtgcccttaataatgagctacagcaggaagtgcatcaacggttgacagcggccctcaatccaaacgataaagggtag

SEQ ID NO: 73927 - DNA, 795 bp, Citrobacter koseri
atggctatctcaatcaagacccctgaagaaatcgaaaaaatgcgcgtcgctggccgcctggccgctgaagtgctggagatgatcgaaccgtatatcaaaccgggcgtcagcaccggggaactggatcgcatctgcaacgactacatcgtcaatgaacaacacgcgatctccgcttgcctcggctaccacggttatccgaaatccgtttgcatctccattaatgaagtggtgtgccacggtatcccggacgacggaaaattgctgaaagacggcgatatcgtcaatatcgacgtaaccgtaattaaagatgaataccacggcgatacgtcgaaaatgtttatcgtcggcaaaccgacgattctgggcgagcgcctgtgccgtgtaacccaggaaagcctgtatctggcgctgcgaatggtcaaaccaggcatccgtctgcgcacgctgggtgcagccattcagaaatacgcggaaggcgaaggcttctctgtcgttcgcgaatattgcggtcacgggattggtcgcggcttccatgaagaaccgcaggttctgcactacgatgcggacgacggcggcgtggttctgcaaccgggaatgacgttcaccgttgaaccgatgctgaacgccggtgattaccgcatccgtactatgaaagacggctggacggtaaaaaccaaagacagaagcttgtctgcgcagtacgagcatactattgtggtaaccgaaaacggctgtgaaattctgacgttacgcaaggatgacaccatcccggcgattatcacgcacgacgcataa

SEQ ID NO: 73928 - DNA, 726 bp, Citrobacter koseri
atggcaactgtttccatgcgcgacatgctcaaggctggtgttcacttcggtcaccagacccgttactggaacccgaaaatgaagccgttcatcttcggtgcgcgtaacaaagttcacatcatcaaccttgagaaaacggtaccgatgttcaacgaagcgctggctgaactgaacaagattgcttctcgcaaaggtaaaatccttttcgttggtactaaacgtgctgcaagcgaagcggtgaaagacgctgctaacagctgcgaccagttcttcgtgaaccatcgctggctgggcggtatgctgactaactggaaaaccgttcgtcagtccatcaaacgtctgaaagacctggaaactcagtctcaggacggtactttcgaaaagctgaccaaaaaagaagcgctgatgcgcactcgtgagcttgagaaactggaaaacagcctgggcggtatcaaagacatgggcggcctgccggacgcactgttcgttatcgatgctgaccacgagcacattgctatcaaagaagcaaacaacctgggtatcccggtatttgctatcgttgataccaactctgatccggacggtgttgacttcgttatcccgggtaacgacgacgcaatccgtgctgttagcctgtacctgggcgctgtagctgcaaccgttcgtgaaggccgttctcaggatctggcttctcaggcggaagaaagcttcgtagaagctgaataa

SEQ ID NO: 73929 - DNA, 852 bp, Citrobacter koseri
atggctgaaattaccgcatccctggtaaaagagctgcgtgagcgtactggcgcaggcatgatggattgcaaaaaagcactgactgaagcgaatggcgacatcgagctggcaatcgaaaacatgcgtaaatccggtgcgatcaaagcagcgaaaaaagcaggcaacgttgctgctgacggcgtgatcaaaaccaaaatcgacggcaactacggcatcattctggaagttaactgccagactgacttcgttgctaaagatgctggtttccaggcatttgctgacaaagtgctggacgccgctgttgctggcaaaatcactgacgttgacgtgctgaaagcacagttcgaagaagagcgtgttgctctggtggcaaaaatcggtgaaaacatcaacattcgccgtgttgcttccctggaaggcgacgtcctgggttcttaccagcacggtgcgcgcatcggtgttctggttgcggctaaaggcgctgacgaagagctggttaaacagctggcaatgcacgttgctgcaagcaagcctgagttcgttaagccggaagacgtgtctgctgaagtggtagagaaagaataccaggtacagctggacatcgcgatgcagtctggtaagccgaaagaaatcgcagagaaaatggttgaaggccgcatgaagaaattcaccggcgaagtttctctgaccggtcagcctttcgttatggaaccgagcaaatctgttggtcagctgctgaaagagcacaacgccgacgtaactggcttcatccgctttgaagtgggcgaaggcatcgagaaagttgagactgactttgcagcagaagttgctgcgatgtccaagcagtcttaa

SEQ ID NO: 73930 - DNA, 726 bp, Citrobacter koseri
atggctaccaatgcaaaacccgtctataaacgtattctgcttaaattgagtggcgaagctctgcagggttcggaaggcttcggtattgatgcaagcatactggatcgtatggctcaggaaatcaaagaactggtggaactgggcattcaggttggtgtggtgattggtggcggtaacctgttccgtggtgctggtctggcgaaagcgggtatgaaccgcgttgtgggcgaccacatgggcatgctggccaccgtgatgaacggtctggcgatgcgcgatgcgctccaccgcgcctatgtgaacgcccgcctgatgtccgctattccgctgaatggcgtgtgtgacaactacagctgggcagaagccattagtctgctgcgtaataaccgtgtggttatcctgtctgcgggcaccggcaaccccttcttcaccaccgactctgcggcttgcctgcgcggtatcgaaattgaagcggatgtggtgctgaaagccacgaaagtcgatggcgtatttactgcggacccggccaaagatccgtccgccacgatgtatgagcaactcacctacggcgaagtgctggataaagagctgaaagtgatggatctggccgcgttcacgctggctcgtgaccacaaattgccaattcgtgtcttcaatatgaacaagccgggcgcgctgcgtcgcgtcgtgatgggcgaaaaagaagggactttaatcacggaataa

SEQ ID NO: 73931 - DNA, 558 bp, Citrobacter koseri
gtgattagcgatatcagaaaagatgctgaagtacgcatggaaaaatgcgttgaagcgtttaaaaaccaaatcagcaaaattcgcacgggtcgtgcttctcccagcctgctggatggcattgtcgtggaatattacggcacgccgactccgctgcgtcagctggcgagcgtaacggtagaagactcccgcacgctgaaaatcaacgtgttcgatcgctccatgagcccggcggttgagaaagcgattatggcttctgacctcggcctgaacccgagttctgcgggtagcgatatccgtgttccgctgccgccgctgactgaagaacgccgtaaagacctgaccaaaatcgttcgtggcgaagcagagcaggcgcgtgttgccgtgcgtaacgtacgccgtgatgcgaacgacaaagtaaaagcgctgctgaaagataaagagatcagcgaagatgacgatcgccgttctcaggacgaagtacagaaactgactgacgctgccatcaagaaagttgatgcggcgctgacggaaaaagaagcggaactgatgcagttctga

SEQ ID NO: 73932 - DNA, 1197 bp, Citrobacter koseri
atgaagcaactaaccattctgggctcgaccggctctattggttgcagcacgctggatgtggtgcgccataatcctgaaagcttccgtgttgtcgcgctggttgcgggtaaaaatgtcacccgtatggtagagcagtgcctggagttttcgccgcgttatgcggtgatggacgatgaacagagcgctcaacggctgaaaactgcgcttctggaacatggaagccgcactgacgtcctgagcggacaacaggccgcctgcgatatggctgcgctggatgaggtcgatcaggtgatggcggctatcgtgggcgcggcaggtctgctgcctacgcttgcggcgattcgcgccggtaaaaccatcctgcttgccaataaagagtcgctgattacctgcgggcgtctgtttatggacgaggtgaaacgcagtaaagcccggcttttaccggtagatagcgaacataacgcgatttttcagagtatgccccaacctattcaaaacgatctgggatacgctgagctggagcaaaatggcgtgatgtcgattttgcttaccgggtctggtggcccttttcgtgaaacgccattgtgcgatctggcgaccatgacgcccgatcaggcatgtcgtcatccgaactggtctatgggacgaaaaatttccgtcgattccgccaccatgatgaataaaggtctggaatacattgaagcgcgttggttgtttaacgccagcgcaagccagatggacgtgttgattcacccgcagtcggttattcactcaatggtgcgttatcaggacggcagcgttctggcgcaactgggggagccggatatgcgtacgccaatcgcgcatacgatggcgtggccgaatcgcgtgaactctggcgtgaagccgctcgatttttgcaagctcagtgcgttgacgttctctgcgccggattatcagcgctatccgtgcctgaaactggcgatggacgcgtttgagcaaggtcaggccgcgacaaccgcgctgaatgcggcgaatgaaatcaccgtcgccgcatttctggctgaagagattcgctttacagatattgctgagctcaatttatctgtgctggagaaaatggatttgcaggaaccgggaagcgttgacgacgttctcagggttgatgccgtcgcgcgtgacgtcgccagaaaacaggtgatgcgactcgcaagctga

SEQ ID NO: 73933 - DNA, 690 bp, Citrobacter koseri
atggatggcaatggccgctgggcgaaaaagcaagggaagattcgcgcctttgggcataaggccggagcaaaatccgtccgtcgggccgtatctttcgctgccaacaacggtattgatgcgttaacgctgtatgcctttagcagtgagaactggaaccgaccagcgcaggaagtgagtgcgttaatggagctgttcgtgtgggcgctggatagcgaagtaaaaagcctgcatcgccataacgttcgcctgcgcattattggcgacaccagtcgatttaactcgcgtttgcaagaccgtattcgcaagtctgaagcgcttaccgcccagaataccgggctgacgctgaatatcgcggcgaattatggcggacgttgggatattgtccagggagtcaggcaactggcagaacaggtgcaggaaggactgctgcgccctgatcagattgacgaagagatgctaaaccagaaaatctgtatgcatgaactggctcctgtagatttagtaattaggactgggggagagcatcgcattagtaactttttgctttggcaaattgcctatgccgaactttactttactgatgttctttggcccgatttcgatgaacaagactttgaaggggcgctgcatgcctttgctaatcgagagcgtcgtttcggcggcaccgagcccggtgatgaaaaagcctga

SEQ ID NO: 73934 - DNA, 858 bp, Citrobacter koseri
ttgctgaagtatcgcctgatttctgcttttgttttaatacccgttgtcatcgcggcgctttttttactcccgccggtggggttcgccattgtcacgctggtcgtttgtatgctggccgcctgggaatggggacagttaagcggttttaccacgcgtactcagcgggtctggctggcggtgctgtgcgggttattgctggcgctgatgctgtttttgctgcctgaatatcaccgcaacattcatcaaccgcttgttgaggtttcgctttgggcgtcgttgggctggtgggtcgttgcattattactggtgttattttatcccggttcggcggcgatctggcgtaattcaaagacattacgcgtaattttcggggtgttaaccatcattccttttttttggggaatgctggcgctgcgcgcctggcactatgatgagaatcattacagtggcgccatatggctgctctatgtcatgatcctcgtctggggggcagactccggggcatatatgtttggcaaactgttcggcaaacataaacttgcgccaaaggtttctcctggtaaaacctggcagggctttattggcggactcgcgactgccgccgtgatttcatggggttacggcatgtgggcgaatctggatgttgcgccttcaaccttactgatttgttctgtcatcgcggccctggcgtcagtgctgggcgatctgactgagagcatgtttaagcgtgaagcaggaattaaggatagtggtcacttgatcccagggcatggtggtattctggatcgtattgatagcctgacggcggcagtaccggtctttgcttgcctgttgttactggtattcaggacactctaa

SEQ ID NO: 73935 - DNA, 1353 bp, Citrobacter koseri
atgctgagtattctctggaatctggctgcattcatcgtcgcactgggtgtgcttatcaccgtgcatgaatttggtcatttctgggttgcccggcgctgcggtgttcgtgtcgagcgcttttctatcggttttgggaaagcgctttggcggcgtaccgatcgatacggtacggaatatgtgatcgccatgattcccctcggcggttacgtcaaaatgctggatgagcgcgctgagccggttgtgccggaactgcgccaccacgctttcaacaataaaaccgtgggacagcgggcggcgattatcgccgcaggtccgattgcaaattttcttttcgctatttttgcctactggctggtttttatcatcggcgtccctggcgttcgtccggtagttggtgaaataacacccaactcgattgccgcccaggcgcaaattcttcctggtacggaacttaaagccattgatggcatcgaaacccctgattgggatgcggtgcgcttacagctggtgtccaaaatcggcgatgagcgtacgacaatcagcgtggcgccgttcggcagtaatcagcgccaggataaaacgttagatttgcgccactgggcatttgagccagacaaagaagatcctgtatcttctttagggattcggccgcgtggtccacagatcgaaccggtgctgtcagaagtgcaagcgaactccgctgcaagtaaggcgggtttgcaagcaggcgacaggatcgttaaagtcgatggtcagtcgttaacgcaatggatgacgtttgtgacgcttgtgcgcaacaatccagataagccgttagcgctggaaattgaaaggcaggggagttccttgtctttgacgttaatcccggatacaaagccggttaacggaaaggcagaaggttttgcgggtgttgtgcctaaaattattcctctgccggatgagtacaagactgtacgccagtatgggccattcagcgccatcctcgaagccacggacaagacgtggcagttgatgaagctgacggtcagtatgctgggaaaattgataaccggtgatgtgaaactgaacaacctcagtgggccgatttctatcgctcagggggctgggatgtcagcggaatttgggggcatttattacctgatgtttcttgcgcttatcagcgtgaacttagggataatcaacctgtttccgctgcccgttcttgacggggggcatctgctgttcctggcgattgaaaagctgaagggcgggccggtatccgagcgggttcaagactttagttaccgcattggcgcgattttgctggtgttgttaatggggcttgcacttttcaatgatttctctcggttgtaa

SEQ ID NO: 73936 - DNA, 2430 bp, Citrobacter koseri
atggcgatgaaaaagttgctcatagcgtcgctgctgtttagcagcgccaccgtatacggtgctgaagggttcgtggtgaaggacattcatttcgaaggcctacagcgagtcgccgttggtgcggccctcctcagtatgccggtgcgcacaggcgacacggttaatgatgaagatatcagtaataccattcgtgctctgttcgccactggcaacttcgaggatgtccgcgtcctgcgcgatggtgatacgcttctggttcaggtaaaagaacgtccgacgattgccagcatcactttctccggtaacaaatcggtgaaagatgacatgctgaagcagaaccttgaggcgtctggcgtgcgtgttggcgaatcactggatcgcaccacgctctctgatatcgaaaaaggactggaagacttctactacagcgttggtaaatacagcgccagcgtaaaagcggtcgtcacgccgctgccgcgtaaccgtgtggacctcaaactggtgttccaggagggtgtatcggcgaagatccaacagatcaatatcgtcggcaaccatgccttcagcactgacgaactcatttctcacttccaactgcgcgacgaagtgccgtggtggaacgtcgtgggcgatcgtaaataccagaaacaaaaactggctggcgaccttgagacgctgcgcagctactatctggatcgcggttatgcccgtttcaacatcgattcgacgcaggtcagcctgacgccggataagaaaggcatctacatcaccgttaatatcaccgaaggcgatcagtacaagctttccggtgtgcaggtgagcggtaacctggctggacactccgccgagattgagaacctgacgaagatcgaaccaggtgaactctataacggcaccaaagtgaccaaaatggaagacgacatcaagaaacttcttggtcgttatggctatgcctacccgcgcgtgcagtcgcagcctgaaatcaacgatgccgacaaaaccgttaaattacgtgtgaacgttgatgcgggtaaccgtttctacgtgcgtaagatccgttttgaaggcaacgacacctcgaaagattccgtcctgcgccgcgaaatgcgccagatggaaggggcatggttaggcagcgatctggtcgatcagggtaaagagcgtctgaaccgtctgggttactttgaaaccgtcgataccgacacgcagcgcgttccgggcagcccggaccaggttgacgtcgtctataaagtgaaagagcgtaacaccggtagctttaacttcggtattggttacggcacagaaagcggcgtgagcttccaggcgggcgttcagcaggacaactggttaggtacgggttattccgtgggtattaacgggaccaaaaacgactaccagacctatactgaactgtctgtcactaacccatacttcaccgttgatggcgtcagcctcggcggccgtatcttctataatgacttccaggcagatgatgcggatctgtccgactataccaacaaaagttatggtacggacgttacgctgggcttcccgattaacgagtacaacacgctgcgtgcaggtttaggttatgtacataactccttgtccaacatgcagccgcaggttgccatgtggcgttacctgaactcgatgggtgaatatccgtccaatacgaatgaccgcaactcattcagcgctaacgacttcaccttcaactacggttggacttataacaagctggaccgtggcttcttcccgacggaaggtacgcgtgtcaacctgaatggtaaagtgaccatcccgggctctgataacgaatactacaaagcgacgctggataccgcgacctatgtgccgatcgatgacgatcacaaatgggtggttctgggtcgtactcgttggggttatggtgacggtattggcggcaaagagatgccgttctatgagaacttctatgccggtggctcaagcaccgtgcgtggcttccagtccaatactatcggtccaaaagcggtgtactacccggcgagcagccgtcatgacggcgatgacgactacgataacgattgtaagagcactgaaactgcgccatgtaagtctgatgacgcagtaggcggtaacgctatggctgtcgccagcctcgaattcatcaccccgacgccgtttattagcgacaagtacgctaactcggttcgtacctccttcttctgggacgtaggtactgtctgggatactaactgggattcgaacgcgtatgccggttacccggactacagcgatccgagtaatatccgtatgtctgctggtatcgcattacaatggatgtccccattggggccgttggtcttctcctacgcccagccgttcaaaaagtacgatggagacaaatcggaacagttccagtttaacattggtaagacctggtaa

SEQ ID NO: 73937 - DNA, 486 bp, Citrobacter koseri
gtgaaaaagtggttattagctgcaggtctcggtttagcgatggtaacgtccgcacaggctgctgacaaaattgcgatcgttaatatgggtagcctgttccaacaggtcgcacagaagacgggtgtttctaacacgctggaaaacgagttcaaaggccgtgccagcgaattgcagcgtatggaaaccgatctgcaatctaaaatgcagcgtttgcagtccatgaaagcaggtagcgaacgtactaagctggaaaaagacgtgatggctcaacgccagactttctctcagaaagcccaggcttttgaacaggatcgcgcgcgtcgttccaacgaagagcgtggcaaactggttacccgtatccagactgctgtgaaatccgttgctaacagccagagcatcgatctggtcgttgatgccaacaccgttgcttataacagcagcgacgtgaaagacatcactgctgacgtactgaaacaggttaaataa

SEQ ID NO: 73938 - DNA, 1026 bp, Citrobacter koseri
atgccttcaattcgactggctgatttagcagagcagttggatgcagaattacacggtgatggcgatatcgtcatcaccggcgttgcgtccatgcaatctgcgcaaacaggccacatcacgttcatggtgaatcctaaataccgtgaacacttaggcgtatgccaggcttctgccgttgtcatgacgcaggacgatcttccttttgctaagagtgctgcgttggtagtgaagaatccctacctgacgtatgcgcgaatggcgcaaattttagataccacgccgcagccagcgcagaatattgcaccgagtgcagcgatcgatgcgacagcgacgctgggtaacaatgtttcagttggcgcgaatgcggtcattgagtctggcgtagaactgggcgataacgtgattatcggcgcaggttgcttcgtcgggaaaaacacaaaaatcggtgcaggttcgcgtctgtgggcgaatgtaacgatttaccacgacattcagatcggtgagaattgcctgatccagtcgagcactgtcgtcggcgcagacggttttggttacgctaacgatcggggtaactgggtgaagatcccgcagcttggtcgcgtcattattggcgatcgtgttgagatcggcgcctgtacgacgattgaccgtggcgcgctggatgacacagtgatcggcaacggcgttatcattgataaccagtgccagattgcacataacgttgtgattggcgacaatacggcggttgccggtggcgtcattatggcgggcagtctgaagattggccgttactgcatgattggcggggccagcgtgattaacgggcatatggaaatatgcgataaagtcacggtgacgggtatggggatggtcatgcgtcctatcactgagcctggcgtctattcttcaggcattccgttgcagcctaacaaagtatggcgtaaaaccgctgcactggtgatgaacattgatgatatgagcaagcgtctcaaagcgattgagcgcaaggttaatcaacaagactag

SEQ ID NO: 73939 - DNA, 456 bp, Citrobacter koseri
ttgactactaacactcatactctgcatattgaagagattttagaacttctgccgcaccgttttccgtttttgctggttgaccgtgtgctggactttgaagaaggtcgttttctgcgcgcagtgaagaatgtctccgtaaatgagcctttcttccagggccatttcccgggtaaaccgatttttccgggtgtgctgattctggaagcgatggcgcaggcaacagggattctggcgtttaaaagcgttggaaaactggagccgggtgaactgtattacttcgcgggtattgacgaagcgcgctttaagcgtcctgtcgtgcctggcgatcagatgatcatggaagtgactttcgagaaaacgcgccgtggcctgacccgctttaaaggggttgctctggtcgatggcaaagttgtgtgcgaagcaaccatgatgtgtgctcgtagccgggaggcctga

SEQ ID NO: 73940 - DNA, 789 bp, Citrobacter koseri
gtgattgataaatccgcctttattcatccaaccgccattgtggaagacggcgcctgtattggcgctaatgttcatattggtcctttttgtattgttggaccccatgtcgaaattggtgagggtaccgtactgaagtctcacgttgtcgtgaatggccatacaaaaattggtcgcgataacgagatttatcagttcgcctccatcggtgaagtaaaccaggatctgaaatatgctggcgaaccgacccgtgtggaaattggcgatcgtaaccgcattcgcgaaagcgtcaccattcatcgtggcacagtgcagggtggtgggttgacgaaggtgggcagcgataacttactgatgatcaatgcccatgtggcgcacgattgtacagtaggcagccgctgtattctggccaataacgctacgcttgcgggccacgtttcgctggatgattttgtcatcatcggcggcatgaccgcagtgcaccagttctgcaccattggcgcacatgtgatggttggcggctgttctggcgttgctcaggacgttccgccgtacgttattgctcagggcaatcacgcgacgccgtttggcgtcaatatcgaagggctgaagcgtcgcggcttcacccgcgaagcgatcaccgcgatccgcaacgcctataaagcgttgtaccgcagcggcaaaacgctggatgaagctaaaccggaaattgccgaactggcgaagcagtacccggaagtgcaactctttagcgatttctttgcccgctcaacgcgcggtctgattcgttaa

SEQ ID NO: 73941 - DNA, 1149 bp, Citrobacter koseri
atggcggaacagcgtcccttaacgatagccctggtcgccggagaaacctccggcgatattcttggtgcaggcttaattcgcgcgctgaagacgcgtgtgcccaacgcgcgtttcgtcggcgtggcggggccgcgtatgcaggctgagggctgcgaagcctggtatgagatggaagagctggcggtaatgggcattgttgaagtgcttggtcgcctgcgtcgcttattacatattcgtgccgatttgacccgccgctttaccgagcttcagccggatgtttttgtcggcattgatgcgccggacttcaatattacccttgaaggtaacctgaaaaagcagggcataaaaaccatccattatgtcagtccgtccgtctgggcgtggcgacagaaacgcgttttcaaaataggcagatccaccaatatggtgctggcttttctgcctttcgaaaaagcgttttacgacaagtttaacgtgccatgccgttttatcgggcatacgatggcggacgctatgccgctggacccggataaaaacgccgcgcgtgatgtgctgggaatctcgcatgatgcacactgcctggcgctactgcccggtagccgtggcgcggaagtggagatgctgagcgcggatttcctgaaaaccgcgcagctgctgcgtcagacctatcctgaccttgaagttgtcgtaccgctggtgaacgccaaacgccgcgagcagttcgagcgcattaaagctgaggttgcgccggagctttccgtgcatctgctcgacggaatgggacgtgaagcgatggtggccagcgacgccgcattgctggcgtctggtacggcggcgctggagtgtatgctggcgaaatgcccgatggtggtggggtatcggatgaaaccctttaccttctggctggcgaagcgcctggtaaagaccgactatgtttcgctgcctaatctgctggcgggaagagaattagtcaaagagctgttgcaggaagagtgtgagccgcatgcgcttgcagaggccttgctgccgctgctggcgaatggcaaaaccagccatgcgatgcatgacaccttccgcgagttgcaccagcaaatccgttgcaatgccgatgagcaagcggcggacgctgtcctggagttagcacaatga

SEQ ID NO: 73942 - DNA, 597 bp, Citrobacter koseri
atgatcgaatttgtttatccgcatacgcagttggtcgcgggtgtggatgaagttggacgcggcccgctggtcggcgcggtggtgacggccgctgtgatcctcgatccggctcgcccaatcgtgggtctcaatgattccaagaagctctcagaaaagcgccgtctggcgctgtatgatgaaatcaaagaaaaagcgttaagctggagtctgggacgcgcggaacctcatgaaattgatgaactaaatattttgcacgccacgatgctggcgatgcagcgcgccgttgccggtttgcatattgcgccggaatatgtgctgattgacggcaaccgctgtccggcactgcccgtgccctctatggcggtggtgaaaggcgacagccgtgtggcggagatcagcgcggcatctattattgcgaaagtgacgcgcgatgccgaaatggcggcgctggacggtattttcccacagtatggttttgcccagcacaaagggtatccgaccgcttttcatctggcggcgcttgctgaacatggtgcgacggagcatcatcgacgtagttttgctcctgtcaaacgcgccctgggacttgcgtcctga

SEQ ID NO: 73943 - DNA, 3483 bp, Citrobacter koseri
atgtctgaaccacgtttcgtccacctgcgggtgcacagcgactactccatgatcgatgggctggcgaaaaccgggccgctggtaaaaaaggcggccgcgttaggcatgcctgcgctggcgatcaccgattttaccaacctttgcggtctggtgaagttctacggaacgggccacggcgcagggattaagcccattgtcggcgctgatttccatgttcgcggcactccgctgggagatgaactctgccagttgaccgtgctggcggcaaataatacgggctatcagaatcttactctgttgatctcaaaagcctatcagcgtggctacggcgcagaagggccggtgatcgacagggaatggctgactgaattaaaagacggtctgattttgctttccggtggccggatgggcgatgtgggccgcagtttgttgcgcggcaacagtgcgctagtggacgaatgcgtcgccttctatgaagaacatttctccgaccgctactatctggagctgatccgcacgggtcggcaggatgaggaaacgtatctgcatgcggcggttgagctggcggaaacgcgtggcttgccggttgtcgcaacgaatgatgtccgctttattaacagcgaggactttgacgcgcacgaaatccgcgtggctattcacgatggttttacgctcgacgatcctaaacgcccgcgtaattattcgccgcagcaatatatgcgtagcgaagacgagatgtgcgagctgttctccgacatcccggaagcgctggaaaacagcgttgagatagccaaacgctgtaacgtgaccgtccgtctgggcgaatacttcctgccgcagtttccgacgggcgacatgaccaccgaagacttcctggtcaagaaatcgaaagagggtctggaagaacgtctcgaattcctgttccctgacgaagcggtgcgtaaagagaagcgtcccccctatgacgaacgtctggacattgaacttcaggttattaaccagatggggttcccaggctacttcctcatcgtgatggagtttatccagtggtcgaaagataacggcgtaccggtagggccggggcgcggttccggtgcggggtcgctggtggcctatgcgctgaaaattaccgaccttgatccgctggaattcgacctgctgttcgaacgtttccttaacccggaacgtgtctccatgcctgacttcgacgttgacttctgcatggagaaacgcgaccaggttatcgaacacgtagcggacatgtacggccgcgatgcggtatctcagattattaccttcggtacgatggcggcgaaagcggttatccgcgacgtggggcgcgtgctggggcacccatatggtttcgtggatcgtatctcgaaactggtgccgcctgacccgggcatgacgctggcgaaagcgtttgaggcggaaccgcaactgccggaaatttacgaggcggatgaggaagttaaagcgctgatcgatatggcgcgcaagctggaaggcgtcacgcgtaacgccggtaagcacgccggtggcgtggttatcgcgccgaccaaaatcaccgattttgcgccgctgtactgtgatgaggccggtcagcacccggtaacgcagtttgataaaaacgacgtggaatacgccgggctggtcaaattcgacttcctggggctgcgcacgctcaccatcattaactgggcgctggagatgatcaacgcccgccgcgagaagaatggcgaaccgccgttggatatcgcggcgatcccgctggatgacaagaaaagtttcgacatgctgcaacgctcggaaaccacggcggtcttccagcttgaatcccgcggcatgaaagatctgattaagcgtctgcaacctgactgcttcgaagatatgatcgcgctggtggcgttgttccgccccggcccgttgcagtcgggcatggtggataacttcatcgaccgtaagcatggccgtgaagagatttcctatccagacgtgcaatggcagcatgaaagcctgaaacccgtactggagccgacctacggcatcatcctgtaccaggaacaggttatgcagattgcccaggtgctttccggttacacccttggcggcgcggatatgctgcgtcgtgcgatgggtaagaaaaagccggaagagatggcgaaacaacgttccgtctttgaagagggcgccagaaagaacggcatcgacggcgagctggcgataaaaatcttcgacctggtggaaaagttcgccgggtacgggtttaacaaatcgcactccgccgcctatgcgctggtgtcttaccagacgctgtggctgaaagcgcactacccggcagagtttatggcggcggtaatgaccgccgatatggacaacaccgaaaaagtggtcggtctggtggatgaatgctggcgcatggggcttaaaatcctgccgccggatatcaactcaggactgtatcacttccacgttaacgacgacggcgaaattgtttacggcatcggcgcgatcaaaggcgtgggtgaaggcccgattgaagctatcatcgaggcgcgcaataaagacggttacttccgcgagctgtttgatttatgcgcccgcacggacacgaaaaagctcaaccgccgggtactggaaaaactgattatgtccggggcgtttgaccgccttgggccgcaccgcgccgcgctgatgaactcgctgggcgacgcgctgaaagccgccgatcagcatgccaaagcggaagcgatcgggcaggcggatatgtttggcgtactggcggaagagccggaacaaattgaacaatcctatgccagctgccagccgtggccggaacaggtggtgctggacggggaacgtgaaacgttggggctttacctgacgggacaccctatcaatcagtatttaaaagaaattgagcgctatgtcggaggctaccggctgaaagacatgcatccgacagaacgtggtaaagtcaccacggctgcggggctcgtgattgctgcaagggttatggtcaccaagcgcggcaatcgtatcggcatctgtacgctggatgaccgctctggacgtctggaagttatgctgtttaccgacgctctggataaatatcagcaattgctggaaaaagaccgcatacttatcgtcagcggacaggtcagctttgatgacttcagcggcgggcttaaaatgatggcccgtgaagtcatggatattgacgaagcccgggaaaaatatgctcgcgggcttgctatctcgctgacggacaggcaaattgatgaccagcttttaaaccgactccgtcagtctctggaaccccaccgctcggggacaattccagtacatctctactatcagagggcggatgcacgcgcgcggttgcgttttggcgcgacgtggcgtgtctctccgagcgatcgtttgctaaacgatctccgtggcctcattggttcggagcaggtggaactggagtttgactaa

SEQ ID NO: 73944 - DNA, 960 bp, Citrobacter koseri
atgagtctgaatttccttgattttgaacagccgattgcagagctggaagcgaaaatcgattctctgacagcggtaagccgccaggacgagaaactggatattaatatcgatgaagaagtgcatcgtctgcgtgaaaaaagcgtagaactgacgcgcaaaatctttgccgatcttggcgcatggcaggttgctcaactggcgcgccatccgcaacgtccatacaccctggattatgttcgcctggcgtttgatgaatttgacgaactggcgggcgatcgcgcctatgcggatgataaagctatcgtcggcggcatcgcgcgtctggatggtcgtccagtgatgattattggtcatcagaaaggccgtgaaacgaaagagaaaatccgtcgtaacttcggcatgccggcacctgaagggtatcgcaaagcgctgcgtctgatggaaatggctgagcgtttcaacatgccgatcattacctttattgacacgcctggcgcttaccctggtgtgggggcggaagaacgcggtcagtctgaagcgatcgcacgtaacctgcgtgaaatgtctcgcctgagcgtaccggtgatttgtaccgttatcggcgaaggggggtccggcggcgcgctggcgattggcgtgggcgataaagtgaatatgttgcagtacagcacctattccgttatctccccggaaggctgtgcgtccattctgtggaaaagcgcggacaaagcgccgctggccgcagaagcgatgggtattatcgcgccgcgcctgaaagagctgaagctgattgattccatcattcaggaaccgctgggtggcgcgcaccgtaacccggaagcgatggcggcttctctgaaagcgcaactgctggccgatctcgccgatctcgacgtgttgagcaaagacgatttgaaaaaccgtcgttatcagcgcctgatgagctacggctacgcgtaa

SEQ ID NO: 73945 - DNA, 2139 bp, Citrobacter koseri
atgaatatcattgccatcatggggccgcatggcgttttttataaagacgaacccatcaaggaacttgagcttgccctacagtctcaggggtttcagattatctggccgcaaaatagcgtcgacctgctgaaattcattgaacacaatccgcgaatctgtggcgtcatttttgactgggatgagtacagcctcgatttgtgtagcgatatcaaccagctaaatgaatacctgccgttgtatgcgtttatcaatacgcattcgacgatggatgtcagcgtgcatgatatgcgtatggcactgtggttttttgaatacgcgctcggccagtcagaagatattgcaacccgcatccgccagtatacgaatgaataccttgataacatcacgccgccgttcacccgggcgctgtttacctatgtgaaggaagggaagtataccttctgtacgccgggacatatggcgggaaccgcttaccagaaaagcccgattggctgtctgttttatgacttcttcggagggaatacgctaaaagcggatgtgtctatttccgtgaccgaactgggttcgctgctggaccataccgggccgcacctggaggcggaagagtatattgcccgcaccttcggcgccgagcagagttatatggtgaccaacggcacctccacatcgaacaaaattgtcggcatgtacgcggcgccgtcgggcagcacgctgctgattgaccgtaactgccataaatctctcgcgcacctgttgatgatgagcgatgtggtgcccctctggctgaaacccacgcgcaacgcactcggtattctggggggcattcctaagcgtgaatttacgcgtgagagtattgaacataaggtttcggagacggcgcaggcgcagtggccggtacatgcggttatcaccaactcgacctatgacggcctgctgtacaacaccaactggattaaacaaacgctggatgtcccttcgatccatttcgactcggcctgggtgccctatacccattttcacccgatttatcaggggaaaagcgggatgagcggcgagcgggtgccgggaaaagtcatcttcgaaacgcagtcgacgcataaaatgctggcggcgctgtcccaagcatcgcttattcacattaaaggggattacgatgaagatacctttaatgaagcgtttatgatgcacacctcaacatcgccaagctaccccattgtggcgtcgattgagacggctgcggcaatgctgcgtggcaatccgggtaaacgattgatcaatcgctccgtggagcgggcgcttcattttcgcaaagaggtacagcggttgcgtgaagagtcggaaggctggttctttgatatctggcaaccggaagaggtggatgaagcggaatgctggcccgttgcgcccggcgaggagtggcacggttttaccgatgcggatgccgaccatatgtttctcgatccggtgaaagtcaccattttgacgcccggtatggatgagcagggtaacatgagcgaggaggggatccccgccgcgctggtggcgaagttccttgatgagcgcggcgtggtggtagaaaaaaccgggccttataacctgctgttcctgttcagtattggtattgataaaacccgggcgatggggctgctgcgcggcctgacggagtttaaacgcgcttacgatcttaatctgcgcgttaaaaatatgctgccggatctgtacgccgaagatccagatttttatcgtaatatgcggattcaggatctggcgcagggtatccataaactgatccgccagcacgatctttccgggttgatgtcacgggcgttcgacacattgcccgaaatgaaaatgacgccgcatcaggcctggcagaggcagataaaaggcgaagtggagaccatcgcgattgatcaactggtggggcgtatttccgccagtatggtgctgccgtatccgcctggtgtgccgttgctgatgccgggggagatgatcaccgaagcgagccgtgcggtactcgattttctgctgatgctgtgttccatcggccaccattaccctggctttgagaccgatattcatggcgcaaaacaggatgaagatggcgtttaccgagtgagagtcttaaaaacggcatga

SEQ ID NO: 73946 - DNA, 390 bp, Citrobacter koseri
atgctgggattaaaacaggttcaccatattgcgattatcgcgacggattatgcggcgagcaaaacgttttattgtgacgtactgggcttcacgctgttgagtgaagcgtaccgggaagaacgtgattcctggaaaggcgacctggcgttaaacgggcaatatgtgattgagcttttttcttttcccttcccgcctgcgcgaccgagccgaccggaggcctgcggtctgcggcatctggcgttcagcgtggaagacgtagacaaagcggtagcgcatctggaggcgaacaacgttaaatgcgagccggttcgcgttgacccgtttacgaataaacgttttacctttttcaacgatccagacggactgccgctcgaactgtatgagcagtaa

SEQ ID NO: 73947 - DNA, 1323 bp, Citrobacter koseri
atgatcatgacaacactcaccctgaacgccttactcctgccataccgccagattctggtggcctttagcggcgggctggattctaccgtactgctgcatcaactggtgcaatggcgagaacagcagcctgatgtcacgctgcgcgccatccatattcatcatgggttaagctctcatgccgatagctgggtgacgcattgcgaggctgtgtgccagcagtggcaggtgccgctggttgtccgacgagtgcagcttcaggatgaggggctggggattgaggctcaggcgcgccaggcgcgatacgcagcctttgcgcaggcgctgcatcccggtgaagtcctggttacggcccagcatcttgacgatcaatgtgaaacgtttctgctggcgttgaagcgcggcagcggcccggcgggattgtccgccatgggggaacgctcgtcatttgccggaacgcagctgatccgcccgttacttggggaaacccgtgcggcgctggagcagtgggcaaaacgctatgcgctgtgctggattgaagatgaaagcaatcaggatgatgcctacgatcgtaatttcctgcgccttagggtgctgccgctgctgcaacaacgctggccgcattttgctgaagcgactgcccgtagcgccgcgctttgcgcagaacaggagcacctgctggatgagcttctggcagaggatttagcgggctgtatcaccgctgatggggcattgcagttagcgccgttaatggcgatgagcggcccgcgacgtgctgcgctattgcgccgctggctggccgcgaagcatgcgccgatgccttcccgcgacgggctggaacgtatctggcaagaggtggcgctggcgcgtgaggacgccgctccctgtttgcgctttggcgagtacgacattcgccgttatcagtcacagctatggtggataaaatccgttaccggccaaagcgcgacggtgatcccgtggtcatcgtggcaaacaccgttatcgctgcccgttggacttgggacggtgcggctcgttccaggtggcgacctgcgcatgccgcgtgccgacgagccagttagcatacgctttaaggcatctgggttactgcatattatcgggcgcaatggcgggcgtaagctaaagaaaatctggcaggaactgggcgtaccgccctggcggcgggataccacgccgctgctgttttatggcgagacgttgattgctgccgcaggtatttttgttacctgtgatggtctggcggaggagggagcgggcgtcaggctggaatggaaggaagagacgtcgtcatcgcgtaatgcctga

SEQ ID NO: 73948 - DNA, 261 bp, Citrobacter koseri
atgtcaatgaatgaaacgtatcaacccatcaactgcgatgattacgataatcttgaactcgcctgccagcatcatctgttactgacgctggaacttaaggatggagaagttttacaggcgaaagccaacgatctggtgtcgcgcaaaaacgtggaatatctgatcgcggatgtcgccggtgaaacacgcgagctgcgtctggacaaaattaccagcttcagtcatccacaaatcggtactgtaatcgtcagcgaatcctga

SEQ ID NO: 73949 - DNA, 201 bp, Citrobacter koseri
gtggaaaaatattgtgagttaatacgcaagcggtatgcggaaatcgccagcggagacttagggtatgtcccggatgcgctgggttgtgtattgaaagtgcttaatgaagtggcagcagacgatgccctttcagagtcggtcagggaaaaggcggcatatgctgccgcgaacttactggtgagcgattatgtcaatgaatga

SEQ ID NO: 73950 - DNA, 546 bp, Citrobacter koseri
atggcgcttaaagcgacgatttataaagccgtagtcaatgtggcggatcttgaccgcaaccagtttcttgacgcggcattgacgctggcgcgtcacccttctgaaacgcaggagcgcatgatgctgcgccttctggcctggattaaatatgccgatgagcgcctacagttcacgcgtggtctgagcgcagaagatgagcctgaggcatggctgcgtaacgaccatctggggattgatttatgggttgagctggggctgccggatgagcgccgcattaagaaagcctgtacccaggctgcggaggttgcgctgtttgcctataatagtcgtgccgcgcaaatctggtggcagcagaaccagagtaaatgcgcgcagtacgctaacctgtccgtgtggtatctggatgatgagcaactggcgaaactgagtgattttgccggccgaaccatgacgttacaggcaacgattcaggatggcgccatctggctgtcggattctcagaataatctggaaattcatctggctgcatggcaacagccttcatga

SEQ ID NO: 73951 - DNA, 423 bp, Citrobacter koseri
atgattgtcatctcccgaaatgtctcgattcccgacaatgagctggaaatcacagccattcgtgcgcagggagcgggtggacagcacgttaataagacctcaacggctatccatttgcgctttgacattcgggcctctggcctgccagagtattataaggaacgtttgttggctgccagccatcaccttattagcagcgatggcgtcattattattaaggcgcaggagtatcgcagccaggagctcaaccgggaggcggctatcgcccggctggtggcagtcatcaaagaattaaccgcagtgcaaaaaagccgacgggcaacccgccctacgcgcgcgtcgaaagaacgcaggttgtcatcgaaggcacaaaaatccacagtgaaggcgcttcgcggtagagttcgtcgtcctcaggagtga

SEQ ID NO: 73952 - DNA, 705 bp, Citrobacter koseri
atggtgaaaacagcgatattgtcagtagcggcagcatgcacgctctttgccttgatcggatgtaataatcgtactgaagtggaggcgctacagccgacgcagacggcagaattaaaaccgatgcagcaaagctggcgtggcgtattgccttgcgcagactgtgaagggatcgaaacctctttgttcctggaaaaagatggaacatgggtgatgaatgaacgttatcagggcgttcgtgaagaaccttcttcgtttgcctcgtatggcacctgggcgcgtacagccgataaactggtattgaccgacagcaaaggcgagaagtcttactatcgtgcgaaaggcgacgctctggaaatgcttgatcgtgaaggtaatccgattgagtcgcagtttaattacacgcttgagtcggtgtctgccagtttgcccgtaacgccaatgccggtgcgcggcatgtatttctatatggcggatgcggcgacctttaccgattgcgctaccgggaaacgcatgccggtggcgaacaatgctcagctggaacgtgattatctggcggcacgaggcgctgcggaaaagccggtattattaacggtggaaggtcactttacgcaggaagccaacccggatacgggcgcgcaggtaaaaacgctggtggccgataaagagattaaattcgttcctggacaggattgttccagcaagtaa

SEQ ID NO: 73953 - DNA, 1719 bp, Citrobacter koseri
atgcgtactagccaatatctgctctccactctgaaggagacacctgccgacgccgaggttatcagccatcagctgatgctgcgcgccgggatgatccgcaagctcgcctccgggttatatacctggctgccgactggcctgcgcgtcctgaaaaaagtcgaaaacatcgtgcgtgaagagatgaataacgccggtgccatcgaggtgtcaatgccagtggttcagcctgccgacctgtggcaagagagtggtcgttgggaacagtacggcccggaactgctgcgttttgttgaccgtggcgagcgtccgttcgtactcggcccgactcacgaagaagttatcaccgacctgattcgtaacgaactcagctcttacaaacagctgccgctgaacttcttccagatccagaccaaattccgtgacgaagtacgtccgcgtttcggcgtaatgcgttcccgcgagttcctgatgaaagacgcctactctttccatacctctcaggaatcgctacaggaaacttacgacgcgatgtatgccgcttacagcaaaatcttcagccgtatgggcctggatttccgcgcggtacaggcagacacggggtctatcggcggtaacgcatcccacgagttccaggtactggcgcaaagcggtgaagatgatgtgatcttctctgattcttctgactacgcggctaacattgagttcgccgaagccgttgcgccgaaagcgccgcgcgcggctgccagccaggagatgacgctggttgatacgccaaacgcgaaaaccatcgcggagctggttgagcagttcaatctgccgattgagaaaaccgtcaaaacgctgctggtgaaagcggttgaaggaagcagctacccgctggttgctctgctggtacgtggcgatcacgaactgaacgaagtgaaagcggaaaaactgccgcaggttgccagcccgctgaccttcgccacagaagaagagattcgtgcgctggtgaaagccggcccgggttctctcggcccggtaaatatgccggttccggtggtgatcgaccgtaccgttgcagtaatgagcgatttcgcggcaggcgccaacatcgacggtaagcactacttcggcatcaactgggatcgcgatgtcgcgacgccagaagtcgccgatatccgtaacgtcgtggcaggcgatccaagcccggacggccagggcacgctgctgattaaacgcggcatcgaagtgggtcatatcttccagctgggcaccaagtattccgaagcgctgaaagcctccgtacagggtgaagatggtcgtaaccagatcctgacgatgggttgctacggtatcggggtaacgcgcgtggtggcggcggcgattgagcagaactacgacgaacgcggtattgtatggcctgacgccatcgcgccattccaggttgccattctgccgatgaacatgcacaagtccttccgggtgcaggaactggcggaaaaactgtacggcgaactgcgcgcacaaggcatcgaagtgctgatggatgaccgtaaagagcgtccgggcgtcatgttcgcggatatggaactgatcggcatcccgcacactatcgtgctgggcgaccgtaacctggacaacgacgatattgaatacaaataccgtcgtaacggcgagaagcagttgattaaaactggcgagatcgtcgatttcctggtgaaagccatcaaaggctaa

SEQ ID NO: 73954 - DNA, 708 bp, Citrobacter koseri
atgagcagttttcagttcgagcaaataggcgttattcgctccccctataaagaaaagttcgccgtcccgcgccagcctggtctggtaaaaagcgccgacggcgaactgcatcttgttgcgccctataatcaggccgatgccgttcgcggtctggaagtgttcagccatttgtgggtgatcttcgtctttcatcagacgatggctggcggatggcgcccgacggttcgtcctccccgtctcggcggcaatgcccggatgggcgtcttcgcgacccgttccacctttcgccctaaccctgtcggcatgtcgctggttgaattgaaagagattgtctgtcagaaagagaaagtcatcctgaagctgggcagtctggatctggttgatggcacgccggttattgatatcaaaccctacctgccgtttgccgagtcattaccgggcgcaacggccagctacgcgcaacaggcgcctgtggcagagatgcacgtcagcttcacggccagcattgaccaacagctttcacggcttgaacaacgttacccgcaactgaaaacatttatcggcgaagtgctggcgcaagatccgcgtcccgcctatcgtaaaggtgaagagacaggtaaaacgtacgccgtctggctgcacgatttcaacgtgcgctggcgcgtcaccgaagagggttttgaagtctttgcgctggaaccccgctaa

SEQ ID NO: 73955 - DNA, 405 bp, Citrobacter koseri
atgcgtgctttaccgatctgtttattggcactcatgctgggcggttgttccatgctaagcagatcccctgttgaacccgttcaaagcaccgcaaccccgccaaaagcggagtcggaaaaaccgaaagcgccgcgtgccgcaccggtccgaatttacaccaacgccgaagagttagtgggtaaaccgttccgcgatcttggcgaagtcagcggtgactcctgccaggcatctaatcaggattccccgccgagcatcccgacggcacgtaaacgcatgcagattaacgcctctaaaatgaaggcgaatgctgtactgctgcacagctgcgaagtcaccagtggaacgccaggctgctaccgtcaggctgtttgcatcggttccgcccttaacatctcggctaaatga

SEQ ID NO: 73956 - DNA, 816 bp, Citrobacter koseri
atggcgttcaaatttaaaacctttgcggcagtgggagccctgattggttctctggcacttgtgggttgcggccaggatgaaaaagatccgaaccacatcaaagtgggcgtgattgtcggcgctgaacagcaggttgcggaagtcgcgcaaaaagtagcgaaagaaaaatacggtctggatgttgagctggtgacgttcaacgactacgtattaccgaacgaagcgttaagcaaaggcgatatcgacgcgaacgctttccagcacaagccgtacctggatcagcagatcaaagatcgcggttacaagctggttgccgttggcaatacctttgtttatccgattgccggttattccaaaaaaatcaaatcacttgatgagctacaggatggttctcaggtagccgtaccaaacgatccgactaaccttggtcgttcactgctgctgttgcagaaagtaggattaatcaaactgaaagatggcgttggcctgctgccgaccgttctggacgtgaccgaaaacccgaagaacctgaaaattgttgagctggaagcaccgcaactgccgcgctctctggacgatgcgcaaattgccctggccgtgattaacaccacttacgccagccagattgacctgacgccggcaaaagacggtatcttcgtggaagataaagattccccgtacgttaacctgatcgtaacgcgtgaagacaataaagacgcagagaacgtgaagaaattcgttcaggcttatcagtctgacgaagtctacgaagccgcgaataaagtcttcaacggcggtgctgttaaaggctggtaa

SEQ ID NO: 73957 - DNA, 654 bp, Citrobacter koseri
atgtctgaggcgatgatgtggttactggcgcgcggcgtctgggaaacgctggcgatgacttttgtatccggcttttttggttttgttattggtctgccggttggcgtactgctgtacgttacgcgtccagggcaaattattgaaaacgcgaagctctaccgcacactctctgcggtcgtcaatatcttccgctccatcccgttcattatcttactggtatggatgattccgtttacccgtgtgattgtcggcacctccatcggtttgcaggcggcgattgtgccgttaaccgtcggcgccgcgccgtttatcgcccgcatggtggaaaacgcattgctggaaatcccaaccggattgatcgaagcctcccgtgcgatgggggccacgccgctgcaaatcgtgcgtaaggtgctgctgccggaagcattaccgggtctggtcaatgccgcaaccattaccctgatcactctggtgggctactctgctatgggcggcgccgttggcgctggcggactcggtcagattggctatcagtatggttacattggctacaatgctaccgtgatgaatacggtgctggtattactggtcgttctggtttatttaattcagttatccggcgatcgcatcgttcgggcagtgacgcacaagtaa

SEQ ID NO: 73958 - DNA, 1032 bp, Citrobacter koseri
atgattaaactttcgaatatcaccaaagtgttccaacaggggactcgcaccattcaggcgctgaacaacgtcagcctgcatgtccctgccggacaaatttatggcgttattggcgcctccggcgccggtaaaagcacactcattcgctgtgtgaatctgctggaacgtcccacggaagggagcgtattggttggcggccaggagctgaccaccctttctgaatctgagttgacgaaagcccgtcgccagattggcatgattttccagcattttaacctgttagcttcacgtaccgtttttggcaacgtggcgttgccgctggaactggacaatacgccgaaagacgagattaaacgccgcgtcacagagctgttggatctggtagggctcggcgataagcacgacagctacccggccaacctttccggcggccagaaacagcgtgtggcgattgctcgcgcattagccagcaatcccaaagtcctgctgtgcgacgaggccaccagcgccctcgatccggcaacaacccgttcgattctggaactgttgaaagatattaaccgtcgccttggcctgaccattcttcttattactcatgagatggatgtggttaagcgcatttgcgattgtgtcgcagttatcagtaacggagagctgattgagcaggatacggtcagcgaagtgttctcccatccaaagacgccgctggcgcagaagtttatccagtccacattgcatctggatatcccggaagattatctggaacgtttaaaagcggagccgtatgcggacagcgtccccatgctgcgtatggaatttaccggacaatccgtagacgccccgctgctgtctgagacggcccgccgcttcaatgtgaacaacaacattattagcgcgcagatggattacgcaggcggcgtgaagttcggcattatgctgacggaaatgcacggcacgcaagaagagacgcaagccgcaattgcctggttgcaggaacaccatgtgaaagtagaggtactgggttatgtctga

SEQ ID NO: 73959 - DNA, 567 bp, Citrobacter koseri
gtggcaaagtccgtacccgcaattttcctcgaccgtgatggcactattaatgtggatcatggttacgtacatgaaatcgatgagttcgagtttattgaaggcgtcattgacgcgatgcgtgaactgaaaaagatgggctttgcgcttgtcgttgttaccaaccagtctggtatttcgcgcggtaaatttacggaagcgcagttcgagacgctgaccgaatggatggactggtcgctggcggaccgcgatgtcgatctggatggcatctattattgtccgcatcatccgcagggcagcgtagaagagttccgtcaggcgtgtgattgtcgtaaaccgcatcccgggatgcttatctctgcgcgtgattttctgcacattgatatggccgcgtcttatatggtgggtgacaaaatagaagatatgcaggcggcggcagcggcaaatgttggtacgaaagtattggtacgtaccggtaagcccgttacgcccgaagcagaaaatgcggcagattgggtgttaaatagccttgctgacctgccatcggcgataagaaagcagcaaaaataa

SEQ ID NO: 73960 - DNA, 1044 bp, Citrobacter koseri
atgagcgtaatgtttgacccggaagccgcaatctatccgtttccgccgaaaccgaccccgctaagcgtggatgaaaagcaattctaccgcgagaaaatcaaacgtctgctgaaagcgcgcgatgccgtcatggtggcgcactattacaccgatcccgaaatccagcaactggctgaagaaaccggaggatgcatttccgactcgctggagatggcgcgatttggcgcgaaacatcctgcctccacgttgctggtcgctggcgtccgttttatgggcgagacggccaaaattctcagcccggaaaaaaccatcctgatgccgactctacaggcggaatgctcgctggatctgggttgtccgattgacgaatttagcgcgttttgcgacgcccacccggatcgcacggtagtggtttacgccaacacgtctgctgccgtcaaagcccgcgctgactgggttgttacctccagtatcgccgttgaactgattgaacatctggacagtctgggcgagaaaattatctgggcgccggatcgccacctgggacattacgtgcaaaagcagaccggcgcggatgtgctctgctggcagggggcctgtatcgttcatgatgaatttaaaacccaggcgttgacccggatgaaaggtttgtacccggatgccgccgtgctggtgcatcctgagtcgccacaatcgattgtcgatatggcggatgccgtcgggtctaccagccagctgattaatgccgcccgcacgctgccgcataagcagcttattgtggcgaccgaccggggaattttctataaaatgcagcaggcggtgcctgataaagagttgcttgaagcgccgacagccggagaaggggcgacctgccgtagctgcgcgcattgtccgtggatggcgatgaacggccttaaggcgattgctgaggggttagagcagggcgggcaggcccatgagattcacgttgaccaggcgttgcgagaaggggcgctgctgccgctcaaccgtatgctggaatttgcggctacactacgagcgtaa

SEQ ID NO: 73961 - DNA, 720 bp, Citrobacter koseri
atggatttttttagcacacagaacattctggttcatattccaattggcgctggcggttacgacctgtcatggattgaagctgttggcactgttgcgggtttgctgtgtatcgggcttgccagcctggaaaagatcagcaactattttttcggcctgattaacgtgacgctattcgcgatcatcttttttcagatccaactctacgccagcctgttgcttcaggtatttttctttgccgccaatatttacggctggtatgcctggtcccgcaaaacaagccagcatgagattgaattgaaaattcgctggctgccgctgccaaaagcgctggcctggctggcggtatgcgtggtggcgataggcctgatgaccgcgtatatcgatccggtatttgctttcctgactcgcgtcgccgtcaacctgatgcaggcgctgggattgtcggtcgccgtaccggaattgcagcctgatgccttcccgttctgggactcctgcatgatggtgctgtcgattgtggcgatgatcctgatgacgcgcaagtatgtcgaaaactggctgctgtgggtgattatcaacgtgataagcgtggtgatcttcgcactgcaaggcgtctatgcgatgtcgctggagtatctgatcctgaccttcatcgccctgaatggcagccggatgtggatcaacagcgcgcgcgaacgaggctcacacgcgctttccagttag

SEQ ID NO: 73962 - DNA, 942 bp, Citrobacter koseri
atggcacattcacactctcatactgcttcgcatctgccggaagataagaacgcccgtcggttgctgttcgcattttgtgtcaccgccggatttatgctggttgaagtggtgggcggcattctttcaggatcgctggcgctgctggccgatgccgggcatatgcttaccgatgccgcagccctgttgttcgctctgatggccgtacagttttcccgtcgtcctccaaccattcgccacactttcggctggctgagactgacaacgctggccgcgtttgttaacgccatcgcattagtggtgattactcttttaatcgtctgggaagccattcagcgcttctatacgccacgccctgtcgcaggcggcatgatgatgactatcgcagtggcgggtttgctcgccaacgtgttcgcgttctggctcctgcaccgggggaatgaagaaaaaaacctcaatgtgcgtgccgccgcgctgcatgtgatgggggatttactgggatcggtcggcgccatttttgccgcactgattatcatctggacaggctggacgccagcggacccgattctctcgatcctggtttccatactggtgttacgcagcgcctggcgtctgttaaaagacagcgtaaatgaattactggaaggcgcgccggtttcgctggatatcgcggcgttgcgtcgccatctcagccgggatattcccgaagtacgcaatgtgcatcacgtccatgtctggatgataggagaaaaacccgtgatgacgctgcatgtgcaggtgatcccgccgcacgatcatgacgcgttgctggcgcgcatccagcatttcctgattcaccattaccagattgagcacaccaccattcagatggaatatcagccgtgcaacgggccggactgccacctgaatcaggggctatccggccattcgcaccatcaccactaa

SEQ ID NO: 73963 - DNA, 375 bp, Citrobacter koseri
atgaaaatgacaaaactggccacactttttcttactgccatactcagccttgccagtggcgcagcgttggccgccgacgcgaatacgcagtccaacaacggacaggcaaactcttcggcggatgccggacaggtcgcccctgacgcccgcgaaaacatcgcgccaaacaatgtggacaacagccagattaattccggcggcaccatgcttcacccggatggctcatcaatgaaccacgacggcatggcctccgatgaagtgcataaaaacaccatgtgtaaggacggccgctgcccggacgtgaataagaaagtagagaccggcgacggcatcaacaacgacgttgatactaaaaccgatggcaccacgcagtaa

SEQ ID NO: 73964 - DNA, 1053 bp, Citrobacter koseri
atgaattatcagaacgacgatttacgtattaaagagatcaacgagttattaccgccagtcgcactccttgaaaaatttcccgctacagagaatgcagcaaacaccgttgcccatgcccgcaaagcgattcataaaatcctgaaagggaatgacgatcgcctgctggtggtgattgggccgtgctcaattcatgatccggttgccgccaaagagtatgccgctcgtttaatgacgctgcgtgaagagctaaaaggcgagcttgaaattgtcatgcgcgtctattttgaaaaaccgcgcaccacggtgggctggaaagggctgatcaacgatccgcatatggataacagcttccagattaacgatggcctgcgtattgcccgcaagttattgctcgacattaacgacagcggattacccgctgcgggtgagttccttgatatgatcaccccgcaatacctggcggatctgatgagctggggcgcgattggcgcacgtaccacggagtctcaggtacaccgcgagctggcctccggtctttcctgcccggtcggctttaaaaatggcaccgacggcaccatcaaagtggcgattgacgccatcaatgccgccggtgcgcctcactgcttcctctccgtcactaagtgggggcactccgccattgtgaataccagcggcaacggcgactgccacattattctgcgtggaggcaaagagccaaactacagcgcgcaacatgtggcagaagtaaaagaaggtcttgctaaagcggggcttgcgccgcaggttatgatcgatttcagccatgcgaactcctccaaacagtttaaaaagcagatggacgtttgtgcggatgtttgccagcagattgcgcgtggcgaaaacgcgatcattggcgtgatggtggaaagccatctggtggaaggtaatcagagcctggaaagcggcgaaccgctgacctacggtaagagcgttaccgacgcctgcatcggctgggaagatacggatgcgctgctgcgtcagttgtcgaatgcggtgaaagcccgtcgcggataa

SEQ ID NO: 73965 - DNA, 2169 bp, Citrobacter koseri
atgaataagcccactcaactggcaacgctgttgcctcttctcatttccctggcgccgcacagcgcacatgcggcaaacacctctgaagatgaaattatcgtcaccagccagccttctgccgataccacgcatgccgcttccggcgctggattcaaaaccaatgatatcgatgtcgggccgctgggcaataaagcctgggttgatacaccgtattcgaccacgaccgtcaccaaagagatgattgagaaccagcaggcgcaaagcgtgagcgaactgctgaaatactcgcccagcacacaaatgcaggcgcgcggcggcatggatgtcggcagaccgcagagccgggggatgcagggcagcgtggttgccaacagccgcctggatgggttgaacatcgtctcaaccaccgctttccccgttgagatgctggaacgcctggatgtgctcaacagcctgaccggcgcgctgtacggcccggcaagtccggccgggcagtttaattttgtcgccaaacgcccaacggaagagacgctgcgcaaagtcactctgggttatcaaagccggagcgccttcaccgggcatgttgatttgggcggacacattgatgatgacaaccgttttggctatcgcgtgaatgtgctgaatcaggaaggtgaagggaatctggatgacagtacactgcgccgtaagttgctttccgtggcgctggactggaatattcagccaggcacgcaattgcagctggatgccagccactatgagtttattcaaaaaggctatccgggaagcttcagctatggcccgaacattaaattaccttccgcccccgatcccaaagataaaaatctggcgctcagcacggccgggaacgatctgacaaccgacacggtgagcacgcgtcttattcattatctcaatgatgactggtccgtaacggcaggcgttggctggcagcaggcggatcgtgcgatgcgtaacgtatccagcaaaattatcaataaccagggcgatatcagccgttcgctgaaagactctactgccgcaggacgttttcgcgtactgagcaataccgccacgcttaacggtcatgttgatactggttctgtcgggcatgatattgcgctctcgaccaccggttatgtctggtcgctgtacagtgcgaaagggacggggccgtcttatagctgggacaccaccaatatgtaccacccctctgagatgtacgaaaagggcgatggcaaaatcataaccggtggggatcgttataaatccagcgtcaacacgcaacagagcattacccttggggataccgtgactttcacgccgaaatggtcggcgatgttctacttgagccagagctggattcagtcgcagaactacaataaaagtggtcataaaatcggccagattgatgagaacggtttaagcccgaatgcggcgttgatgtataaaatcaccccgaatgtgatggcctacgtcagctatgcggagtcgctggaacagggcgggacggcgccaaccaatagcgacgtgaaaaatgccgggcaaaccctcgacccgtatcgcagcaaacaatatgagatggggctaaaagccgatgtctccgggatgaatctgggggcggcgctgttccgtcttgagcgtccatttgcctatgtcgatcccggcgacaatgtctataaggaacaggggaaccaggtcaataacggtctggagctgacggcctccggtaatgtctggcaagggctgaatatctacagcggcgtgacgctcctcgatccgaaactgaaagatacggtgagcgataccaccagtgataaacgggtggtaggcgtaccgaaagtacaggcgaacgtgctggcggagtacagtttaccgtcgatgccggaatgggtatacagcgctaacgttcactataccggcaagcgtgccgccaacgataccaacaccgcatgggccagcagctacaccacctgggacctgggcacccgctacaccacgaaaatcagcaacgtgccgaccaccttccgcgtggtggttaacaacgtgttcgataagcactactgggcatcaatcttcccgtcaggcaccgatggcgataacggttcacccagcgcctttatcggcagcgggcgtgaagttcgcgcctccgtcacgtttgatttttaa

SEQ ID NO: 73966 - DNA, 987 bp, Citrobacter koseri
atgacgctaacccgcattttccccgcgctggcctggctggtggcggggagcctgtttgccgcgcagccgcacagcgatgtgcgcatcgcttcgccgtggccagcgcaaaacaccatcatcaccatgctggggtatggcgataatattgttggcacgtcgatgattgcaaagacgattccgctttttcgccagagtctgccgcgtattgagaatgtcgccgttgtcagcgtcaacagcggtcacgaactggacccggagcagatcatctcgctcggtacgcaactgctgtttgtgccgaaatcaatgacggtgccgagggcgtcgctgctccagcaggcaggggtgcgcgtactggcgtttgaggcgaactccatacaggcgctgaccgccagggtgcataaaacagcggaggtgctggggccggatgcgcaggataaagcgcagcggtatcagcagtattttgaccgcaatgtggcgcgggtaaaggcgcgcttaagcgatcttcctgaagaccagcgaatgaccctctatcacagcatgggcaatccgctgaccacttccggcaggccgtcgcttaatcaggactggatggatctggccggtgcaaaaaacgtcgccgaacgctggtttagccacaagcaaaaccggacgggggaagtcgctcttgagcagatcgtcgcggcaaatccggcggtgattgtcgccatgaataagcgggatgcggatgccatcctgacttctccccagtgggcgcaggtggacgccgtgattcatcatcgcgtgtatgtgaacccgaaagggatgttctggtggtgtcgggagaccagcgaagaggcgttacaattcctctggctggcaaaaacgctctacccgcagcgctttgccgatgtggatatgcgcaaggagacccgccacttttaccaggacttctttggcattacactcagcgacgcgcagattagcgatgtgctcaatccgccgaaatga

SEQ ID NO: 73967 - DNA, 1059 bp, Citrobacter koseri
atgtcgctatccgctaatgctccgtcgatcgacgatcgctaccgtcttgtggtacgcaagcggttgatgctggcgctgctgattattgcggcgatagtcgcctcgctggtgctggactctacgcttggcccgtctggtctgtcgctcggcgagctctggcaaacgctgctgcacccggcaagcgttaatgcggggacgcgcgttatcgtctgggatatccgtttaccctatgcgctgatggcgttactggtgggaatggctttggggctggcgggtgccgaaatgcagacgatcctgaacaacccgctggcgagtccgttcacgctgggcgtttcttccgcagcggcctttggcgctgcgctggcgatcgtgttgggtatcggcattcccggcgttcctgccgcctggtttattcccgcgaatgcctttgcttttgcgctgctgtctgccctgctgctggacgggattactcgctggacgcgcgtggcgacctctggcgtggtgctgttcggtatcgcgctggtgtttacttttaatgcgctggtgtcgatgatgcagttcgttgccgatgaggacacgctacaggggctggtgttctggacgatgggcagcctggcgcgcgcgtcgtgggaaaagctcggcgtgctggcgttggtgtttgccattgtgctgccgtggtcgatgcgtagtgcctggcaattgacggcgctgcggttgggggaagatcgggcgatgagttttggcattgacgtgcggcgcctgcgcctgtcatcgctgctgcgcatcagcctgctatcggcgctgtcggtggcgtttgtcgggccaatcggttttatcggtctggtcgcgccgcacattgcgcgaatgctgtttggtgaagatcaccggttctatctgccgggcagcgtgttgacgggggggctggtgctgtcgctggcctcgatcgcgtcgaagaatattgttcctggggtgatcattccggtaggcatcgtaacgtcgctggtgggtgtgccgttcttcctgagcattattttgcgccaccgggggagcatgtcatga

SEQ ID NO: 73968 - DNA, 777 bp, Citrobacter koseri
atgagcgggttgatcctcaagggaataagcgccggttatccgaaacatccggttatccgcgatctcagcgtgcctgagctgccgcgcggtaaaattactgttctgctggggccgaacggctgcgggaaatcaacgttattacgcgcgctggccgggctgaataaagcccgtggcgaggtcatgctggacggtgagaacctgatgtcgctgccgtttgcccgacgtgcggaaaaggtggtgtttttactgcagtcgctgccgcagggcgtacatctgcatgtgctggagtcgattatcgtggcgcagcgggcgtccggcgggcgggatggcgcgaacagtcactcgcaggtgctggcaatcctggatcaactcggcattgcacatctggcgctgcactatcttgaccagctttccggcggccagcggcaactggtggggcttgcgcagtcgctgattcgctacccggaacttttgttgctggacgagccgcttagcgcgctggatctgaactatcagtttcacgttatggatctgatcgcgcgggaaacgcgggcgcgcaatatggtgacggttgtggtggtgcatgacattaatatcgcgctacgccacagcgaacatgtgctgatgctgaaggagggcaaactggtggccagcggcgcgccggaagcggttattaccgcagaaagcctggcggaagtgtataacgttcggggtcgtgtggaacgttgttcacagggcagggcgcaggtggtgctcgacggggttatcggggtttaa

SEQ ID NO: 73969 - DNA, 753 bp, Citrobacter koseri
atggctgtaactaagctggttctggtacgtcacggcgaaagtcagtggaacaacgaaaaccgtttcaccggttggtacgatgttgacctgtccgagaaaggcgtgggtgaagcaaaagcggcaggtaaactgctgaaagaggaaggctatagcttcgattttgcttatacctccgtgctgaaacgtgccatccacacgctgtggaacgtcctggacgaactggatcaggcctggctgccggttgagaaatcctggaagctgaacgaacgtcactacggcgcactacagggtctgaacaaagcggaaaccgctgaaaaatacggtgatgagcaggttaaacagtggcgtcgcggttttgccgtaaccccaccggagctgaccaaagatgacgagcgttacccgggccacgatccgcgttatgcgcaactgaccgagaaagagctaccgctgactgaaagcctggcgctgactatcgatcgcgtgatcccttactggaacgaaaccattctgccgcgcatgaaaagcggtgagcgcatcatcatcgccgctcacggtaactctctgcgtgcgctggtgaaatacctggataacatgagcgaagaagagattctcgaactgaacatcccgaccggtgtaccgctggtgtacgagttcgacgaaaacttcaaaccgatcaaacattactatctgggtaacgctgacgagatcgcggcaaaagcggcggccgtagcgaaccagggtaaagcgaagtaa

SEQ ID NO: 73970 - DNA, 1041 bp, Citrobacter koseri
gtgctaaacgaaacgcccgcactggcgcccgatggtcagccgtaccgcctgctcaccctgcgcaacgatgcagggatggtggtcacgctgatggactggggcgccacactactttccgcccgtatcccgctaaccgatggcagcgtccgtgaagcgttgctggggtgcgccagcccggaatattaccaggatcaggccgcctttcttggcgcatcgattggccgctacgccaatcgcattgccaacagccgttacacctgggcgggcgaaaccgtcattctgctgccgagccagggtgaaaaccaactgcacggcgggccggacggctttgacaaacgtcgctggcagatagtcaaccagaacgatcgtcaggtgctgttcgcactgacgtctgacgatggcgatcagggcttccccggccatctctgcgccaccgcgcagtatcgtctcaccaacgataaccgaatctccattacctatcgagcgacggtagataagccctgcccggtgaacctgaccaaccacgtttactttaacctggacggcgagcagtcagacgtacgccagcacaagctacagattctggctgatacgtacctgccggttgatgaaagcggtattccacgcgacgggctgaaatccgttgccggaacctcgttcgacttccgcagcgcaaaaaccatcgccagcgcgtttcttgccgatgacgatcagcgcaaggtaaaaggttacgatcacgcctttttattgcagaccaaaggagatgcctgccagccagccgcgcatctgtggtcgcaggatgagaaattgcagatgaaggtttatacctccgctccggcgctgcaattctattccggcaactatctgggcggcacgccgtcgcgcgggcctgaaccttatgccgactggcaaggcctggcgctggaaagcgaatttctgccagacagcccgaaccacccggaatggccgcaacctgactgcgtgttgcatcccggcgacgagtacgccagcctgacggaatatcagtttattccggcctga

SEQ ID NO: 73971 - DNA, 1149 bp, Citrobacter koseri
atgagtctgaaagagaaaacacaatctctgtttgcagaaattttcggctaccctgctacccacaccattcaggcgcctggtcgcgtcaatctgatcggcgagcacaccgattacaacgacggcttcgtgctgccttgcgctatcgactaccagacggtgattagctgcgccacgcgtgacgatcgcaaagtgcgcgtgattgcggctgactacgacaaccaggttgatgaattctcccttgatgcgccgatcgttacccacgacagccagcagtggtcaaactacgtgcgcggcgtggtgaagcatctgcaaaaacgaaataacgcatttggcggcgcggatctggttatcagcggcaatgtgccgcagggcgcgggactcagttcttctgcgtcgctggaagtcgcggtcggcaccgtattccagcagttgtaccacctgccgctggatggcgcgcaaatcgcgctcaacggccaggaagcggagaatcagttcgtcggctgcaactgcggcattatggatcagctgatctccgcgctgggtaaaaaagatcatgccctgctgattgactgccgcacgctgggtacgaaagcggtttccatgccggaaggcgtggcggtggtgatcatcaacagtaactttaaacgtacgctggtgggcagcgagtacaatacccgccgcgagcagtgtgaaacgggcgcgcgtttcttccagcaaccggcgttgcgcgatgtcagccttgcggcgttcaacgcggtggccaacgagctggacccgattgtcgccaaacgtgttcgccacgtactgaccgaaaacgcccgtaccgttgaagccgccagcgcgctggagaaaggcgacctgaaacgcatgggtgaattgatggcggaatctcacgcctcaatgcgcgatgacttcgaaatcaccgtcccgcagatcgacacgctggtcgaaattgtgaaagcgaccatcggcgataaaggcggcgtacgcatgaccggcggcggcttcggcggctgcgtcgtcgcgttgatcccggaagcgctggttcctgccgtacagcaggccgtggccacgcagtatgaagcgaaaaccggaatcaaagaaacgttttacgtatgcaaaccctcacaaggagccggacagtgctaa

SEQ ID NO: 73972 - DNA, 1047 bp, Citrobacter koseri
atgacgcaatttaatcctgtcgatcatccacatcgccgttttaacccgctaaccggacagtggattctggtttcaccgcatcgcgcaaagcgcccctggcagggggcgcaggaaacgccatctcagcaggcgcttcccgcccatgacccgaactgcttcctgtgcgcgggcaatacgcgggtaaccggagataaaaacccggattacaccggcacctatgtctttacaaatgactttgccgcgctgatgtctgacaccccggacgcgccggacagccatgacccgttgatgcgttgccagagcgcccgcggcaccagccgcgtgatctgcttttctcccgaccacagcaagacgctgccggagctgagcctccccgcgctgacggacatcatcaaaacctggcaagaacagactgccgatctgggaaaaacctacccctgggtgcaggtttttgagaataaaggcgcggcgatgggctgctccaacccgcatccgcacggccagatttgggccaacagcttcctgccgaacgaagccgagcgtgaagatcgtttgcaaaaagcctacttcgccgaacagcactccccaatgctggtggattatgcgcagcgcgaactggcggacggcagccgtacggtggttgaaaccgagcactggctggcggtcgtgccttactgggcggcctggccgtttgaaacgctgctgctgcccaaagcgcatgcgctgcgcattaccgatttgaccgacgatcagcgcgactccctggcgctggcgctgaaaaagctgaccagtcgttatgacaacctgttccagtgctccttcccctactccatgggctggcacggcgcgccgtttaacggtgaagagaacgggcactggcagctgcacgcgcacttttatccaccgctgctacgttccgcgaccgtccgtaaatttatggtcggttatgaaatgctggcggagacccagcgcgatctgacggcagaacaagcggcggagcgtctgcgcgcggtcagcgacattcattttcgcgaatcaggagtttaa

SEQ ID NO: 73973 - DNA, 1017 bp, Citrobacter koseri
atgagagtactggtcaccggtggtagcggttacattggaagtcatacttgtgtacagttactgaaaaacggtcacgatgtcatcatccttgataacctctgcaacagtaagcgcagcgtactgcctgttattgagcgattaagtggtaagcacccaactttcgttgaaggcgatattcgtaacgaagcgctgatgactgaaattctgcatgaccacgcgattgacgccgtcattcactttgccggtctgaaagccgtgggcgaatccgtcgccaaaccgctggaatactatgacaacaacgtcaacggtacgctgcgtttaatcagcgccatgcgcgccgccaatgtcaaaaacttcatcttcagctcctccgccaccgtctacggcgatcagcccaaaattccttatgtcgaaagtttcccgaccggcacgccgcagagcccatatggcaaaagtaaactgatggtcgaacagatcctgaccgacctgcaaaaagcacagccggactggagcatcgccctgctgcgctacttcaacccggtcggcgcgcatcagtcaggtgatatgggcgaagatccgcaaggcattcctaacaacctgatgccgtacatcgcccaggtcgccgttggccgtcgcgaatcgctcgcggtctttggcaacgactaccctaccgaagacggcaccggcgtgcgtgattacatccatgtgatggatcttgccgacggccacgtaaccgcgatggaaaaactggctggcaaacaaggcgtgcatatttacaaccttggcgccggtgttggcaacagcgtgctggatgtggttaacgctttcagcaaagcctgcggtaaacccgttgcttatcattttgccccacgccgtgaaggcgaccttccggcctactgggcggacgccagcaaagccgaccgcgaactgggctggcgcgtaacccgcacacttgacgaaatggcacaggacacctggcgttggcagtcacgccatccgcagggatatccagactaa

SEQ ID NO: 73974 - DNA, 1473 bp, Citrobacter koseri
atgtcatcattgcatatttcgcaaggtacgtttcgcctgagcgacacaaaaacgcttcagttaagtgcgctgacgttgcaggcgggggagagctgggcttttgtcggcaccaatggaagcgggaaatcggcgctggcccgcgcgctggcgggagaactgacgctactgaaaggcgagcgccagtctcagttcgcgcgcgtcacccgcctctcattcgaacagttgcaaaaactggtcagcgatgaatggcagcgcaataacaccgacctgctcagccctggcgaagacgacaccggacgaactacggcagaaatcattcaggatgaggtgagcaatcccgcccgctgtgccgaactggcgcagcagtttggcatttcttctctgctcgacagacgttttaaatacctttctacgggcgaaacgcgcaaaacgctgctttgtcaggcgctgatgtcagaaccggatttattaatcctcgatgagccgtttgacgggctggatgtcgcctcccgccagcaactggcgaatcttctcgccacgctgcaccagtcgggctacacgctggtgctggtgttaaaccgcttcgatgagatccccgaattcgttcagtatgcgggagtccttgccgactgcacgttaacggaaacgggggaaaaagcggatttgctccagcgggcgctgattgcccaactcgcgcatagcgaacgactggaaggcgtaaagttgcccgagccggatgagccttctgcccgtcacgccctgccggacggcgcggcgcgcattattctcaacgatggcgtcgtctcctataacgaccgccctattcttaatcatctgagctggcaggtgaatcctggtgaacactggcagattgtcgggcctaacggcgcgggaaaatccaccctgctaagtttaatcaccggcgaccatccgcagggatacagcaacgacctgacgctgtttggccgccgtcgcgggagtggtgaaacaatctgggatatcaaaaaacatatcggctatgtcagcagtagcctgcatctggattaccgcgtcagcaccacggtgcgtaatgtcattctctccggttactttgactcgattggcatctaccaggcggtttccgacagacaacacaagctggcgcagcaatggctggatattctgggaatggacaaacgcactgcggatgcgcctttccacagcctgtcctgggggcaacaacggctggcgctgattgcccgtgcgctggtcaaacaccctacgctgctgattcttgacgagccattacaaggcctggacccgctgaatcgtcaactcgttcgccgctttgtcgatgtactgattagcgagggagaaacgcagttgctgtttgtctcccatcacgcggaagacgccccaggctgcattacccatcggctggaatttgtaccggaaggcgagagttaccgctatcaacagacgacgctgcgttag

SEQ ID NO: 73975 - DNA, 789 bp, Citrobacter koseri
atgcaggccgaaatcctccttacactcaaacttcaacaaaaattgtttgcggacccccgccgcatttcgctgctcaagcatatcgcgctttccggctccatcagccagggggcaaaagatgcgggcatcagctacaaaagcgcctgggatgccattaacgagatgaaccaactcagcgagcagacgctcgtcgagcgcgcaacgggcggcaaaggcggcggcggcgcgatactgacccgctacggtcagcgcctgatccagctttacgatttgctcgcccagattcagcaaaaagcgttcgacgtgctgagcgacgacgacgccctgccgctcgacagcctgctggccgccatttcccgtttctctttgcaaaccagcgcccgtaaccagtggttcggcaccattaccgcacgcgatcacgatcaggttcaacagcatgtcgatgtgctgctggccgacggcgaaacgcgactgaaggttgccatcactgcgcaaagcggcgagcgtcttggccttgatgaaggtaaagaagtcctgatcctactgaaagcgccgtgggttggcattacccaggacgaggcgattgcccgggctgccgacaaccagcttcagggaaccatcagccatattgaacgcggcgccgagcagtgcgaagtcctcatgacattacctgacggccagacgttgtgcgccaccctgcccgttgaagagaccgccacgctggaagaaggtgctaacgtgacggcatattttaatgctgacagagtgattatcgctacgttgtgctaa

SEQ ID NO: 73976 - DNA, 150 bp, Citrobacter koseri
atgttagagttattgaaaagtctggtattcgccgtagtcatggttccggtggtcatggccatcattctggggctgatttacggtctgggtgaagtgttcaacattttctccggtatcggtcagaaagaccagtccagacagaaccattga

SEQ ID NO: 73977 - DNA, 774 bp, Citrobacter koseri
atggcacgtacatggttacgcctgtttgctggggcaacattatctctgactgttgccggacatgcgctggcggatgaagggaaaatcaccgtattcgcggcggcttcgctgaccaacgcaatgcaggatattgcggttgaatacaaaaaagagaagaacgttgacgttgtctcttcatttgcctcttcttctacgctggctcgccagattgaagcgggagcgccagcggatctgtttatctctgctgaccagaaatggatggattacgcggtagacaaaaaagcgattgataccgcaacgcgtgaaacgctgcttggcaacagcctggttgtggtcgcgccaaaagccagtgaacagaaagacatcaccatcgacagcaaaaccaactggacgactctgctgaatggcggccgtctggcggtgggcgacccggaacacgttccggctggcatttatgcaaaagaagcgctgcaaaaactgggcgcatgggataccctggcgccgaaactggctcctgcggaagacgtgcgtggcgcactggcgctggtggagcgtagcgaagcgccgctgggcatcgtttacggttctgatgccgttgccagcaaaggcgtgaaagtggttggcacgttcccggaagattcccataagaaagtggaatacccgatcgcgattgttgatggacacaaaaacgcaacggtcagcgcgttctatgactacctgaaaggaccgcaggcttccgaaatctttaaacgttatggatttacgacgaagtaa

SEQ ID NO: 73978 - DNA, 690 bp, Citrobacter koseri
atgatactgactgatccagaatggcaggccgttctactgagcctgaaagtttcttccctggccgtgttgtttagtctgccgtttgggatcttttttgcctggttacttgtgcgatgcaagtttccaggcaaagcgttgctcgacagcgtactgcatctgccgctggttttaccgcccgtggtggtcggttatctgctgcttatcgcgatgggccgacgcggatttattggtcagtggctttatgactggttcggcattacctttgcctttagctggcgaggcgccgtgctggcggcggcggtgatgtctttcccgttaatggttcgcgctattcgtctggcgcttgaaggggttgacattaagctggagcaggccgccagaacgctgggcgcaggacgctggcgtgttttcctcaccattacgctaccgctgacattgcctggcatcatcgtcgggaccgtgctggcgtttgcccgttcgctcggcgagttcggcgctaccatcactttcgtgtctaacattccgggtgaaacccgcaccattccttccgcgatgtataccctgatccagacccctggcggcgaaagcgcggcggcgagattgtgcattatttctattgtgctggcgctgatctcattgttgatttcggaatggctggcgcgtatcagccgtgagcgcgcggggagataa

SEQ ID NO: 73979 - DNA, 1059 bp, Citrobacter koseri
atgctggaactcaatttctcccagacgctgggcacccactgtctgacgctcaacgaaacgctacctgccaatgggatcaccgctatttttggcgtttccggcgccgggaaaacatcgctgatcaatgccatcagcggactgacgcgcccgcaaaaagggcgcattgtgctcaatggtcgcgtgcttaatgatgttgaaaagggcatctgcctgacgccggaaaaacggcgcgttggttatgtgttccaggatgcccgactgtttccgcattacaaagtgcgtggcaatctgcgctatggcatggcgaaaagcatggctggacagttcgacaagctggtggatctgctcggtatcgaacctttgctggagcgtttgccaggcagcctttccggcggggaaaaacagcgtgtggcgattggccgcgcgttgctgaccgcgccggagctactgttgcttgatgagccgctggcttcgctggatattccgcgcaaacgcgaactgctgccgtatctgcaacgcctggcgcgcgaaattaatatccccctgctgtacgtcagccactcgctggacgagattttacatctggcggacagagtcatggtgctggaaaacgggcaggtgaaagcgtttggcgcgctggaagaggtctggggcagcagtgtgatgcacccgtggctgccgaaagagcagcagagcagcatcctgaaagtgagcgtgctggagcatcatccgcattatgcaatgaccgcgctggcgctgggcgatcagcacctgtgggtcaacaaactggaagagccgctgcaaaccgtgctgcgtattcgtattcaggcctcggacgtgtcgctggtattacaaccaccgatgcaaaccagtatccgtaatatcctgcgggcaaaagtggcaaactgttatgacgataacgggcaggtggaagtccagcttgaagtcggcgggaaaacgctgtgggcgagaatcagcccgtgggccagggatgagctgggcatcaaacctggcctgtggctgtacgcgcaaatcaagagtgtttcaattaccgcctga

SEQ ID NO: 73980 - DNA, 819 bp, Citrobacter koseri
atgaccgctcgtgtgattgccctggatttagacggcaccttactgacgccgaaaaaaacattgctcccctcctcgcttgaggcgctttctcgcgccagagaggcaggctaccaacttatcatcgtcactggccgtcatcacgttgcgattcatcctttttatcaggcactggcgctggatacacctgcaatttgctgtaacggcacttacttgtatgattatcaagcaaaaaatgttcttgaggccgatccgctgcctgtcgttcaggcattgcaattgattgatctgctggatgcgcatcagattcacggtctgatgtacgttgatgacgcgatggtttatgaacgcccgaccggccatgtgatccgtaccgctaactgggcgcagacgctgccgccggaacagcgtccgacctttactcaggtgccgtcgctggcgcagtcggcacgcgacgtcaacgccgtctggaaattcgcgctgaccgatgaaaatctgccaaaactgcaacagttcgtgcagcaggttgagcatcagctgggtctggagtgcgaatggtcctggcacgatcaggtggatatcgcgcgtaaagggaacagcaaagggaagcgccttacccagtggattgaagcgcagggctggtcgatggagaatgtggtggcgtttggcgataactacaatgatatcagtatgctggaagcggcaggcaccggcgtcgcgatgggcaatgctgacgacgcggtgaaaacgcgggcgaatatcgtgatcggcgataacaccacggacagcattgcgaagtttatttatacccacctgctgtaa

SEQ ID NO: 73981 - DNA, 996 bp, Citrobacter koseri
atgaagcaaaccgtttataccgccagccctgagagccagcaaattcacgtctggagcctgaatcatgacggctcgctgaagctggtgcaggtggttgatgttccggggcaggttcagccgatggtggtcagccctgataagcgctatctctatgttggcgtccgtcctgagttccgcgtgctggcttaccgtattgcgccagatgacggcgcgctgaccttcgcggcggagtccgctctgccgggtagcccaacccatatctctaccgatcatcagggccgttttgtgtttgttggctcgtacaatgccggtaacgtcagcgtgacccgtctggatgatggcctgccggctggcgtggtggatgtcgttgaagggctggaagggtgccactcagcgaatatctcaccggataaccggacgctgtgggtgcctgcgctgaagcaggatcgcatttgcctgtttacgctcagtgacgacggcaaactggtcgcccaggaaccggcggaagtcaccaccgttgaaggggccgggccgcgccatatggcgttccacccgaaccagcaatatgcctactgtgtgaatgaactgaacagctctgttgatgtctgggagctgaaagatccgcacggcaatattgaatgcgtgcagacgctggatatgatgcctgccgatttttctgacacgcgttgggcggcggatatccatattacgccggatggccgtcatctgtatgcctgcgaccgtaccgccagcctgattaccgtttttagcgtttctgaagacggcagcgtactgacgaaagagggcttccagccgactgaaacgcagccgcgcggctttaacgtcgatcatagcggtaagtacctgattgctgccgggcagaagtcacaccatattgcggtgtatgccattgccggtgagcaggggctgctgacggagaaaggccgttatgcggtaggccaggggccaatgtgggtcgtggttaacgcgtattaa

SEQ ID NO: 73982 - DNA, 939 bp, Citrobacter koseri
atgaaacacgaattatcaagtatgaaggcatttgtcacactggcagaggcaggatcatttaacaaagccgccaaattacttaacattacgcaacctgcattaactcgcagaataaaaaagatggaagatgatttacataccctgctttttgagagaacaacacgtaaagtagaattaacaaaagcggggaggatgctgttaccggaagccagagaattaataagaaaactggatgaagctctttttaatgttcgcgaaatgaatgcttatcaccacggcacgatcacattgtcctgtattccgaccgctgttttctattttctaccccttgctatcggaaaatttaatgagttgtaccccaatatcaaaatacgaattcttgaaaaaggtacgaacaactgcatggaatcggtgttgggtaacgaagctgatttcggcataaatatgaacagcatcacaaattctgctattgacttcaccccgctggtgaatgaaccgtttgttctggcctgtcgacgaaaccatcccttagccagtaagcaactggtcgaatggcaggagttggtgggctacaaattgattggcgtgcggtcatccagcggtaacaggctgcttattgagcacaatctggcggataaaccctggaagctggactggttttacgaggttcgtcatttatcgacctcgcttggcctggttgaggccgggctgggtatttctgcgctgccggggctggcaatgcctcagacagtgcatcccacgcttatcggaatcccgttgatcgagcccgttatcagacgcacgttagggattatccggcgcaaagacgccgttctctctcctccggcagagcgttttttctctctacttttaaatgtctgggctgatgataaagacacgctgtggacgccttttgctgaaccacagcggcaacaataa

SEQ ID NO: 73983 - DNA, 1056 bp, Citrobacter koseri
atgaaaaaaattccctgcacgttgatgcgagggggaacatccagaggggcgtttttattagcagaacaccttcctgaggagagacagcggcgcgatgccatattgatggcaattatgggatcggggaatgagctggaaatagatggcattggcggcggtaatccgttgaccagtaaagtggccattatccgtcgttcggatgactcaaaagcagatatcgactatttatttgctcaggttctggtacatgaacaccgcgttgataccacgccgaactgtggaaatatgctttccgcggtaggcgcatttgcgattgaacatggcttaattgagactacgccgcccgtcacgcgcgtgcgtatacgtaatgtaaatacaaatacgtatatcgaagcggacgtgcagacgccggacggcgccgttgagtacgaaggccaggcaaaaatcgatggcgtaccgggaacggccgcgcccgtggcactcacgtttttgaacgctgctggcgccaaaaccgggcaaatttttccgaccggtcatcgtgtcgattattttgattccgttgccgtcacctgtattgatatggcgatgccggtggttattatcgctgctgaagatgtcggtaaaacgggttatgaatcccctgcggaacttgatgccgatactgaattattgcgccgcattgaatccatccgtttgcaggcgggtaaagcgatggggttaggcgacgtcagcaatatggttattcctaaaccggtgcttatttccccggccagacggggcgggacgatcaatgtgcgctattttatgccgcactcctgccataaggcgctggcgattactggtgccatcgcgcttgccagtagctgtgcgacagaagggacggtcgcccaccggatgacgcaattgacggactatggcgatataaatatcgaacacccgggcgggtgccttgatattcatttaacaaatgaaggtaatgagccttcttcaatacgtgcttctgttattcgcacagcaagaaagatttttgcaggtgaagtttatattcctgaatga

SEQ ID NO: 73984 - DNA, 1434 bp, Citrobacter koseri
atgaataaaaaatctatatggaagctaattattatattagcgatcccgtgtattattggcttaattcccgcgccagccggtctgagtgaactcgcctgggttctctttggcatctatcttgcggcaatcgtggggctggtgataaaaccgtttcccgaacccgttgtattattgattgccgtcgcggcatcgatggtcgtggtcggaaatttaagtgaaggggcgtttaaaacgaccagcgtgctcagcggttatgcctctggaacgacgtggctggtattttctgcgtttacgttaagcgccgcgtttgtcactaccggtctgggcaaacgcattgcgtatattctgattggtaagatcgggaataccacgctggggctgggctatgtcacggtttttctcgatctggttctctctccggcaacgccgtcaaacacggcgcgcgcaggcggtattgttttacctatcatcaacagtgtggctgtcgcgctgggttctgagcctgaaaaaagcccccgtcgtgtcggtcattatttaatgatgtccgtgtatatggtcacgaaaacgaccagttatatgttttttaccgcaatggcagggaacatactggcgctgaaaatgatcaacgatatttgccatctgcaattaagctgggggggatgggcgctggcagcaatggtgccgggtatcattatgttactggtgacgccgctggtgatttataccatgtatccaccggaaattaaaaaggttgataataagacgatcgcgaaagccgggcttcaggatctcgggccaatgaaaggccgtgagaaattactgctgggtatttttgtcctcgcgctgtcaggctggattttcagtaaacaacttggcgtggatgaatcaaccgttgcgattgtggtgatgggcgcgatgttgttactgggcgtggtgagctgggatgatgtcgttaaaaataaaggcggctggaatacattaatctggtacggcggtatcattggcttaagctctttattatcgaaagtgaagttttttgactggctggctgaactgtttaaaaacaatctctcttttgataatcatggtaacgtggcgttcttcgtcattttgttcctgagtattattgtccgttatttctttgcctccggtagcgcttatattgtggcgatgatgccggtatttgccatgctggcgaatgtctctggcgcgccattaatgctaaccgcgctggccttattattctccaactcttatggcggaatggtcacgcactatggcggtgccgctggcccggttattttcggggtcggttataacgatattaagtcctggtggctcgtcggcgcggttctgaccatcttaacgttcctggtacatatcacgattggtatctggtggtggaacatgttgattgactggaacatgctgtaa

SEQ ID NO: 73985 - DNA, 2259 bp, Citrobacter koseri
atgattaagttatatgacaaagggatttatctctccggtaacaatgagataattgcagaagaacagtattgcggtaatgtacaaaaagaggaagccaaaaaaggcaccatagcatggtccattcttgcgtctcataatacgtcaggaaatatggataaacttaaaatcaagtttgattcgttaacctcccacgatattacctatgtaggcataattcagaccgcgaaagcgtccgggatggcgcgttttccattaccttatgttctcacaaactgtcataactcattatgcgccgttggtggaaccattaatggcgatgatcatctttttggactttccgccgcgcagcgctatggcggtatttatgtgccgccccatattgcggtcatccaccaatatatgcgtgagatgatggcgggcggtggaaaaatgattttaggctcagacagccacacgcgctatggcgcgctggggacgatggccgtaggggagggcggaggtgaactcgtcaagcaactgttgaatgatagctgggatatcgattatccgggcgtcgtggcggtatatctgacgggaaaactggcgccaggcgttggcccgcaggatgtggcgttagccatcattggcgccgtatttaaaaatggctatgtcaaaaataaggtcatggaatttgtggggccgggcattagcgcaatgtccacggatttccgtaacagtgttgatgtcatgaccacggagacgacctgcctgagttcggtgtggcaaacggatgatgagacccgtagctggctggcgttacatggccgtgaaccggattatcgacagctgaatccgcagccaatggcctggtacgatggctgtatttatgttgatttgagcacaattaaaccgatgatcgcgctacctttccatccgagcaatgtgtatgaaatcgacacgttaaatgagaatttgacggatattctgcaccaggtagaaattgagtctgcgcgcattgcccgtgggaaagccaaaatctcactgctggataaagttgagaagggaagattaaaggttcagcagggaattattgccggatgctcaggcggtaactatgagaacgtcattgcggcggcgaatgcgttgcgcggaaaatcgtgtggtaacgagacgttctcactcgcggtttacccctcttcacagcctgtatttatggatctggcgaaaaaaggcgtggtggctgatttaactggcgcgggcgcaatcatcagaaccgctttctgcggcccgtgctttggcgctggcgatacgcccgttaacaacgggctgagcattcgccacaccacccgtaacttcccgaaccgtgaaggttcgaaaccgggtaatggtcaaatgtccgcggttgcgctgatggatgcgcgttctattgcggcgacggcaataaatgggggctatctgacctccgccgctgaactggactgctgggaaaacgttcctgactatgcgtttgatcccactccttataaaaaccgtgtctatcagggttttgttaaaggggcgacgcagcaatcgctcatctatggcccgaatattaaagactggccggcgctgggggcgctgacggaaaatattctgctcaaggtggcgtcaaaaattcttgatgaagtcacaacgacggatgagctgattccgtccggggagacctcctcttttcgctcaaatccggttggtctggcggagttcaccctgtcacgccgcgatccagactatgttggccgaagcaaagcaaccgcgacgctggaaaaacagcgtctggcaggcgaggtgagcgagctggagccggtctttgcccgtattcgcacaattgcgggccaggaaaccaccgatccgttagccaccgggattggcagcatgatttatgccgttaagccgggagacggttccgcgcgtgaacaggcggcaagctgtcagcgcgtgattggcggtctggcgaatatagcccaggagtatgcgacgaaacgctaccgttcgaatgtgatcaactggggaatgttgccgttgcaaatggcgggtgagcctgggtttgacgtcggggattatatttacattcctggcgtccgtacggtgctggatcaatgcgcaaccaccttaaaaggctatgtgattcatgacgatgaaatcacggaaatcagtctgtatctggaaagcctgaccgccgaggaacgtgaaattatcaaagcgggaagtctgattaatttcaataaaaaccgtcagatgtaa

SEQ ID NO: 73986 - DNA, 1284 bp, Citrobacter koseri
gtgaacacattttcggtttcccgtctggcgctggcactggcttttggcgtgacgctgaccgcctgtagctctacgccgcccgatcaaatcccatccgatcagaccgcgccaggcacctcctcgcgtccgatcctgtcggcgaacgaagcgcagaatttcgttgctgcacactatttctcgtcactgacgccgaatacggcgccgtggacgccttccgccattacgctgcctgcgcaacctgacttcgttgtcggcccggctggcacgccaggcgtgacgcacaccaccattcaggcggcggtagatgcagcaattacgcagcgcagcagcaagcgtctgtacatcgccattatgccgggcgagtatcagggaaccgtgtatatcccggcggcgcctggcagcctgacgctgtacggtacgggcgagaacgcgattgatgtgaaaatcggccaggcgattgacggcgaaatgagcacgaccgactggcgtcgttcagtgaacccgggcggtaaatacatgccgggcaaacctgcgtggtatatgtttgataactgccagagcaaacgcggcgccagcattggcgtgatgtgttctgcggtggtctggtcacagaatgacggcttgcagttacaaaatctgaccatcgaaaacaatctcggtgacagcgttgacgccggcaaccatccggcagtggccttacgcactgacggcgacaaagtgcagattaataaagtgaacattctgggtcgccagaataccttcttcgtgaccaacagcggcgtgcagaaccgtctgcaaaacgatcgccaaccgcgcacgctggtgacgaacagttacattgaaggggatgtggatatggtttccggtcgcggcgcagtggtgttcgataacaccgatttccgcgtggtgaactcccgtacccagcaggaagcgtatgttttcgctccggcaacgctgtcgaatatttattacggtttcctcgccaccaacagccgctttaccgccgcaggtgatggcgtcgcgcaactggggcgttcgctggatgtggatgccaacaccaacggtcaggtcgttatccgcgatagcgtgattaacgaagggttcaatatggcgaaaccgtgggctgacgccgttatctccaaacgtccttttgccgggaatactggcgcgaaggatgataaagacgaggtgcagcgtaacctgaacgacacgaactttaaccggatgtgggaatacaacaaccggggtttaggcagtaaagtagttgccgaaccgaagcaataa

SEQ ID NO: 73987 - DNA, 1233 bp, Citrobacter koseri
atgaacccaatggcgcaacttttacctgatgacacgatctggcggaatggccgactggcgacgatggaccctgaacgcggtagcccttatgggatggtggacgatcatgcgcttgtcgtccgccagggccggatactggatattgtgcctgcgtcgtcgctcaacgccgagcaccgcaataccgtggatctgcaaggccgactggtcacgcccggattgattgactgtcacacccacctgatttttggcggcacgcgcgccggggagtgggagcagcggcttaacggcgtgtcgtaccagcagatcagcgcgcagggcggcggtatcaacgcgaccgtcgctgcgacccggacggcctctgaagatgaacttttaaccgttgcgcgtgcgcggatggcgcgattgctgcaagaaggcgttacgttgctggaggtgaaatccggctatggcctgaatttcgccacggaagagaaaatgttgcgcgttgccgctgcgctggcgcatgaaaacagggtggaaatcagtcctaccctgctggcggcacatgcgacgccagcagaataccgcgacgatcccgacggctatatcacgctagtttgcgaaagtattctgcccggattatgggcaaaagggctgtttgagtcggtggatcttttctgtgaaagcgtggggtttaacttggcgcagagtgagcgggtatttcaggccgctcaggcgttgggcattccggtaaaagggcacgttgagcagctctccttgctggggggcgcacaactggtgagtcgttatcaggggttatccgccgaccatattgagtatctggatgaggctggcgtggcggcgatgagtcgcagcggcaccgtgggcgttctgctgccgggggcgttttatttcctcaaagagacgcagcgcccgccggtggcgttgctccgccactatggcgtgccaatggcggttgcaacggactttaaccccggcaccagtccgtttatcagtttgcatctggcgatgaacatggcttgcgtacagtttggcttaacgccggaagaggcgtgggcgggcgtgacgcggcatgctgcgcgcgcgctgggtcggcagacgacgcatgggcaattgaaagcgggatatgtcgctgactttgccgtatgggacgctgagcttccggttgaaatcctttatgaaccggggcgcaacccgctctgtcaccgtgtattcagaggagaagtaacatga

SEQ ID NO: 73988 - DNA, 942 bp, Citrobacter koseri
atgacgcaatggcaacccgcatctcccacgctctggcaggggcgtgatgacagcgccgaggcggctaacgcgctgcgtctctttcagacggtgacgcgcagcccgacgttttctcccgaaatgtatcgtgaaaaaatcgccttgctcggctttgcctgtgacgaaggcgtgaagcgaaaccaggggcggcctggcgccgctggcgcgccggatgccctgcgccgggcgctggcgaacctggcctctcaccacggccacgatcggctggtggatttaggcaacattattgcgcaagcccccgatctggaaggcgcgcagcaggcgcttcgcgatgcggtacggcgctgccagcaggcggatatgcgcacgtttgtgctaggcggcggacatgaaacggcgtttgggcatggcgcggggctgctcgatgcgttcccgcatgccagagtcggcattattaatcttgatgcgcatctggatctgcgtcgggctgaccacgccacctccggtacgccgtttcgccagttggcgcaattatgcgatgaacaacagcgtaagtttcattacgcctgctttggcgtcagtcgggcggcaaatacgcaggcgttatgggatgaggcgcaacaacgcggagtgaccatcgtagaagacgtggattgtgataccgctcaggcgccgttggcgcaggttatcgacagcgtggataagatctacctgaccatcgatcttgatgtgctgcccgcctgggagatgcccgcagtgtctgcgcccgcagcgctcggtgtgccgttggcgacggtgatgcggcttgtcgatgccgtttgtcgcagcggtaagctacaggcggtggatatggttgaatttaatccgcgctttgacgatgatggcaacgcagcgcgtgttgcggcacgcctcggctggcaaatcgcacacgggtggcgttaa

SEQ ID NO: 73989 - DNA, 720 bp, Citrobacter koseri
atgctcccatcccgttctgcccctgtgcctttctatgaaaaggtcaaacagacgatcagcgacaacatcgccagcggcgtctggcgcccgcatgaccgcattccctcggaagcggaactggtggcgcaatttggcttcagccggatgacaatcaaccgggcgttgcgggaattaacggatgaagggctgctggtgcgtttacagggcgtcggcacatttgtggcggaaccgaaagggcagtccgcactgtttgaaattcgcagcattgccgatgaaatcgccgctcgtcaccatcagcaccgctgtgaggtgctgacgctggaacagacacaggcgaatgcgcttcaggccacggccctgaatgtgcgtgaaggcacgctgatttttcattcggtgatggtgcactatgaaaacgatctgccggtgcagattgaggatcgctgtgtgaatgccggcgttgtaccggattatctggcgcaggattacagccagaccacgcctcatgcatacctgtcgctgatcgccccgctaacggaaggggagcacattgtggaagccgtgcgcgccacggcggaagagtgcgcgctgctgaacattaaggagcacgatccctgcctgttaattcatcggcgcacctggtctgcgtcgcacattgtttctcacgctcgcctgctttttcccggttctcgctaccggttgcagggccattttatgtcctga

SEQ ID NO: 73990 - DNA, 1686 bp, Citrobacter koseri
atgcctcaaagcaagtatcgtcagcaggatatccgcgccccgaggggaacaaccctgacggcaaaaagctggttaaccgaagcgccgctgcgcatgttaatgaacaacctcgatcccgatgttgccgagaatccgcatgaactggtggtttatggcggcattggccgcgcagcgcgcgactgggagtgctatgacgccatcatcaatgcgctgaccaaactggaggccgatgaaaccctgctggtgcagtccggtaaaccggtcggcgtgtttaagacccacgaaaacgcgccgcgtgtcctgatcgctaactccaacctggtgccgcactgggcgacctgggaacatttcaatgagctggacgccaaagggctggcgatgtacggccagatgaccgccggaagctggatctacatcggcagccagggcatcgtgcagggtacctatgaaaccttcgttgaagcaggacggcagcactatcaggggaatttgtccgggcgctgggtgctgaccgccgggcttggcggtatgggcggcgcacagccgctggccgcgacgctggcgggggcgtgctcgctgaatatcgaatgccagcaaagccgtatcgatttccgtctgcgtacccgctacgtcgatgaacaggccacctcgctggacgacgcgctggcgcgaattgaaaaatatacccgcgaaggtaaagccgtctccgttgcgctgtgcgccaacgcggcggacgtcgtgccggaactggtaaaacgcggcgttcgcccggatctggtgaccgaccagaccagcgcgcacgatccgctgcacggttatctgccctctggctggcgttgggaggagtatcaggcgaaagcggcgtcagatccacagggcacggtacaggcggcgaaacgctcaatggcgaagcacgtacaggcgatgctggcgttcagtgaaatgggcgtcccgaccttcgattacggcaacaatatccgccagatggcgaaagagatgggcgtagagaacgcctttgattttcctgggttcgttccggcctatatccgcccgcttttctgtcgggggatcggcccattccgttgggtagcgctttccggcgatccagaagatatttataaaaccgatgccaaagtcaaagagattgtggcggatgacaaacatctgcatcactggctggatatggcgcgcgaacgtattaacttccagggcttaccggcgcgtatttgctgggtggggctggcgtggcggcaaaaactgggtctggcgtttaacgaaatggtacgccgtggagaggtctccgcgccgatcgtcattggccgcgatcatctggattccggctccgtcgccagtccaaaccgggagacggaagcgatgcgcgacggttctgatgcggtatccgactggccgttactgaacgcgctgctcaataccgccagcggtgcgacctgggtttcgctgcatcatggcggcggcgtcggcatggggttctcgcaacatgccggaatggtgattgtctgcgacggcaccgacgaggcggcagcgcgtatcaccagagtgctgcataacgatccggcgacaggcgtgatgcgtcatgctgacgccgggtatgagattgcggttgaatgcgccgcagaacaagggctgaacttgccgatgatcgcggctactcaaggaaaacgctga

SEQ ID NO: 73991 - DNA, 1521 bp, Citrobacter koseri
atgaatacgcttacgttaacgccgggtcatctgagttttgcgcagcttcgcgccgtctggcagcagccagtgcaactgcgtcttgatagcagcgcggttgacggtattaatgccagcgtcgactgcgtgaacaatatcgtcgccgaggggcgcacggcctacggtatcaataccggttttggtctgctggcgcagacgcgcatcgccacggaggatctgcaaaacctgcaacgttcgctggtgctctcccacgcggcgggtattggcgagccgctggacgacgcgatggtgcgtctgatcatggtgctgaaaatcaatagcctggcgcgtggtttctcgggcatccgcctgagcgtgattgaggcgctgattgcgctggttaacgcagaggtctggccgctgatcccggtgaaaggttctgtaggggcatcgggcgatctggcgccgttggcgcatatgtcgttgacgctgcttggcgaagggaaagcccgctggcagggggagtggcttccggcgaaagaggcgttgaaaaaggccggactggaaccgatcacgctggcggcgaaagagggactggcgcttctgaatggcacccaggcctccaccgcctttgcgctgcgtgggctgttcgaagcgcaggcgctgttcgcctctgcggtggtctgcggggcgttaaccaccgaagccgttctggggtcgcgccgaccgtttgatgcgcgcattcatgccgcgcgcggtcagcgtgggcagattgacgccgccgggctgttccgccacgttctgacggagaccagcgcgatagcacagtcgcaccataactgtgaaaaggtgcaggacccgtactcgctgcggtgtcagccgcaggtgatgggcgcgtgcctcacacaactgcgtcaggcgatggaggtgctgctcgttgaagccaacgccgtttcggataacccgctggtgtttgccgaagagggggatgtgatttccggcggtaacttccatgccgaaccggtggcgatggcggcggataatctggcgctggcgattgcggaaatcggcgcgctgtcggaaaggcgtatcgcgctgatgatggataaacatatgtcgcagttgccacctttcctggtgaaaaacggcggcgtcaactccggttttatgattgcgcaggtgaccgctgcggcgctggccagcgagaacaaagcgctggcgcatccgcacagcgtggacagcctgccgacgtcggccaatcaggaagatcatgtgtcgatggcgcccgctgcgggtcggcgactatgggaaatggcggcaaacacgcgtggggtcattgcggtagagtggctggcggcctgtcagggtatcgacctccgggaagggttaacctcaagcccgctgctggagcaggcgcgaaaagcgctgcgcgagcaggtgccgcattatactcaggaccgtttcttcgcgccggatattgagtgcgcgaccgaactgctggcgcgcggggacttgttccggttattacctgatttcttgtaa

SEQ ID NO: 73992 - DNA, 477 bp, Citrobacter koseri
atgaaacttatcagcaacgacctgcgcgacggggaaaaactgccccatcgccatgtgtttaacggcatgggctatgacggggacaacatctccccgcacctggcctgggacgaggtgcccgccggtacgaaaagctttgtcgtgacctgctacgatcccgatgcgccaaccggctcaggctggtggcactggattgtcgccaacctgccagccgatacccgcgtactgccgcaagggtttggttccggtctggtggcgatgccggaagggactctccagacgcgcaccgattttggtaaagcaggctacggcggcgcagctccgccgaaaggggaaacgcaccgctacatctttaccgttcacgcgctggatgtggagcgtattgatgtcgatgcaggcgccagcggcgcgatggtgggctttaacgtccatttccattcgctcgccagcgcgtcgattaccgcaatgttcagctaa

SEQ ID NO: 73993 - DNA, 1290 bp, Citrobacter koseri
atgacaacggacgaccttgcctttgaccaacgccatatctggcatccctatacctccatgacctccccgctcccggtttatccggttgcgcgcgccgagggttgcgaactgattttggccaacggcgaccgtctgatcgacggcatgtcgtcatggtgggcggcgatccacggttacaaccatccacagctcaacgccgcgatgaaaacgcaaattgacgccatgtcgcatgtgatgtttggcggcattacccatgcccctgcggtcaacctgtgtcgcaagctggtggcgatgacgccgcaagcgctggagtgcgtgttcctggcggactccggttcggtggcggtggaagtggcgatgaaaatggcgctgcaatactggcaggcgaaaggcgagtctcgtcagcgttttctgacctttcgcaacggctatcacggagacaccttcggcgcgatgtcggtatgcgatccagataactcaatgcacagcctgtggaagggctatctgccggaaaacctctttgcccccgccccgcaaagccggatggatggcgaatgggacgagcgggatatggtggcctttgcccgcctgatggcggcgcaccggcatgagattgcggcggtgattctggagcccattgtccagggcgcaggcgggatgcggatgtatcacccggagtggcttcgccgcatccgtaagatgtgcgatcgcgaagggattctgctgattgccgatgagatcgccaccggatttggccgcacaggtaaactgtttgcctgcgaacatgcagacattacgccggatatcttgtgtctcggtaaggccatcaccggcggtacgatgacgctttccgccacgctaaccacccgtctggtcgctgaaaccatcagcaacggcgaagccggttgctttatgcatggcccgacctttatgggcaatccgctggcatgtgccgtggcttgcgccagtctttccctgctggaaacaggcgagtggcagcagcaggtggcggcgattgacgcgcagttacgccgcgaattagcgcccgcgcgcgcatcgtcctgggtcgctgacgtgcgcgtactcggcgccatcggcgtcgtggaaaccacgcacccggtcaatatggcggcgttgcagcgtttctttgtcgggcaaggcgtctgggtgcgcccgtttggtaaacttatctacctgatgccgccctatatcatccagccggaacaattgcatcgtctgacgcaggcggtgaacgacgctgtgcgcaatgaaacattttttatccattaa

SEQ ID NO: 73994 - DNA, 1041 bp, Citrobacter koseri
atggctcaccacccacgctggacattgtcgcaagttactgaattatttaataaaccgctgctggatctgctgtttgacgcgcagcaaatccatcgtcagcatttcgatccgcaacaggtgcaggtcagtacgctgctgtcgattaaaaccggcgcctgcccggaagactgcaaatattgcccgcagagttcccgctataagacggggctggaagcggagcgtctgatggaagtggaacaggtgctggactccgcgcgcaaagcgaagaacgccggttcaacccgtttctgcatgggcgcggcatggaaaaacccgcacgaacgcgatatgccgtatctggaacagatggtgcagggcgtgaaggcgatggggctggaagcctgtatgaccctcggcacgctcaatgaatctcaggcgcagcgcctcgccaacgccgggctggactactacaaccacaacctggatacctccccggaattttacggcaacatcatcacgacccgctcgtatcaggaacgtcttgatacgctggacaaagtgcgtgaagcggggattaaagtctgctctggtggtatcgttggcttaggcgaaacggttaaagatcgcgccgggctgctgttgcaactggcgaatttgccgaccccgccggaaagcgtgcccatcaacatgctggtgaaggtcaaaggtacgccgctggcggataatgaggatgtggatgcgtttgatttcatccgcacgatcgctgtcgcgcgcattatgatgccaacctcctacgtgcgtctttctgcgggtcgcgaacagatgaacgaacagacgcaggcgatgtgctttatggcgggggcgaactccatcttctacggctgcaagctgctgaccacgccgaacccggaagaagacaaagatctccagctgttccgcaaactggggctgaatccgcagcaaacgtcggtgctggctggcgacaacgaacagcaacagcgtctggagcaggcgctgatgaccccggatacagacgactattacaacgcggcagcagtatga

SEQ ID NO: 73995 - DNA, 1155 bp, Citrobacter koseri
atgacctggcagcaaaaaatcgacgatgcgcttacggcgcgtcgttctgccgatgcgttgcgtcgccgctatgcggtgacgcagggggcagggcgttggctggtggctaacgaacgccagtatctgaatttctccagcaatgactacctcggtttaagtcaccatccgcagattattcgcgcctggcaacagggtgcggagcgctttggcgtcggcagcggcggctccggccacgtcagcggctactccgtggcgcatcaggcgcttgaggaggcgctggcaggctggcttggctattcgcgggcgctgctgtttatctctggctttgcggcgaatcaggcggttatcgccgcgctgatggcgaaagacgatcggattgtcgcggaccgtctcagccacgcctcattgctggaagcggcaaacctcagcccggcgacgcttcgccgctttacccacaacgatcctcagcacctggcgcgcctgctggacgccccgtgcggcgggcagcaactggtggtgacagagggcatattcagtatggacggcgacggcgcgccgctggcggagatccaccgtgtcgcacggcagcgtaacgcctggctgctggtggatgatgcgcacggtattggcgttacgggcgatgaggggcgcggaagctgctggcgacagcaggtcaaacctgagctgctgattgtgacgtttggcaaaggttttggcgtcagcggggcggcgattctctgctctgaaagcgttgcggattatctgttgcagtttgcccgccatctgatctacagcaccagtatgccaccggcccaggcgcaggcgctgagcgcggcgctggcggtgatccgaagcccggaaggcgcagatcgccgggaaaaactggctgcgttaattcagcgcttccgttcgggcgttaaggccagcgattttacactggcaaattcgcacagtgcgattcagccgctgattgtcggagacaatgcgcgcgcgttacggctggcggatactctgcgggagcagggatgctgggtgagcgcgatccgaccgcctaccgttccggccggtactgcccgattgcgcctgacgctcactcaggcgcacgaagcgcaggatattgatcgcttactggaggtgctggatggcgcaggttga

SEQ ID NO: 73996 - DNA, 756 bp, Citrobacter koseri
atggcgcaggttgataagcaggcgattgcggccgcgtttgggcgcgcggcgtcgcattatgaacagcacgctgaactgcaacgccagagtgcggatgcgctgttggcgctgctggcagggcgcgaatgtgcgcacgttctggacgccggctgcgggccagggcggatgagtcgcttctggcgagagcagggatgcgaggttacggcgctcgatctctcggcgcaaatgctggatgaggcgcgtcgtcagcaggctgctcaccattaccttgcggcggatatcgaagccatcccgctggcggcggcgcggtttgatttggcatggagcaacctggcggtacagtggtgcggcgatttgcgcggcgcgctaagcgaactgtatcgcgtggtgcgtcctggcggcgtggtggcgtttacctcgctggcgcacggatcgctgccggaactgcgtcaggcctggcaggcggtagataaccgggggcatgccaaccactttttgtcgccggagacgatcggcaatgcaatgcgcggctggcgcgtccgtcagcagatccaggcgatcaccctgtggtttgatgatgcgctcagcgcgatgcgttcgcttaaaggcattggggcgacgcatctgcacgaggggcgtgaaccgcgcgtgttaacgcgttcgcagttgcgacagttgcagttggcctggccgcagcagcaggggaaatatccgctgacgtatcagctttttttgggagtcattgaacgtgattaa

SEQ ID NO: 73997 - DNA, 687 bp, Citrobacter koseri
gtgattaaacggtattttgtcaccgggacggacactgaagttggaaaaacggtcgccagttgcgccctgttacaggctgccgcgcagagcggctttcggacggcaggctacaagcccgtggcgtcgggcagcgagatgacggcgcaggggctgcgcaatagcgatgccctggcgctacagcgcaacagcacgctgacgctggcctatgaagcgatcaatccctacacctttgcggaaccgacctcgccgcacattgtaagcgcagaggaggggagacccgttcaggcctcggtgatgtccgccggtttacgcacgctggaacggcaggccgactgggtgctagtggaaggggcgggcggctggtttactccgctgggcgaaacgctgacgtttgccgactgggtcgcggcggagcacctgccggtgattctggtggtgggcgtgaagcttgggtgtatcaatcatgccatgctgacggcgcaggccgtgcagcaagccgggctgacgcttgccgggtgggtagccaatgacgtgacgccgcccggaaagcgccatgcggaatacatagcgacgctaacgcgggtgattacggctcctctgctgggcgaaatcccctggctttccgggaaggcggaaagtgcatcaacaggacaatatctcgacctgacgcgcctgaaggcggtgtaa

SEQ ID NO: 73998 - DNA, 2022 bp, Citrobacter koseri
atgagtaaaccgttcaaactgaattccgcttttaaaccctcaggcgatcagccggaggcgatacgtcgtctggaggaaggtcttgaagatggtctggcgcaccagacgctgttgggcgtaacgggatcagggaaaacgttcaccatcgccaatgtgattgccgatttacagcgcccgacgatggtgcttgcgcccaataaaacgctggcggcccagttatacggcgaaatgaaagagttcttccctgacaacgcggtggaatatttcgtctcttactatgactactatcagccagaggcgtatgtgcccagctccgacacctttatcgaaaaagatgcgtcggtgaacgaacacatagaacagatgcgactgtcggcgaccaaggcgctgcttgagcggcgggacgttgtagtcgtggcttcggtttccgctatctacggtctgggcgatcccgatttatacctgaagatgatgctgcacctgacggtggggatgatcatcgatcagcgcgctatcctgcgccgtctggcggagttgcaatatacccgcaacgatcaggccttccagcgcggcactttccgcgtacgcggcgaggtcatcgacatcttcccggcggagtctgacgatattgcgctgcgggttgagctgtttgacgaagaggttgaacgtctgtcgctgtttgacccgctgaccgggcaggttgaatcgactatccagcgctacaccatctacccgaaaacgcactacgttacgccgcgcgagcgcatcgtacaggcgatggaggagatcaaagacgaactggtggacagacgcaggatcatgctggaaaacaataagctgctggaagaacagcgcttaacccagcgtacgcagttcgatctggaaatgatgaacgagctgggatattgctcggggattgaaaactactcccgctacctttccgggcgcgggcctggcgagccgccgccgacgctgtttgattatctgcctgccgatggcctgttagtcgtggatgaatctcacgtcacgattccgcaaatcggcgggatgtttcgtggggacagggcgcgcaaagagacgctggtggagtacggtttccgtctgccgtcagcgctggataaccgtccgctaaaatttgaagagtttgaagcgctggccccgcaaaccatctacgtttccgccacgccgggcaactatgagctggagaaatccggcggcgaggtggtggatcaggtggtgcgtcccaccgggctgctggacccgatcattgaagttcggccggtggcgacgcaggttgatgatctgctctctgagatccgcctgcgggcggcgattaacgaacgtgtgctggtgacaacgctgaccaagcgaatggcggaagatcttaccgaatatctcgaagaacacggcgagcgcgtacgttacctgcactcggacatcgataccgttgaacgtatggaaatcattcgtgatttgcgtctgggcgagtttgacgtgctggtggggatcaacctgttgcgagaagggctggacatgcctgaggtctcgctggtggcgattctggacgcagacaaagaaggcttcctgcgctcagagcgttcgctgattcagaccatcggccgtgcggcgcgtaacgtcaacgggaaggcgatcctctatggcgataagatcaccccgtcgatggcgaaagcgataggcgaaaccgaacgtcgtcgcgagaaacagcagttatacaacgaagagcacggtatcgttccgcaggggctgaataagaaagtggtcgatattctggcgctgggtcagaacatcgcgaaaaccaaagcgaagggcaaagggaagtcccgcgcagcggcgaaatcgggtgtggttgagatggatatgacgccgaaagcgttgcagcagaaaattcatgagctggaaggccagatgatgcagcatgcgcaaaacctggagtttgaagaagccgcagagatccgcgaccagttgcatcagctacgtgagctgtttatcgcggcgtcctga

SEQ ID NO: 73999 - DNA, 909 bp, Citrobacter koseri
atgcgcaatcgtacgctggcagacctggatcgtgttgtcgctctcggcggagggcatggattaggacgcgttctctcttcactctcttcattaggctcacgcctgaccggtattgtcaccaccaccgataacgggggttccactggccgtattcgccgctctgaagggggcatcgcctggggcgatatgcgcaactgtctgaaccagttaattaccgaacccagcgtcgcgtcggcgatgtttgagtatcgttttggcggtaatggtgaactttccggccataacctcggaaatctgatgttaaaggcgctggaccacctgagtgtgcggcctctcgaagcgataaatttaattcgcaatttgttgaaggtggatgcgcatttaatccctatgtcggagctgccggtagacctgatggccatcgacgatcaggggcatgaagtatacggcgaggtgaatatcgatcaactggcgaccccgccgcaggagctgatgctgtcaccgaaagtccccaccacccgggaagcggtgcaggccattagcgaagccgatttgattctgattggccccggaagtttctacaccagtttgatgccgattctgctgcttgatgagctggcgcaggcgctgcgccgtactccggcgccgatggtctatatcggtaatctggggcgcgaattgagtctgcccgccgccagcttaacgcttgtcgacaaactggcgattatggagcaatacgtcgggaaacaggttatcgacgccattgtggttggcccgaaagtggatgcctcagcggtgacgggccggattgtgattcaggaagtgctggaagccagcgatattccgtatcgccatgaccgacagctgctgcataacgcgctggagaaagcgatacaggcgttggggtaa

SEQ ID NO: 74000 - DNA, 1023 bp, Citrobacter koseri
atgactccgcctcccgtatttggaaaggtgtacatggcctcacaacttaccgatgctttcgcacgtaagttttattacttacgtctgtcgattactgatgtgtgtaactttcgttgcacatactgcctgccggatggctacaagcctggcggtgtcaccaataacggctttctgaccgtcgatgaaattcgccgtgtgacgcgcgcgtttgccagtctgggcaccgaaaaagtgcgccttaccggcggtgaaccgtcgctgcgtcgcgactttaccgacatcattgccgccgtgcgtgaaaacgacgcgattcgccagattgcggtgaccactaatgggtatcgtctggcgcgtgatgcggcgaactggcgcgacgcgggtctgacgggcatcaacgtcagcgtcgatagcctcgacgcccgtcagtttcacgccattaccgggcaggataaattccagcaggtgatggcgggtattgacgccgcgtttgacgccggtttcgcaaaggtcaaagtgaacaccgtgttgatgcgcgatgtgaaccatcatcaactggacacctttctcgcctggattcaggcacgccccattcaactgcgcttcattgaactgatggagacgggagaggggagcgaactctttcgtaaacaccatatttctggacaggtgctgcgtgatgaactgctgcgtcgcggttggattcatcagctgcgccagcgcagcgacggcccggcgcaggttttttgtcatcctgactatgccggtgaaatcggtctcatcatgccgtatgaaaaagatttctgcgccacctgcaaccgtctgcgcgtttcctcggtcggtaagctccatctttgcctgtttggcgaaggcggcgtgagcctgcgcgacctgctggaagacgatgcacagcaacatgcgctggaagaacgcatttcagccgcgctgctggagaaaaagcagacccacttcctgcaccagaacaataccggtattacgcaaaatctatcgtacataggcggttaa

SEQ ID NO: 74001 - DNA, 513 bp, Citrobacter koseri
atgagtcaggtaagcgctgagtttatccctacccgcattgctattcttacggtttccagtcgtcgcggcgaagaagacgacacttccggtcattttctgcgcgacgccgcgctggaagcagggcatcaggtcgtggacaaagccatcgttaaagagaaccgctacgccattcgcgcgcaggtttccgcgtggatcgccagcgatgacgttcaggtggtgctcatcaccggcggtaccgggctgaccgatggcgatcaggcgccggaagcgttactgccgctctttgatcgcgaagtcgaagggtttggcgaagtgttccgcatgttgtcgtttgaagagattggcacatcgaccctgcaatctcgcgcggtggccggcgttgccaacaagacgctgatttttgcgatgccgggctccacaaaagcgtgccgcaccgcctgggacaacatcatcgcgccgcagcttgatgctcgcacacgcccgtgtaacttccacccacatttgaagaaataa

SEQ ID NO: 74002 - DNA, 486 bp, Citrobacter koseri
atgtcgcaactgacccatattaatgccgctggcgaagcgcacatggtggatgtctccgccaaagcggaaaccgtacgtgaggcgcgcgccgaagcgtttgtgacgatgcgcagtgaaacgctggcgatgattatcgacggtagccaccataagggcgatgttttcgcgaccgcgcgtatcgccggtattcaggcggctaaacgtacctgggagctgatcccgctgtgccacccgctgttgttgagtaaggtcgaagtgcaattgcaggcggaacctgaacacaaccgggtacgcattgaatcgttgtgtcgcttgacggggaaaaccggcgtggagatggaagcgctgactgccgcttccgtggcggcattgacgatctacgacatgtgcaaagcggtgcaaaaggatatggtgattggcccggtgcgcttgctggcgaaaagcggcggtaagtctggcgattttaaggtggatacgcatgattaa

SEQ ID NO: 74003 - DNA, 246 bp, Citrobacter koseri
atgattaaggttctgtttttcgctcaggtgcgtgaactggtgggaacggatgcgttagaggtcgccgccgatttcccaaccgtagaagcgctgcgtcagcatctggcggcgcaaagcgatcgctgggcgctggcgctggaagacggcaagctgctggccgccgtcaatcagacgctggtcagttttgaacatccgctgacggcgggtgatgaagtggcctttttcccaccggtgacaggaggctga

SEQ ID NO: 74004 - DNA, 453 bp, Citrobacter koseri
atggctgaaacgcgagtgatcgttggccatgcgccgttcagcgtcggggaggagtacccctggctggcggagcgtgatgaagatggcgcggttgtgacctttaccggtaaagtccgcaatcataatctgggcgacagcgttaaagcgctgacgctggaacattacccggggatgacggaaaaagcgctggcggatatcgtggacgaggcgcgctcgcgctggccgctggggcgcgtgacggtgatccatcgcattggtgaactgtggccgggcgatgagattgtctttgtcggcgtaaccagcgcgcaccgcagcagcgcgttcgaggccgggcaattcattatggattatctgaaaacccgcgcgccgttctggaagcgtgaagcgacgccggaaggcgagcgctgggtggaagcgcgcgatagcgatcggcaggcggcaaaacgctggtag

SEQ ID NO: 74005 - DNA, 705 bp, Citrobacter koseri
atggaccgattcccacgatccgattctatcgtacagacccgttccggcctgcaaacgtatatggcgcaggtatatggctggatgacggttgggctgctgctgaccgcatttatcgcctggtatgcggcgaatacgcctgcggtgatgatgtttgtcttttccagcaaaatcaccttctttggcttgattatcgcccagcttgcgctggttattgcgctgtcggcaatggtgcaaaaacttagcgccgggatggcgaccacgctgtttatgctctattcggcgctgacgggcctgacgctgtcgagcatttttatcgtttatacctattcgtctatcgccagcacgtttgtcgtgaccggcgggatgtttggcgtgatgagcctgtatggctacaccacgaaacgcgatctcagcggctggggcagcatgctgtttatggcgctgattggtatcattctggcatcgttggtcaacttctggctcaaaagcgaagcgttgatgtgggcggtgacctatatcggggtggttgtctttgttggcctgaccgcctatgacacgcagaagctgaaaaacattggcgagcagattgatgttcgtgacagctcgacgctgcggaaatactcgattctcggcgcgttaacgctgtatctggacttcatcaacctgttcctgatgctgctgcgtattttcggtaatcgccgttaa

SEQ ID NO: 74006 - DNA, 963 bp, Citrobacter koseri
atgtcaacatcacacccgcgatggcggctggcgaaaaagatcctcacctggctgttttttattgcggtgattgtcctgctggtcatttatgccagaaaggtcaactgggaagatgtctggacggtgatccgggattacaaccggattgcgctgttgagcgcggttgggctggtgattgtcagctaccttctttacggttgctacgatctgctgggacgtttttactgcggccacaagctggcgaagcggcaggtcatgctggtgtcgtttatctgttacgccttcaatctgacgttaagcacctgggtcggcggaatcggtatgcgctaccgtctgtactcccgcctcggcttaccggggagcaccatcacgcgtattttttcgctgagcattaccaccaactggctgggctatattctgctgggcggaattatttttactttcggcgtcgtgcaactcccggcccactggtatatcgatgaaaatacgctgcgcattctcggtattgtgttgttactggtgattgccgtctacctgtggttttgcgcctttgcgaaacggcgtcatatcacgattaaaggccaaaagctgatgcttccgtcatggaaattcgccctcgcgcagatggggatttccagcgctaactggatggtgatgggcgccattatctggctgctgatggggcaagacgttaattatttctttgtacttggcgtgctgctggtgagcagtattgccggagtgatcgtgcatatcccggccgggatcggcgttctggaagccgtgtttatggcgctgctggcgggtgagcatacgtcgcaaggcaccattatcgccgccctgctcgcctggcgtgtgctctattattttattccgctattgctggcgttgatttgctatctgctgctggaaagtcgggcaaagaagctgcgggcgaaaaacgagaaagccttagcgaagtga

SEQ ID NO: 74007 - DNA, 1242 bp, Citrobacter koseri
atgaaatgtggatggcgtgaaggcaatcagattcagctactggaaaacggcgaccagttctatcccgccgtgtttgacgccatcgcgcaggcacagcagaggatcatcctggaaaccttcatctggtttgaagatgacgtaggtaagcagctacacgcggcgctgcttaaagcggccagacgcggcgtaaaagcggaagtgctgttagacggctacggctcacccgacctcagcgaggcgtttgtcggggaactgaccgcagcggggataatcttccgctattacgatccgcgtcctcccctgttcggcatgcgcaccaacctctttcgccgtatgcaccgtaaaatcgtggttattgacgatcgggtcgcgtttgtcggcgggctgaattactccgcagaacatatgtccgattacggcccggaagccaaacaggattacgccgttcgcgtcgaagggccggtcgtggaggatattttgcagtttgagctggaaaacctgccggggcaaagcgccgcgcgccgctggtggcgacgccatcatcgcgccgaagaaaaccggaaacccggcgaagcgcaggtgctgtttatctggcgcgataatgatgaacatcgcaacgatattgaacgtcactatctgaagatgcttacgcaggcgaaacgtgaagtgattatcgccaatgcctatttctttcccggctatcgcctgctgcatgccatgcgcaaagccgcccgacgcggcgtgcgggtaaaactggtgatccagggggaacccgatatgcccatcgtcaaagtcggcgcgcgtctgctgtacaactatctggtgaaaggcggcgtccatgtctatgaatatcgccgtcgcccgctgcacggcaaagtggcgttgatggacgatcactgggcgaccgtcggctccagcaacctcgatccgctcagtctgtcgcttaaccttgaagcaaacgtcattattcatgaccgcacgtttaaccagacgctgcgcgacaacctgaacgccattatcgccaatgattgcaagcaggtggacgagtctatgctgccgaagcgcacctggtggaatctgagcaaaagcgtgctggcgttccacttcctgcgtcacttcccggcgctggtcggttggctgccggcgcacacgccgcatctggcgcaggttgaaccgcccgctcaaccgacgatggaaacgcaggatcgggtcgaagcggaaaacacgggagtgaagccctga

SEQ ID NO: 74008 - DNA, 762 bp, Citrobacter koseri
atgatccaacaaacgcgaaatttttcattcaaagtgctcacaattaacacgcataagggttttaccgcctttaataagcgctttattctgccggagctgcgcgacgcagtcagaaccgtcagcgcggatattgtctgcctccaggaagtgatgggcgcgcatgaagttcatccactgcacgtcgagaactggcctgataccacccattacgaatttcttgccgacaccatgtggagcgatttcgcctatggtcgtaatgccgtctacccggaagggcatcacggcaacgcggtactgtcgcgctatccgattgaacactatgaaaatcgcgatgtctccgtcggcggcagtgaaaaacgtggcgtgctgtattgccgtattgttccgccgatgctggctcagccaattcatgtgatgtgcgtgcatctcggcttacgggaaggccaccgccaggcgcagctggatatgctggttgaatgggttaacgcccttcccgaatccgaacccgtggtggtcgccggggatttcaacgactggcggcagaaagccaactatccgttaaaagcgtctgcggggctggaggagattttcacccgcgcgcatggccgcccggcgcgcacctttccggtcaggttgccgatactgcgactcgatcgtatatacgtcaagaatgccaatgccagctctcctgcggcgttgccgttgcgtaactggcgacatttatctgaccatgcccctcttagcgcggagatacatctatga

SEQ ID NO: 74009 - DNA, 411 bp, Citrobacter koseri
atgaggtggcaacaacgtgttcgtgtcgcaacgggtcttagttgctggcagattatgttgcatttactggtagtggcgctgctggtaatgggctggatgagcggcgctttagtccgcgtcggcctgggattatgcgtgctttatggcgtgacggtgctgctgatgctggcgttacaacgccaccacgaacagcgctggcgcgacgttgcggatgtgctggaagagctgacgaccacctggtatttcggcgccgcgatgattgctctgtggctgctgtcccgcgtactgcacaacaacctgctgctggcgctggctgggctggcgatccttgccgggcctgctgtggtttcgctgctggcgaaggagaaaaagctacatcactttgcgtctaaacatcgcatacgccgctga

SEQ ID NO: 74010 - DNA, 1107 bp, Citrobacter koseri
atgtttcatcgcctgtggacattaatccgcaaagagctgcaatcgctgttacgcgagccgcagacccgcgcgatcctgatcttaccggtgctgatccaggtgctgctgtttccctttgccgccacgctggaagtgaccaatgccaccattgccatttataacgaagataatggcaaacatgccgtcgagctgacgcaacggttcgcgcgcgccaaagcgtttacccatatcctgctgctaaaaagcccgcaggaaatccagccgacgatcgacacgcaaaaagcgttgctgctggtgcgctttccggccgacttttcccgtcacctggataacctccagcccgcgccgctacagctcattcttgatggccgtaactccaacagcgcgcaaatcgccgccaattatctccagcagatcgtcaaggattatcagcaggagctgatagagggcaaacccaagcccaacaacagtgagctggtggtgcgcaactggtacaacccgaatctggactataagtggtttgtggtgccgtccctgatcgccatgatcaccacgataggcgtcatgatcgtcacctcgctctccgttgcccgcgagcgtgaacagggtacgctggatcaactgctggtttcccctctcaccacctggcaaattttcatcggtaaagcggtgcccgcgctgattgtcgccacttttcaggccacgatcgtactggctattggcatctgggcgtaccacatcccctttgccggttcgctggcgctgttctacttcacaatggtgatttacgggctgtcgctggttggatttggcttgttaatctcgtcgctctgctccacccaacagcaggctttcatcggcgtattcgtctttatgatgccagctatcctgctatcgggatacgtttctccggtcgagaacatgccggtatggctacaaaatctgacgtggataaaccctatccgccattttacggacatcaccaagcagatttatttgaaagatgcgagtctgaagatcgtctgggggagtttgtggccgctactggtgatcacggccacaacggggtcagcggcgtatgcgatgtttagacgcaaagtgatgtag

SEQ ID NO: 74011 - DNA, 1134 bp, Citrobacter koseri
atgagtaacgccctgctctcctggcggcgcgtacgcgcgctgtgcgtgaaagagacgcgtcagattatccgcgatcccagtagctggctgatcgccgtggtgatcccgctgctgttgctgtttatttttggctacgggattaacctcgactccagcaagctgcgggtcggcattctgctcgaacaacagagcgaggaggcgctggatttcacccacgctatgaccggttcgccgtatatcgacgccaccatcagcgatagccgccatgagcttattgagaaaatgcaggccgggcgcattcgcgggctggtggtgatcccggtcgattttgcgcaaaagatggcgcgagagaatgacaccgcgccgatacaggttatcaccgacggcagcgaaccgaacaccgccaacttcgtgcagggttacgtggagggggtctggcagatctggcaaatgcagcgggctgaagatcgtggggaagaatttgaaccgctgatcgacgtgcagacccgctactggtttaacccggcggccatcagccagcactttatcattcccggcgcggtcaccattatcatgacggtgattggcgccattctcacttcgctggtggttgcacgagagtgggagcgcgggacgatggaggccctgctctcgaccgaggtgacgcgcgcagagttgttgctgtgcaaactgatcccctactacttcctcggcatgctggcgatgctgctgtgtatgctggtgtcggtgtttattcttggcgtgccctggcgcggctcgctggtgattctgtttcttatcaccagcctgtttctgctcagtacgctgggaatgggactgctgatttccaccattacccgtaaccagtttaacgccgcgcaggtcgcgctgaacgccgcttttttaccgtcaattatgctgtcaggctttattttccagatagatagtatgcctgccgtcatccgcgcggtgacttacattattccggcgcgttatttcgtcagcactctgcaaagcctgtttctggcggggaacatccccattgtgttgatcgttaatacgttatttttaatcgcttcggcagccatgtttatcggcctgacgtggatgaagaccaaacgccggttggattaa

SEQ ID NO: 74012 - DNA, 1737 bp, Citrobacter koseri
atgaatgacgccgtcattacgttaaacggcctggtgaagcgcttcgccggaatggaaaaaccggcggtcgccccactcgactgtacgatccacgccggttatgtcacgggtctggtcgggccggatggcgcaggcaaaaccacgctgatgcggatgctggcagggctgctcaagcccgatagcggcagcgcgtcggtgatcgggttcgatccgatcaaaaacgacagtgaattgcatgcggtacttggttacatgccgcaaaaatttggtctgtatgaagatctgaccgtgatggagaatctcaatctctatgcggacttacgcagcgtaacgggcgaggagcggcaaaaaacgtttgcccgcctgctggaatttaccgccctcggccccttcaccaaacggctggcaggcaagctctcgggcgggatgaaacaaaaactcgggctggcctgtacgctggtcggcgagccgaaagtgctgctgcttgacgaaccgggcgtcggcgttgaccccatctcccgtcgcgagctgtggcaaatggtgcatgaactggcgggtgacggcatgcttatcctgtggagtacgtcatacctggacgaagccgaacagtgtcgcgacgtgctgctgatgaacgaaggagagctgctgtatcagggcgaaccgactaagctgacgcagaccatggcaggacgcagtttcttaatgagcagcccgcaggagaataaccgtaagctcctgcaacgcgcgttgaaactgccgcaggtcagcgacggtatgattcaggggaaatcggtacggctgatcctgaaaaaagaggctaccgcagaggatatccgccgggccgaagggatgccggagataacgattaacgacaccacgccgcgctttgaagatgcctttatcgacctgcttggcggcgcgggtacatcggagtctccgctcggcgcgatcctgcataccgttgacggcacgccgggtgagacggtcattgaggccaaagaactgaccaaaaaattcggtgacttcgccgccaccgaccacgttaacttcgccgttgagcgcggagaaatcttcggtctgctcggccccaacggcgcggggaaatccaccacgttcaagatgatgtgcggtttgctggtgccaacttccggcaaagcgctggtgctggatatggatttgaaagtcagctccggcaaggcgcgccagcatttagggtatatggcgcaaaaattttccctgtacggcaacctgacggtagagcaaaacctgcgttttttctccggggtttatggcctgcgaggccgggcgcaaaacgaaaaaatcacccgcatgagcgaagccttcggcctgaaaagcatcgcctctcatgcgacggatgcgctgccgctcggttttaaacagcgtctggcgctggcctgttcgctgatgcatgaacccgacattctgtttctcgacgaacccacctccggcgtcgatcccctcacccgccgtgagttctggctgcacatcaacagcatggtagaaaaaggggtcacggtgatggtcaccacccactttatggacgaagcggaatactgcgaccgtatcgggctggtttatcgcggcaagctgatcgccagcgggacgccggacgatctgaaagcgcaggcggcagacgacgacacgccggacccgacgatggagcaggcctttatcacgctcattcacgactgggataaggagcatgctcatgagtaa

SEQ ID NO: 74013 - DNA, 996 bp, Citrobacter koseri
atgaaaaaacctgtcgttatcgcactggctgtcgcggcgctggccgccgtgcttgccggtggtacatggtggtatcagagtcggcaggataacgggctgacgctctacggcaatgtggatattcgcaccgtcaatatgagttttcgcgtcggaggccggctggcttcgctggccgttgacgaaggcgacgccattacgtccgggcaggtattgggcctgctggataaagccccgtacgagaacgcgttgatgcaggctaaagcaggcgtctccgtcgcccaggcgcagtatgatctgatgctcgcggggtatcgcgatgaagagatagcccaggctgctgctgccgtgaaacaggcgcaggccgcatttgactatgcgcagaacttttatcagcgccagcagggattgtggaaaagccgcacgatttccgccaacgacctggagaacgcccgctcatcccgcgatcaggcgcaggcgcagctgaaatccgcacaggacaaattgagccagtaccgtaccggtaaccgccagcaggatatcgcccaggcaaaagccagcctcgaacaggcgcaggcgcagctggcgcaatcagaactcgatttacaggatacaacgctgatcgccccctctgacggtacgctgttaacccgcgcggtagagcccggcagtatgctcaacgcaggcagcaccgtgctgacgctgtcgctgactcgtccggtatgggttcgcgcctacgtggatgaacgcaacctcagccaggcgcagcccggccgcgaaattttactctacaccgatggccgccctgacaagccttaccacggcaaaatcggcttcgtatcgccgaccgctgaattcaccccgaaaaccgttgaaacgccggatctgcgcacagacctggtctatcgactgcgcattgtggtgactgacgcggacgatgcgctgcgccagggaatgccggtgacgctgacgttcagcgacgaggcgcggcatgaatga

SEQ ID NO: 74014 - DNA, 678 bp, Citrobacter koseri
atgaataccccaaccatgacgacgaaaggcgaacaggccaaaagccagcttatcgccgctgcgctggcgcagtttggcgaatacggcctccatgccaccacgcgcgacattgccgcccaggccggacaaaatatcgccgccatcacttactattttggctccaaagaggatttatacctcgcctgcgctcagtggatagccgatttcatcggcgcccagtttcgccctcatgccgaggaagcggaacgactgttcgcccagccgcagcccgatcgcgccgcaatgcgcgagctgatcctgcgcgcctgcaaaaatatgatcatgctgttgacccaggacgacacggttaacctgagcaaatttatttcgcgcgagcagctctccccgacggcggcttaccaacgggtgcacgatcaggttctcaacccccttcacacgcatctgacgcgcctgattgcggggtataccggccgcgatccgggagatacgcaaaccattctccacactcacgcgctgctgggcgaagtgctggccttccgcctggggaaagaaaccattttgctgcgtaccggctggtcaacgtttgatgaagagaaaacagaacagatttaccagacgatcacctgtcatatcgatctcattctgcaaggcttaacgcaaaggagtcaggagcaatga

SEQ ID NO: 74015 - DNA, 1359 bp, Citrobacter koseri
atgtcttttgattcccttgggttgaatcctgatattttgcgcgcgattgccgagcagggttaccgtgaacctacccctattcagcagcaggcgatccctgcggtgctggaaggccgcgacctgatggccagcgcccagacggggacgggtaaaacagccggttttacgctgccgctgttacaacatctgatcacgcagcagccgcacgcgaagggccgtcgcccggtacgcgcgttgattctgacgccgacccgtgagctggcggcgcaaattggcgagaacgtccgggattacagtaaatacctgaacattcgctctctggtcgtgtttggcggcgtcagcattaacccgcagatgatgaaactgcgcggcggcgttgacgtgctggtggcaacgccggggcgtttgctcgacctggaacatcaaaacgcggtgaagctggatcagattgagattctggtgctggatgaagctgaccgtatgctcgacatgggctttatccacgatattcgccgcgtgctggcaaaactgccgccgaagcgccagaacctgctgttctccgccacattctccgatgacattaaagcgcttgctgaaaagctgttgcataacccgctggaaattgaagtggcgcgccgtaataccgcttctgagcaggtgacccagcacgttcatttcgtggataaaaaacgcaagcgcgaactgttgtcgcagatgattggcaaaggcaactggcagcaggtgctggtctttacccgtaccaaacacggcgccaaccatctggcggaacagctgaataaagacggcattcgcagtgcggcgatccacggtaataaatctcagggcgcgcgtacccgcgcactggctgatttcaaatccggcgatatccgcgtcctggtggcgaccgacatcgcggcgcgcgggctggatatcgaagagctgccgcatgtggtgaactatgagctgccaaacgtcccggaagattacgtccaccgtatcggccgtaccggtcgtgccgccgcgaccggcgaagcgttatcgctggtctgcgttgatgaacacaaactgctgcgcgatatcgagaagctgctgaaaaaagagatcccgcgcatcaccacgccgggttatgaaccagacccgtcaattaaagcggagccgattcagaacggtcgccagcagcagcgtggcggcggtagtcgcggccgaggtcagggacagggacagggcggagcaggccgtgcccagcaaccgcgtcgcaatgatggcggggcgccgaaagccaaaccgcgcagcggagaaggtaagccaggcggcgataaaccgcgtccgccgcgccgcccgcgcagactggcggattaa

SEQ ID NO: 74016 - DNA, 2178 bp, Citrobacter koseri
atggcattgaccgctgcgcttaaagcgcaaatcgccgcctggtataaggcgcttcaggagcagatccccgactttatcccccgtgcgccgcagcggcagatgattgccgatgtcgccaaaacgctggcgggtgaagaagggcgtcatctggcgattgaggcgccgaccggggtcgggaaaaccctctcttaccttattcccggtatcgccatcgcccgcgaagaacaaaaaacgctggtggtgagcaccgccaacgtggcgttgcaggatcagatctacagcaaagatctcccgctgctgcgcaaaatcattcctgacttgcggtttaccgccgcgtttggtcgtgggcgctacgtttgcccgcgtaatctggcggcgctggccagcagcgaaccgaatcaacaggatctgctcgcgtttctggatgacgaactgacgccgaataatcaggaagagcaaaagcgctgcgccaggctaaagggagatcttgacagctacaagtgggacgggttgcgcgatcataccgatatcgccattgacgacgcgctctggaagcgcctgagcaccgataaagccagctgcctgaaccgcaattgccattactaccgcgaatgccctttttttgtcgcccgacgggaaatccaggaagctgaagtggtggtggcgaaccatgcgctggtgatggcggcgatggagagcgaagcggtgctgccggagccgaaaaatcttctgctggtgctggacgaaggccaccatctgccgaatgtcgcgcgcgacgcgctggagatgagcgctgagatctccgccccctggtatcgcctgcaactggatctgttcactaagctggtggcgacctgcctggaacagttccgcccgaaaaccacgccgccgctggcgaatcctgagcgcctgaatgcgcattgcgaagagttgtacgagctgattgcctcgctcaacaacatcctgaatctgtatatgcccgcgacgcaggacgctgagcaccgctttgcgatgggcgagttaccggatgagatcatggcgatctgccagcggctggcgaagctgacggaaatgctgcgtgggctggcggagctgttccttaacgatctcagcgagaaaaccggctcgcacgatattgtgcgcctgcaccgggtgattttgcagatgaaccgcgcgctgggcatgtttgaggcgcaaagcaagctctggcggctggcgtcgctggcgcagtcttccggtgcgccggtctcgaagtgggccacgcgggaggcgcgtgatgggcagatacacgtctggttccactgtgtgggcattcgcgtcagcgatcagcttgaaaggctgctctggcgcagcgtgccgcatattattgtaacgtcggcgaccctgcgttcgcttaacagcttctcgcgcttgcaggagatgagcggcctgaaggagaaagcgggcgatcgctttgtggcgctggattccccctttaatcatgtggagcagggtaaaattgtcattccgcagatgcgctatgaaccgttgattgataacgaagagcagcatattgcggagatggcggcctatttccgtcaggcgctggaaagcaaaaaacaccacggcatgttggttttgtttgccagcggacgggcgatgcagcgctttctggagcatgtgaccgatttgcgtcttttgctgctggttcagggcgatcagccgcgctatcgcctggtggaactgcaccgtaagcgggtggcgaacggcgagcgcagcgtgctgattggcctgcaatcttttgccgaggggttggatctgaaaggcgacctgctgactcaggtacatattcacaagattgcgtttcctcccatcgacagcccggtggtgatcaccgaaggtgagtggctgaaaagcctgaatcgctacccgtttgaagtgcagagcctgccaagcgcgtcgtttaacttgatccagcaggtgggccgtttgattcgtagccacggctgctggggagaggtggtgatttacgacaagcgtctgttaaccaaaagctacgggcaacgtttgctgaatgcgctcccggtatttccgattgaacgcccggaagtgccggaggtaaaaaaacgcccgacaaaagtggttgccgggcgtaaaaaaagcatccgtgcgaaggggcgctctcctactgataggtaa

SEQ ID NO: 74017 - DNA, 513 bp, Citrobacter koseri
gtgatcgcaatgaaaaaaatggttttcttactcaccgcaggtctgatgacgtatgcctgcgcagatgatatccaggtgcaaatggtgggtaacatctatgccaacacctgctccgtggacagcgccagtaaagatttaaccgtcgatttagggcaggcgtcatcgagtgatttcaaagacgtaggcgataccggcgaatggaaagcgttttccctgaaagtaacgcattgcccaaaaacactcacgctggccaacgcgtttttttacggacaggccgatagcgtacacccgaccaaatttgccaacagcggcagcgcgaaagggcttgcgctggagctggccgatcggcaggacaatattctcatcgccccgcaggcaagctttaacgtgctgatcaaccaaagcgatcacacggccactttcccgttagccgcccgctattacgccacgtccatgcccgtcagcgcgggctcgttcgatagcgttatacaggtcacgtttacctatcagtag

SEQ ID NO: 74018 - DNA, 990 bp, Citrobacter koseri
atgcaaatgattaaacagtgttttttcctcctgattttggccagcgcagccttgtttatgccgcatgcaaaggcggcctgcacaacgccggatatgcccaaaatgatcaacgtggcatctgtttccgtaccgacgacgctggcgattggtgagaccattccaggaacagagcaaaccgtacacgttgccggacagtgcgatcaaagtattgatagcggtctggaaattgtctcctgctattacggaacaggcgctgagataccaggcctgagaggggtgtacgactccggggtgcccggcgttggcatcgcgctgatgaacgagcaaggccagcggatcagcggcgcaggcggcgtacagtgcgattcacgcggcacgccgatcggttatgtatccagcgatgggcagcagtcatttaacttcaacgtcacgcttgagctggtgaaaaccggcagtgacgtgacctccggtacactggtgcaggcgcaaacagagtttgggattggcgtgtttggtcacgaaggtatcgggagtcctaaccacattgcctatgccggcaatgtggatctcgaaaccgtaacctgctccgtgttaccgaaaaacctgaccgtcaatctgggcgactttccgatcagtgattttatgggagtaggcaccctctcgatgccagcacagaattttaacgttacggtcaattgtaattccaccgtacagcctgaagtgaagatcaccagtgcgaatggctacgaatcgggttttgccggcgtgatgaaactgactcagcaaagcgggatggcgaccggcgtcggcgtcagaatgctgtttgatggcaatatcgccaccttcgacaactacgtcaacacgcaaagcgaggcaaaagccaacgaaacgctggatattccgttccaggtccgctatgagcaaatcagcgacgacgttacgccaggcccggcaaataccgtcgccacgattacgctggcctataagtga

SEQ ID NO: 74019 - DNA, 2544 bp, Citrobacter koseri
atgtaccgcgataaaaagccgttttcctgcaaattattcacactgctgcccctgttatgtggcctggcagtgttctgttttgcgcagcaaacgcgggcagatgattattttaacccggcgctcctggatattgataatccccgacaggaaaaaaccgatttatcggtatatgaaaaaggtccaggacaagcaccaggaaaataccaggtatcaatctttattgataataataaagtcgacacccgcgatgtcacatttaaattacagaaagatgttaagggcaaccgttcactccagccctgtttcagcctggatgatttaaagagtctcggcattaaaacgaaggcgtttccgaagctcatggcacaaggaaaatgcgcagatttaagcgccattcccgccgcctccgccacgtttcgcgtgcgcaaccagcagctattgctcagtattccccagtcagcgctgggccagattccgcgcggttatatcgacccaaaaacgttcgatgaaggcattaccgccggtctactgaactacagcgccaacgccagtcagagcaacgcccgccggcagggtgaacaggataacagcagccagtatgtcaacctgcatcccgggttcaacatcggcgcctggcgcgtgcgcaattactcaacctggaatcgtaacgtcacgggccatgacgaacagcagaaattctcgtcggtttatacctacgcgcagcgcgatatcgtggcgatgaaaagcgatctcacggtagggcaaagcacctctccggcggacgtgttcgacagcgtgccttataccggcatacaactcaattccgacagcgacatgctgccggatagcgaaaaaggctatgcgccgattatccgtggcaccgcacacagtaacgccctggtgatggttcgtcagaacggctacgtcatttatcagaacaccgtagcgccaggcgcatttgaaattaacgatctctacccgacgggcagcagcggcgacttgcaggtcaccgtcaaagagacggacggcagcgaaagccatttcgtggtgccctacgcctccgtacccgtgttgcagcgtgaaaaaaacctgcgctatagcgtaactgccggtcgctatcgcgcctatgacaaagacgtcgagcaaactccatttgctcaggggagcgcaatctatggcctaccttatggttttaccgcctatggcggcgtacagcaaagccgccattaccagtcgcaggcgatcggcaccgggaaaaacctgggggatttaggcgcgttttctgtcgacgtcacgcgggccaaagcattgctgaaacagcagcaggccagcacggggcagtcatggcgcgtgcgttacagcaaagattttgcaggcgcaggcaccaacttttccctggccgggtatcgctataacagtaagggtttttacaccctggaagacacaatggagtcctatacccgcgccagcgactggtccgccccgcagcagcgccgagcgcgtaccgaagccactgtcgatcagacgctcggcgagagctgggggtcttttacgctgagtctggtcaaagagacctactggagccagcgccaggatatgacctccatgagcctcagctacaacaacagctggcatggcgtgagctatagcctgagttacagcatgaacaaaaacaccagcgacagcgatgaaaacggtgagtccgttacccatgacaaccagtttgcgctgagcgtttcggttccactcgaccactggatgcacaacacctgggcgacgtacaacctgaacaacagtcaagacggcgccacgcaaaacattggccttaacggtaccgctctggccgaagacaacctgaactggaatatccaggaaagcgtgagcaataccggaagcggcaactcaaccagtatgaatgccgattacaaaggaacctatggcgaagtgagcggcggcgtcagccaggacagccatcaacggagcgttaatatgggtctgcaaggcggcgttgtggcgcacgccaacggcatcactctgacgcaaccgctcggtgaaaccatcgcgctggtgaaagcaccgggagcacatggcacacacattaccaatcagaccggcgtcaaaaccgattttcgcggctataccgttgtgccatttgtatcagcctaccgccacaacacgattgccctggacacagaaacactgccagacgatgccgacgtaacccatgccgcgcgaatagtaaccccaacgcgcggcgcggtagtccgcgccagttttaacacccgcgtgggcagcagggttttaatgatgctcacgcaaaacggtaagccgttgccctttggcgcaaccgtcaccaccgacgataaagacagcgagtttattgttggcaacggcggtcagacttatctctccggtttacctcagcacggaacgctcttcgtgtcgtggggtcaggatgccagcgaacactgcgtcgcagagtacacgctaacggatgagagacataaaaccagcatcattaacgctgccgcgcagtgtcattga

SEQ ID NO: 74020 - DNA, 675 bp, Citrobacter koseri
atgcgtcacggttatttactgagcactctttttctggtagcagcgacagcgcatgctggcgttattattaacggcacccgtcttgtttaccagggagacaaaaaggaatcctcgcttggtctttcaaacccagattcaacggactatctggtacaatcctgggtcgattccggcagtaaaaatccgggcaacaccccctttctgattacgccgccgctgtttcgcctgaatgcgaaagaagacaacgttctgcgggttattcgcacaggcggcaatctgcctgaggatcgtgaatcgctgtactggctgaatatcaaggctattccatcttcaaaacacgttgagggggtaaataccctgcaaatcgcgatcaacacgcgtattaaattattgtatcgcccatcctccgtgaaaggtaagccagaagaggttgctgacaaactggaatggcatcgtgaaggtcacgatctggtcgtcaataacccgacgccgttttatatgaatttccagagcgtgatgattaatggtcataaaatcagtaaagcgacctgggcagtacctgaaacggcaacccacatggctctgcccgccaatactgacggtgacaccgtgacctattccattattactgattacggcagcatcagccgaacctggtctaagcctgtccattaa

SEQ ID NO: 74021 - DNA, 537 bp, Citrobacter koseri
atgaacaaggttgctttaggtttattcatcgctgcaacagtaggatgttccgcatccgcatttgcggcaacaaatggcgaaggtcagattaactttacgggtgaaatcattgactccgcttgtcaggtcgttaatgggttaagtaacccgctaaatgtcgagttgggcagagtgtctaaaaccgtattttctggcgcaggctctaccagcacaccaacgaaattcgatattcagctaaaagactgcccggaaacggtgacctctgccgccattaattttggcggtacgccggatacggataacagcacgaccctggcattaacgccagacacggagacggctaccggtgtggcaattcagttgctcgactcgtcagagcaacccgtcagcttatataccccttcccgtcaatatccactgacggcaggaagcacggtaaacgatctggaatttgcagcgcgttatattcagactcaggctgccgttacggccggcccggcaaattccgtatctacctttaccgttatctataactga

SEQ ID NO: 74022 - DNA, 969 bp, Citrobacter koseri
atggattatcgcaaaatcatcaaagaggtcggtcgaggtaaaaatcacgcccgcgacctggatcaggataccgcgcgcggcctgtatacccatatgttgaatggcgatgtgcccgaactggaaatgggcggcgtgttgatcgcgttgcgtattaaaggggaaggcgaagcggagatgctgggcttttatgaagccatgcaaaaccacacgattacgcttacgccaccggtcgccaaaccgatgccgattgtcatccccagctacaacggggcgcgcaaacaggcgaacctgacgccgttgctggcgattctgctgcataaactgggctttccggtggtggtacatggcgtaagcgaagatccgacgcgcgtactgacggagaccattttcgaactgatggggattgcgccgacgctgcacgccggtcaggctcaggcgaagctggatggacacgagccggtgtttattcctgttggtacgctgtgcccgccgctggaaaaacagctggcaatgcgctggcggctgggcgtgcgtaacagcgcgcacacgctggcgaagttagcgacgccgtttgcggaagatgccgccttgcggttgtccagcgtctcgcacccggagtacgttccgcgcgtcgcgaaattttttgccgacatcggcgggcgcggtttgctgatgcacggcacggagggggaggtgtatgccaatccacagcgttgcccgcaaatcagcctgatcgaccgttccggcgtgcaggtgcttcaggatcgccagagcgagatgcccgacgagccggtgccgctgcctgcggcaaaagacccggaaaccaccgcccgctggattgagcgctgcctggcgggaagcgagccgataccggcttccctgaaaattcagatggcgtgctgcctggtggctacgggagaagcggcgacgttaacggaagggcttgcgcgggtagcgcagcatttttaa

SEQ ID NO: 74023 - DNA, 261 bp, Citrobacter koseri
atgaaaaatatcaaatatgctgttgctgctatcgctctgtctaccctgtcatttggcgttttcgctgccgagccggtaacggcttcccaggcgcaaagcatgaataaaatcggtgttgtttctgcggaaggcgccaccactctggatggcctggaagcgaaactggctgagaaagcggcagctgccggcgcaaccggttatagcatcacttccgcaaccaacaacaacaaaatgagcggcactgctgttatctacaaataa

SEQ ID NO: 74024 - DNA, 267 bp, Citrobacter koseri
atggcatccgggtgggcgaacgacgacgccgttaatgaacaaatcaacaataccattgaagatgctgtcgcccgcgctcgcggcgaaattcctcaaggcgaaagcctgtatgagtgtgaagagtgcggcgatcctatcccggaagcgcggcgtaaagccgttccgggagtaaggctatgcattgcctgccagcaggagaaagatttacataacgcaacattctcaggatataatcgcagaggatcgaaagacagccagttacgctaa

SEQ ID NO: 74025 - DNA, 261 bp, Citrobacter koseri
atgaaaaaatgcctcaccgtactggctgctgctctgctcactggcatgagttttagtgcattcgccgcgcagccgcttagcagctcagaagcaggccagctcagacccgccgggaccgtctcagcaacgggcgcgacgacgctgagcgaacttgaaaataaactggcagaaaaagcgcgtgaacaaggcgccaaaggttttgtcgtcaattctgccggtggcgataaccaaatgtatggcactgccactatctacaaataa

SEQ ID NO: 74026 - DNA, 927 bp, Citrobacter koseri
atgtctgcccagaaaccgggattgcacccacgtaatcgccatcatcatcgttacgatctcgcgacgttatgccaggtcacgccagaactggcgcaatttcttacccgtacgcctgcgggtgagcaaagcgttgatttcgcgaatcctctggcagtcaaggcgctcaataaagcgctgctggcgtatttctatcaggtggcaaactgggatattcccgaaggctttctgtgcccgccggtgccaggccgcgccgattatattcaccatctggcggatctgctgggcgaaaccacaggcgcgattccggcggatgcgagcgtgctggatgtggggacaggagcgaactgcatttacccgcttatcggcgtgcatgaatacggctggcgctttaccggcagcgaagtccatgcgcaggcgctggccagcgcccaggcgatcatcagcggcaacccaggattaacccgatcgattcgtctgcgtcggcagaaagatcctgcggcaatcttcaacggcatcattcataagaatgaacagtatgacgccacgctgtgcaatccgccgttccacgattcggcggcttctgcccgtgcgggaagtgagcgcaaacgtcgcaatctggggcaggataaaaacgatgccctgaattttggcggccagcagcaggaactctggtgcgaaggcggggaagtggcgtttatcaaaacgatgatcgcggaaagccaggcctttggccgccaggtgatgtggttcaccacgttagtgtcgcgcggcgaaaatttgccgccgctgtaccgcgcgctgacggacgtcggggcggtaaaagtggtcaaaaaggagatggcccaggggcaaaagcagagccgctttattgcctggacctttatggatgacgatcagcgtcgccgttttatggcgcgtaagcgctaa

SEQ ID NO: 74027 - DNA, 2235 bp, Citrobacter koseri
atgcggcggatcctgttcatcctctttttactgctgggcgcccccgcgcatgcggtcgcgatccccggcgtcacaacggacgcctcaggcagtcaggaggccgcgcctgcggctgaacccgatgtcgaacaaaagaaagccgcctacgcggcgctggcggatgtgctggaaaacgagacctctcgcaaggagctcatcgaccagctacgaaaagtcgccgccacgccaccgccagagcccgtccccacgataacgccgcccacggttacggaagaaaaaacggtactggagaatgtaaccgacatcagccggcgttacggagaagccctctccgggcgctttgcccagctttatcgtaacatcaccgactcgccgcataagccgtttaacacgcagacatttaccaatgccctgacccacttcctgatgctggcagcctcggtatttgtcttttactggctgatacggctttgcgcgctgccgctgtatcgcaaaatgggtcagtgggcgcgcaaaaaaaatcgcgaccgcagcaactggctacagcttcccgcaatgattatcggcgcatttatcatcgatctgctcctgctggcgctgaccctgtttgtcgggcagatactgagcgacagaatgaacgccggcagccgaaccatcgcctttcaacaaagtctgttcctgaacgcgtttgccctgattgagtttttcaaagccattctgcgcctgatcttttgccctaacgtagcggagttgcgtccgttcacgattcaggacgccagcgcgcgctactggaatcgccgtctgagttcgctcagtagcctgatcggctatggtctgatcgtcgccgtgccgattatctccaaccaggtcaacgtccaggtcggcgcgatggcgaacgtcatcatcatgctgtgcattacgctgtgggcgctgtatctgatcttcaaaaacaaaaaagagatcacccagcatctgctgaatctcgcggaacggtcgctggcctttttcagtctgtttattcgcgccttcgcgctggtgtggcactggctggccagcgcctattttatcgtgctgtttttcttctcattgttcgacccgggcaacagcctgaagtttatgatgggcgcgacggtacgcagcctgctcattatcggtgtcgccgcgtttgtttccggcatgttctcacgctggatagccaaaaccattacgctgtcaccccctacgcagcgcaactaccctgagctgcaaaaacggctgaacggctggctgtcaaccgccctgaaagccgcgcgaatcctgacggtttgcgtggcgatcatgctgttgctcaacgcctgggggttattcgacttctggaactggctgcacaacggcgcgggagagaaaaccgtcgatattctgatccgcattgcgctgatcctctttttctctgcggtcggatggaccatcctcgccagcctgatcgagaaccgcctggcatcagatattcacggccgccccttgcccagcgcgcgtacccgaaccctgcttacgctgtttcgtaacgccctggcggtgatcatcagtacaatcacaatcatgatcgtgctgtcagagattggcgtgaacattgcccccttactggccggcgccggggcgctggggctggcgatttcgttcggttcgcaaacgctggtgaaagatattattaccggcgtattcatccagtttgaaaacgggatgaataccggcgatctggtgactatcggcccgctgaccggtacggtggagcgaatgtcgattcgctcggtaggcgtgcgtcaggataccggggcgtaccacattattccgtggtcttcgattaccaccttcgcaaactttgtgcgcggcattggttcggtcgtggctaactatgacgtggatcgccatgaagatgcggataaagccaatcaggcattgaaggacgcggtggctgaggtgatggagacggaagatattcgcgggttgattatcggagaaccgtcattctccgggatcgtcgggctgaccaataccgcttttacgctacgggtctccttcaccaccttgcccttaaaacagtggacggtacgcttcgcgctcgacagccaggtgaaaaaacatttcgatctggcaggcgttcgcgcgccggtgcaaacgtatcaggtactgcccgcaccgacgatcagtcaggcgccagcgacagaccccctgccgccgagcgaacccacgctttag

SEQ ID NO: 74028 - DNA, 723 bp, Citrobacter koseri
gtgattgaatttaaaaacgtctccaagcattttggaccaacccaggtgctgcacaatattgatctgaacatcaaacagggtgaagtggtggtcatcatcgggccatccggctccgggaagtccactctgctgcgctgcatcaacaaactggaagagatcacgtccggcgagttgattgttgatggtctgaaagtgaacgatccgaaggtggatgagcggttaatccgtcaggaagccggcatggtgttccagcagttctatctcttcccgcatctgacggcgctggaaaacgtcatgttcgggccgctgcgcgtgcgcggcgcgaagaaagaagatgccgaaaagcaggccaaagagttattagcgaaagtcgggctggcagagcgtgcgcatcactacccttccgaactttccggtggtcagcagcagcgtgtggcgattgcccgcgcgctggcggtgaagccgaaaatgatgctgtttgatgaaccgacctccgcgctggacccggaactgcgtcacgaagtgctgaaagtcatgcaggatctggcggaagaagggatgacgatggtcattgtgacccacgaaatcggctttgccgagaaagtggcctcccgtctgatcttcatcgacaaagggcgcattgcggaagacggtaatccgcaaaccctgattgaaaatccgcccagccagcgtttgcaggagttcttgcagcacgtttcctga

SEQ ID NO: 74029 - DNA, 660 bp, Citrobacter koseri
atggagtttgactggagtgccatctggcccgccatcccgctgttgattgaaggcgccaaaatgaccctgtggatttcaatccttggtctggctggcggcctggtcatcgggctgcttgcgggttttgcgcgcacctttggtggttggatcgccaaccacgttgcgctggtctttatcgaagtgattcgcggtacgcctatcgttgtgcaggtgatgtttatctacttcgcgttgccgatggcgtttaacgatctgcgaattgatcccttcagcgccgccgttgtcaccatcatgattaactcgggcgcgtacattgcagaaatcacgcgcggtgcggtgctgtctatccacaaaggttttcgcgaagcgggcctggcgttagggctgtctcgcggcgaaaccattcgccacgttattttaccgctcgcgctgcgccgtatgctgccgccgctcggtaatcagtggattatcagcatcaaagatacctcgctgtttattgttatcggcgtcgctgaactgactcgtcaggggcaggaaatcatcgccggtaacttccgcgcgctggaaatctggagtgccgttgcggtgttctatctgataattacgctggtgctgagcttcattctgcgtcgtctggaaagaaggatgaaaatcctgtga

SEQ ID NO: 74030 - DNA, 747 bp, Citrobacter koseri
atgaagtctgtattaaaagtttcactggctgcacttaccctggcttttgcggtgtcttctcacgccgcggataagaaactcgtcgtggcaaccgacacggcgttcgttccgtttgaattcaaacagggcgacaaatacgttggctttgatgtggatctgtgggccgctgtcgcgaaagagctgaatctggactacaccctgaaaccgatggatttcagcggcatcatcccggcgctgcaaaccaaaaacgtcgacctggcgctggcaggcatcacgatcaccgacgaacgtaaaaaagcgatcgacttctctgacggctattacaaaagcggtctgttggtcatggtgaaagccaataacaacgatgtgaaaagcgtgaaagacctcgacggcaaagtggttgcggtgaagagcggcaccggttctgtcgattacgcgaaagcaaacatcaaaaccaaagatctgcgtcagttcccgaacatcgataacgcctacatggaactgggcaccaaccgcgcagacgccgttctgcacgatacgccaaacatcctctatttcatcaaaaccgcgggcaatggtcagtttaaagcggtaggtgagtctctggaagcgcagcaatacggcatcgccttcccgaaaggcagcgacgaactgcgtgagaaagtgaacggcgcgctgaaaacgctgcgtgaaaacggcacctataacgaaatctacaaaaaatggttcggtactgaacctaaataa

SEQ ID NO: 74031 - DNA, 504 bp, Citrobacter koseri
atgagtaccgctaaactggtaaaaacgaaagcgtctaatctgctttatacccgcaacgatgtatcagacagcgataagaaagcgacggttgagttgctgaatcgtcaggtgatccagttcattgacctgtcactgatcactaagcaggctcactggaatatgcgcggtgctaactttattgccgtacatgagatgctggatggcttccgtacagcgctgaccgaccaccttgataccatggcagaacgtgccgtacagctgggtggcgtggcattagggacaacgcaagtgattaacagcaaaacaccgctgaaaagctacccgctggatatccatagcgttcaggatcacctgaaagagctggcggatcgttactctgttgtcgccaatgatgttcgtaaagccatcagcgaagccaaagacgaagacactgctgatatctttaccgctgcttcccgcgacctcgataaattcctgtggttcatcgaagccaacatcgaataa

SEQ ID NO: 74032 - DNA, 885 bp, Citrobacter koseri
atgccggggtcgtcacgtaagccagtctggctgcctattttggttttgctcattgcgatgtcctctattcagagcggagcctcactggcgaaatcgctgttccctctcgtcggggcgccgggcgttaccgcactgcgtctggcactaggcacgctaatcctgattgcgttctttaagccctggcgtctgcgttttgccagagaacagcggctgccgctcctgttttacggtctgtcgcttggcgggatgaactacctgttttacctgtcgattcagacggtgccgctcggcatcgccgttgcgctggagttcaccgggccgctggcggtcgcgctgttctcgtccagacggcctgtcgatttcatctgggttgtgctggccgtgcttggactctggttcctgttgccgcttggtcagggcgtatcgcatgttgatttaacgggtgccgcgctggcgctcggcgcaggcgcctgctgggctatctatattctgaccgggcagcgggcgggtgaagaacacggccccgcgaccgtggcggtaggctcgctcattgcggcgatcgttttcgttccggttggcgcgctacaggcgggagaagcactatggcactggtcgattctcccgctgggtctggctgtcgccgtgctgtcaacggcgctgccctactcgctggaaatgatcgcgctgacgcgactgcccacgcgaacgtttgggacgctgatgagcatggagcccgcgctggctgccgtttcggggatgattttcctgggagaaacgctgacgctggtgcagcttctggcattggccgccatcattgccgcctcgatggggtccacgctcaccatccggcgggaaacgaaaattcagcaagtcgacattaattaa

SEQ ID NO: 74033 - DNA, 516 bp, Citrobacter koseri
atgaaaaaaattgcatgtctttcagcactggccgctgttctggctatttccgcaggtactgctgtagctgctacttctaccgttacgggtggttacgctcagagcgatgctcagggcgcagcgaacaaaatgaacggttttaacctgaagtatcgctacgagcaggacaacaacccgctgggcgtaatcggttccttcacctacacagaaaaagatcgtactaacggtgctggcgattacaacaaaactcagtactacggcctcaccgccggccctgcttaccgtctgaacgactgggcaagcatctacggtgttgttggtgtgggttacggtaaattccagactgctgccactccggctgacaaacacgacaccagcgactacggtttctcctacggtgccggtttgcagttcaacccgatcgaaaacgttgcgctggacttctcttatgagcagagccgtatccgtaacgtggacgtcggcacctggatcgccggtgttggttaccgcttctaa

SEQ ID NO: 74034 - DNA, 1587 bp, Citrobacter koseri
atgaatttaaccctcaaagactcgctaattgcccgcagcagggccattagcccgtggactggcttctactttttacagtcgctgctgattaacctcgcgtcgggctacccgtttagcctgttctatacagcggcctttacctgcctattgctgttgctctggcgcacctcgccgcgcgcgcaaaaggtgttgatcgggctatgctcgctgatcgccgccatgtatttcccgttcggccaggcctacggctcgccaaactttaatacgctgctggcgctgcattcgaccaacgtggaagagtccaccgaaatcctgaccatcttcccgtggtacaactatctggtaggcctctttatctttgcactgggcgtgattgccgttcgccgtaagcaagagacggagaaaaaagcctggcgcattgtggacagcgtgtgtctgctgttcagcgtcatcgccttctttgtcacgccggtgcaaaacctggcgtggggcggcgtgtttaaattaaaagacaccggctacccggtttttcgcttcgtgaaggatgtcatcgttaacaacaatgaggtgattgaggagcaagagcggatggcgaagctgtccgggatgaaggatacctggacggtcactgcggttaagccccgataccatacctacgtggtggtgatcggtgaaagcgctcggcgtgacgcaatgggcgcattcggcggtcactgggataacaccccgttcgccagtaccgccaacggttattttttcatggattacgttgccgccagcggctcaacgcaaaaatcgctcggtttaacgctcaaccgcgtggtcgacaacaagccgcaattccaggataacttcgtgacgctggccaaccgtgccggtttccagacctggtggttctcgaatcaggggcaaatcggcgaatacgatacggctatcgccagcatcgcgaaacgtgccgatgaagcgcacttcctgaaaagcggagacttcgaagccgacaagaatacgcgtgacgatgcgctgttaaaaatgaccgctcaggtactggagacagaacgcacgcagccgcagttaatcgtgctgcacctgatgggctcgcacccgcaggcctgcgatcgcacgcagggaaaatacgacgttttcgtgcagtcgaaagagacctcttgctacctgtacaccatgacccaaacggacgcgctgctgggaaaactgtacgcgcagttgcgtaacagcggcgacagcttctctatggtctacttctcggatcatggcctcgcatttaaagagcgcgggaaagaggtgcagtatctggcgcatgacgacaggtatcagcagaattttcaggtgccgtttatggtgctttccagcgatgacaaagcgcatcgcgtgattaaagcgcgccgctcggcaaatgatttcttaggctttttctcgcaatggacggggatcagcgcgaaggagattaaaaccaaataccgttttatctctgagcagaaagccgggccggtcttcatcaccaacttcaagttgcagaaggtggattacaaccatctgggtacggatatgtttagtaccaaacagcgctaa

SEQ ID NO: 74035 - DNA, 129 bp, Citrobacter koseri
atgaacgaatttaagaggtgtatgcgcgtgtttagccactctccctttaaagtacggttaatgctgctgtccatgctgtgtgacatgatcaacggcaaacccgagcaggatcagccctcgtcaaaataa

SEQ ID NO: 74036 - DNA, 1041 bp, Citrobacter koseri
atgagtgttcgtaaacttccaactggcgaatggatcgcagacttctataccgtcaaccgcagtaatggtaagaacgggaaacgtatacgtaaaaaatttgccactaagggagaagccctggcatttgagaatcacacgcttcaaaaggtagatagtgcgccttggttaggcgaagggaaagataaacgaactttaatcgacctaattacaatgtggtatgagcgccacggcgtagccctgcgcaacggtcaaaagcgtaaagacgcaatgacctgggcggcggagtgtatgggattcccgctggccactgagtttaatgcccagctgttcacagcctaccgtgctaaaaggcttgatgggcattatgcccgtactaacagagtatccaaggtttccccgaaaacaatgaaccttgagcattcttactttctggccatgttcaacgaactgaaacggatcggggaatggtcagcccccaatccactggaaaacgtcagacagtaccgcactgatgaaaccgaaatggctttcctcacagctgaagaaattgatcggcttttgctggaatgcaaacgaagcaaagtaaaatacttagagctagtcgtgaaaatctgtcttgctaccggcgcaagatggaatgaagcggcaacgcttaaaagctctcagatcgctggcggtaaagtcacattcgtcaaaaccaaagggaagcgtaacagaacgatcccccttgatgatgaacttctatccgaattgcctgaaacgaaaggcgcgctgttccctaagccctgctataacgctttccgctctgcgctggaacgcgcaggcattgaactcccctccggccagcttacccatgtactacgccatacatttgcaagccattttatgatgaacggcgggaatatactcgttctgcaaaaaatactcggtcatgctgatatcaccatgacgatgcgttatgcccatttcgccccaagccaccttgaagatgccgtgcggcttaacccactaagttgtcgcaaaattgtcgcgacaacttag

SEQ ID NO: 74037 - DNA, 582 bp, Citrobacter koseri
atgagcacattcaaaattgacctgaacgttgacagcaccccaattctggatcgggtgatcgaggcttacggatttacgcagaagttacagctagcagaacatctggacatggctgctagttctctatcatctcgctataagcgtggagttttcccagctgatatcgtcgttaaatgtgtcgctgaaacaggcgctaacctggaatggctggcaactggccacggccctaaatttaatgatgaagaattagacattctcagaattccacgcagcaagatcgttgatggacagctttacgattcaggcattcttatgcttgataaagtcactttcctaccaggcaaaccactaccacaacagccgttatgcgttttggatggtcttgtacagtacatcgttgaccagtcttactctgaggtttatgacgatgattggctggttgaggtagaaggaaaaattagcattcgtacactgacaagaattccagtacgaaaagttagggttagtggcgtgggcatggcttttgattgtggaattgacgacataaaaatcattggccgcgtcgttctgacgattaaataa

SEQ ID NO: 74038 - DNA, 222 bp, Citrobacter koseri
atgcgtccaaacattacaatcatcatcccagaaccatacctgcctttagacgagtattgccgccgtactggtaccaacaaagaaaccgccaggaacctgatcgaatacgggaaattacctatcaagccgaagggtaagcaaaagaaaggtctggtcgaagtcaatatggcagcgctcaccgttcaggcgttaagcgaatgtgatatttcgcttaacgcgtaa

SEQ ID NO: 74039 - DNA, 504 bp, Citrobacter koseri
atgtttgattaccagacctctaaacatgcgcactttgatgcggcttgccgagcatttgcaattgagcacaatcttgaagatgtggccgctgccgttggtatgagatcgcagatcctgcgcaacaaactgaacccagcgcaaccgcaccgcctaacctgtgatgagcttttggctatcacggattacaccgaagatgcgcgtttacttgatgggatgttaggtcagattaactgccttccatccgtgccggtgaacaatgccactgaagccaacatgcaactgtgtgcgcttagcgccactgcgtgtgtgggcgcgattgctggggaagccgtatcaactggccatatgaccgccgcccgccgtacacaaattcttgatcgcgcccgcgatgctatccgtagcctttctgtgctggcttataccgttgaaacccgcattcactctgcgccggttctggccgctgcggtggatctggtgacaaccagcgccacaggcatgatgtga

SEQ ID NO: 74040 - DNA, 228 bp, Citrobacter koseri
atgaaagcatttgttacttacctgaaaaaagaatcacccgccatgcaacggccaagcggttcaacgggctggatagaactgccgaacggtcagcgctggaaccctagccacatgtataaattcaatgcgcatgagcctgttcgaatgaaaggcggggtggttttacgtttcttgtctacaaaagcccgtcgcctggttgggtgtataggggggcgctatggcgattag

SEQ ID NO: 74041 - DNA, 429 bp, Citrobacter koseri
atggcgattagccaggaacaacaaaaacgcggactggaacatttaaaacagattcgccgcaaatatttcagcaatagcagcgaagccgctgactggtgggacaaattaactcctgaatggcggggtgttgttcttcatgcagccgcagtgacttctggaactggggtgtttaaagcccacttaagtaaatgctgctggcgagagctttttgaacgcctggactacagagcaatgatccaactgcgtcagggcatagcccgagcgcgtcttacgcttgatggttttgggtcgttgcgtgacagcgatttttctacccggtcagcaagccgtccaatcaaaaaggcacacccgatcagcagtcgtaacggggtgcagatgattattgctcctcacatcgttaacaagttacagcaacaggggaatcactaa

SEQ ID NO: 74042 - DNA, 402 bp, Citrobacter koseri
atgaccattatttcagttgaaggaaaaatgttgggggcggagctggccgcgtggggcgtcccacataattacgctgttacctttgcagcgaaaagcactgcgaaagatgggcgtatcgcgttgcatccgttcttttttaacgacacagaacacatgacaagtccgcgccactggctggccattaatgcggctttctggtgctgcgtttaccgcgaggcggaaaacaaagaagcgcagattgaagcactggccggaatccgtgcacttttctatgcagctggtgcgttgggcgttggcgaaattaaggcgctgatccaggagtggtggcgacacacttacgagttgcaccaggttcctgcgccgaactattcagctgtcactgttcaacccatttttcactaa

SEQ ID NO: 74043 - DNA, 234 bp, Citrobacter koseri
atgcacatgacacgtcaggatttacccgcaacaaaatcaggcgctgacctgctggccatgctcaccaaagccacgcaggaaggtaaagccgcagctgctgatctgtgttccactcgtctggaaaagctggccacccatgcagccaatgaaggtttaagcgcaacggaaatcgttgagttaatccgcgaagaggccgcagctatttgcagcaaagggggtgcagcatggcagtga

SEQ ID NO: 74044 - DNA, 330 bp, Citrobacter koseri
atggcagtgaaaattcatgcgataaagattgcccctaaatatctcaatgctgttgtagctggccagaaaagggcggagctgcgtaggaatgatcgcggctataaagtcggtgatgttctttcgttgggggaatggaaacacgggaagtacaccgggcgagaatgggcggcggttatcactcatgttttgccggtgaatgaaattatcgctggtgtagaccgctgggtagttctgtccattcgttcaatgtcaccgcttgaagtgatggagtacatcatttctaacggcgtatcagagctgcttttaaacggggttgaatatggccattaa

SEQ ID NO: 74045 - DNA, 867 bp, Citrobacter koseri
atggccattaaaactccgcttaaatgggtgggcagtaaagcccgccttatgccaaagctacgtcctcatttaccaaagggaaagcgtctggttgagccgttcgccggttcgtgcgccgtcatgatgaatacggattatgacgagtatctgatcgctgatgtaaatcctgatctggttaatctgtataagacaatggcttatcacactgatgcgttgctcattgagctggagggtttattttctgccggttcactaggcgatgaagaaagccgggcaattttctattacgcggtgcgtgatgccttcaaccagtccggcaaatcctttggttctgaatctgtggaagctgctgcgcgtttcctgttcctgaaccggcactgcttcaatggcctgtgccgatacaatcgccgtggccagtttaatgtcccgtttgggaagtataaaaagccctatttcccagttgatgagatccgcgcgtttgcagataaagccaaacgagcaacgtttatcactgccaattattcagaaacgcttgatttggtgcgtcctggcgatgtggtgtattgcgatccgccatatctgaccgatgccgataatttcacggcttaccatgagcgtggtttttcgcatatggatcatggtcggctggcgcgtaagttgcgaaagctggcgatgaagggggtaagtgtcgtcgcatcaaatagcgatcttgaaatggtgcattacctttacgccggttttaaatcagtgcgtattaatgcgccgcgcagtgttggtgcagcagctgcaagtcagaaatcagcagctgaattgattattaagtcccccatcaacgtaacgaacgatgttcaggcggtgggggcatga

SEQ ID NO: 74046 - DNA, 222 bp, Citrobacter koseri
atgatgatggaaatcctgatcggcgtttatgccttatttgcctgtattacctttgtttttctcttatgggatgggcagcaggatgacttcagtcatgatgttgatgacattttgctgatcactgtaagtgcagttttctggctaccactggtcgcggccgtgctagtggcattcctgattgatttctggaaaaagttggtaagccgtggaggtactgcatga

SEQ ID NO: 74047 - DNA, 1014 bp, Citrobacter koseri
atgaatacttttgttgatgagcgttgctttagtgattcaacgttaaacgtggttagtgtctctggcggtaaagatagccttgcggattggttgttggctattgaagctggtgttctacatgtacctgtgttggctgataccggtcatgagcacccgcagactatggattatctggattatctggagtccagacttggaaaaattattcgtgtgaaggcggatttctcacgacaaatagagggtaaacgtaagttcatttctgaaagatggccagtgtcattggttgaagagtgtggaatgtcaccagatgaggcggcggaacgcattgccagagctttggaaattttgcatccaacagggaatccttttctcgacctgtgcatgtggaaggggcgcttccccagcactaaggccaggttttgcacttttgaccttaaacatgagcctattcgcacgcaggtggttttacctgcgctggataaatacgacgaagtaatcagctggcagggtgttcgcgcccaagagtcaccctacagagctgctttgcctgtgtgggaggaggatgcggacaacacacccggtttacatgtttaccgcccaatccttcactggactcatgaagatgtgttcgctatggccaaacggcatggaattaaacctaatccactttaccagcaggggtgcagtcgggttggttgtatgccatgcattcacgcccgtaaatctgagcttgcggaaatcttccagcgctggccagaagaaatacaacgtgtcgctgaatgggaaaggcttgttgctgcttgtagccgccgtggtaattcaacgtttttcccatccactcacgattcgcgtcgggcagaaaagcgtattgaagttatcaccgtggaagattacggcatcaacacttatcgtgattgggcgttaacgactcgtggtggcgcacagtttgatttacttgctactgcgaatgacaaatctgtttgcagtagtgtttacgccggggtctgcgaatga

SEQ ID NO: 74048 - DNA, 2043 bp, Citrobacter koseri
atgatgccgatgagcatttcatcagcacttgttggccaacatcacgccgtcgatgcctggcggcgtgaaacctttgcgccgggaacgccagcagatgccactatcacagagcgccgtttatgggctgttaatccagaggattatgaatggcgctcccagtacctgcatgagatacccgactggttagccgggtattttggcaaccgttatgaaaagctgctggctggtcgtgacgggcgtcgccgtgccaatacatttctgcgtcagactatcggcgggaatgtattgccacgtctgcgcaaagtggccgcacgttacaagctggccgctgatgcacttgatcttccttttggtaagtcgctggagcgactgccatcacttgaccgtccagatcttaaaaaactgtctggacagatatctggctggatctcccagtcactgtatgacttcaccgatcagtttatgggtagcactgaagatgccgcagagctgcgccgccgtacgctggagtcttatcgccatttgtgtgcctgttcactgatgctgaataatcagcctccgtactgggcggaacatgaagccagtgacggccaactggaaacccgcaaggctgaatccggcattttgcgcatgatggcgccagagtggtggtatcagcgccttaagcgtgtgcgtgatgtacagcgtgagcatctggctatagctgtggggcaggtacagaaagcagccagtgcttatgtgtcccgtaaaaccctgggcgaatggatagaacagaaaaagcgcaacgctgagttttttaaaaaattcgacctgataaatgagcatggggatcgcgtagcgctggctgatatggttcatggtagcgtggccaatcctgcgatacgtcgttgtgaattgatggttcgtatgcgcggatttgaagatattgccaatgacgaacggctggccggtgagttttataccatcaccgcaccatcacgtttccatgcagtgcacagtaaaggcggctttgtttctcaatggaatggatacacgccgcaggatacccagcgctatctatgtggtgtatgggcaaaagcccgcgcagcgctgtcccgcgctggtatccatgtctttgggtttcgggttgtagagcctcaccatgatgggacaccccactggcatatgttgctttttatgcgcccacaggatgtggacacggtacgcgatattctttgctatcacgcacgtatcactgattctgaagaactacaaaccccccacgcgcttaaggcgcgttttcatgttgagcctatcgatcctaaaaaggggtcggccactggctatatcgctaaatacatatcaaagaatattgatggtttttcgctcgatggcgaaaaagatgatgagaccggggaaaacctgcgcgatatggctaaagccgtttcagcatgggcatcacgctggcgcattagacagttccagcagataggcggtgcgccggtgacggtatggcgtgagttgcgccgtctgccaggtgatggacagattttaccaactgaagatatggataacgtgcgttttgcagcagacgtgggcgactggcgagcttataccgagtgccaggggggcgcgtttgttatgcgtaaggatctgaccgtccgcctggcgtatgaggtaactgagcagggtaacgaatacgcagaggacgtgcagcgcgtacagggcatctactcgccacatattccagattctgaggtatgtacgcgtctggtgaagtggcagaaggttacgaagttggccgaagcgtcagcggaggcgggttttgaccttgaccttaaacacccttggagttctgtcaataactgtactgaggggggaacccgcagacggttaaaactggagttacgcagtcgtggttttgatggttctgatgaggaaatcaccatactgacgcgggggagtggtttaaggtttggccatacagccctgatttatcgtaatggcaggttgcaggaagcgcgaaaagagccagtccaggagttatggccgggatgggtatag

SEQ ID NO: 74049 - DNA, 204 bp, Citrobacter koseri
atggatcttttggaagcgtcggcacagctggagcgcattgagttattggccaaaattgcccatgtttacgaaagtgaccagagagagaaaacgatcgctttggcctggattggtgaaatcgcgggagaaatgcgggaaatggtcaggaaagaagtgaaaagcccccagtcagggggcttaggcggcgggtgtcgctttcagtag

SEQ ID NO: 74050 - DNA, 270 bp, Citrobacter koseri
atgcgagttctgaaaatcgaatgcccggaatgcggctcaaaagctgttattcgtaaaacaaaccggaaacaccgacagattgccgatatttactgcgcctgttcagatgtggagtgtggtcatacgtttgtcatgaatctgacgttctcccacactctcagccccagcgctaaaacgggtgatgcaatggtgcaaaaaatactgggtgcactttcacccgatcagcgtcagatggcattagacctactgaaagcgacacccgccgcctaa

SEQ ID NO: 74051 - DNA, 1062 bp, Citrobacter koseri
atgagtaaaaagaaacgcttcattaagcgcgaccagcgcggcaataagtccaaaaaaatgagcattatcacattcggcaagcctgaaccggtactgactaccggcacagactaccgcgatatctggtacgacaacgccgcagatcattttacacaaccgattgaccggctggcgctggcacagctgattaaccttaacggccagcatggcggcatcatccacgcccgcaagaatatgattatctccgactacaaaggaggtggcctgattcatgaccagcttgaggcggcagcattcgactatataacgtttggtgatatcgcaattggtaaaatccgcaatggctggggagacgtgatcggccttgaacccctccccggactgtatatccgtcgccggaaggtcagggacaatgccacggatcagcctggcgattacgtggtattacaggaaggggaaccggaggtatggccgcaggaagatattattttcattaagatgtacgacccgcaacaacacatctacgggctaccggattacatcggtggtgtgcattctgcgttactcaacagtgaagcagtcattttccggcgccgttattaccacaacggtgcgcacacgggcggtattctttacacccgcgaccccagcatgacggacgaaatggaagaagagattgaacagcagctgcgcgacagtaaagggatcggcaacttctccaccattctggtgaatattcctggtggcgacggtgacgctatcaagttcattgaaatgggtgatatttccgcaaaggatgagtttgcaaacgtcaagaatatcagcgcccaggacattctgaatgcacaccgctttcctgctggccttgccggaatcgttccgcagaatactgccggactgggcgatgttgaaaaggctgaacgtatttacaagaaaagcgaagttgcgcccattcagcgccggttcatgctggccgttaacaacgatcccgaaataccggaaagactgcaccttaactttgatttaagttacgcagaatcaacagataaggatgcggtatga

SEQ ID NO: 74052 - DNA, 1776 bp, Citrobacter koseri
atggctaaatactctgaagaattaaaaggcgttgtccgcgcactttatctgcgccgctatacgccaaaggaaattgcatctgaattaaatctgccgaatgcgcggatcgtttactactgggcggagaaatatagctgggcggatttgctcagttttgaaagcacagaggaagcaattgaacgccgttaccagctgctggccagccgcgacaacaaaaccgatctcgacctgaaagaaatggacatgcttatcgcacatgccacgaaactgcgtgcgcaaagtaataagcataaagagaagatggccagtagccatgtagacaggcaagcaactgcgagcggtgaaaacacggacgaccctcgcagcaaacggaaatacaagaaaaacgatatttcctcgctgacacaggaggactttgacgcatgggctgatgaacacctttttgaatatcagaaacacctgcgcaataacattggccagcaagtcaggaacatactgaaaagccgtcagatcggtgcgacctggtattttgcgtttgaagcgtttgaaaacgcggtgattactggcgatccgcaaatatttctgtccgcatcaaaggctcaggctgaagtgttcaggtcttacatcgtgaacattgcagagcagtatttcggtatcacgctgaccggcaacccgatccgtttaagcaacggcgcagagctgcgctttctgtccaccaacaaaaacactgcacagtcctacagcggccacctgtactgcgatgaatatttctgggtgccaaacttcgccaaacttaacgaagtggccagcgcaatggccacacatgacaagtggcgtaccacctatttttcaacaccgtcagcaaaaacacaccaggcgtacccgttctggacaggcgatgaatggaaacagggcagcaagaaacgtgcggccattaagttcccgtcctttgacgaaatgcgtgatggcgggcgactctgcccggatggacagtggcgctatgtcattacgatggaggatgccattgcgggcggcttcaacctggccaacatagagaaactgcgcaaccgctacaacaccgccacattcaacatgctctacatgtgcgtgttcgttgacagcaaggattccgttttcagcttttccgacctggaagcctgcggcgtggaggtggacacctggcaggatcacaaccccgatgcggcgcggccattcggtgatcgcccggtatggggaggttttgacccggcacgcagcggggatttgtcctgttttgtgattatcgctccgccactgctcgccgtggagaaattccgcgttctgagagttatttactggaagggcatgaacttccgataccaggcaaagcagatagaaaaactgttcagccagtacaacttttcttatctgggcgttgacgtgaccggcattggccagggtgtttttgacaacatccagcactttgccatgcgcgtggccgtcgcaattcgttacgacctgaacaccaaaaataagctggtactgaaagcagcggacgtggtggaaagccagcgtatcgaatgggacaaaaaccttaaggagatcccggccagcttcatggccgtgcgccgtacaacaacccaaagcggtaatgcgatgacatttgtcgctgaccgtagtcaggataccggacatgcggaagcattctgggcaattacccacgcgctacataacgaacctcttaactatgaaaacaaaccgcagtcccgctggggcgtaaggaaaaaggcagcatga

SEQ ID NO: 74053 - DNA, 804 bp, Citrobacter koseri
atgtcacatttaaaaactgactggctgtgtgttgctaccgaaggtgataccgttgacggcagagtaattaaacggcagtggattatagatatgggtgaaacctatgactataaccactgggttgctttaatctggccagaacatgaggacgattacggtaatttcggtgaggtgctggaagccacctggagtgatggtgatgatggtctggcgaggttatatgtcagcctttgcccgaatatgcgcctgattttcgccaaccatgaagatcagcttttatttttctccattgagccggaagagaactggcgcggtagcggacggacttacctgaaagggctggcggtaacagacacgccagccagtattggcaccacacggctgcgctttagtagtcggcgtaaaaaattatctgaacagggctattacagctgtgtaatttcccgtgacggaaaaataaaacaggaaggaaaaatgaagaactggcaaaaattgtttggtatcaagccgaaatttgaagatgaaaacacgcaggataatcctgcgccggatgatgataagttacaggcgcttgctaatgtggtaaacgatctggaagcgcgtgtcgcaaaaattgaaagtcagattaatgacgttcaggatgatgttgataccatttccgaagtggttgacacggaagaatttgccgctattcgtgataatgcgaaagatatcgttaaacgttttaacgatttgggtagtaaatcaacccgttcacctgggcgtaaaatttctgaaaaagccgggaagtttaattttctgtaa

SEQ ID NO: 74054 - DNA, 1023 bp, Citrobacter koseri
atgcaccttaataatcgtgcgcgggatttactcgataaatattcggtgggaatggccgagcaaatgggtactcgtgatccaagccgctttttctcactaaatgacccgcaggaaaatgcgctgcgtctggccatgctggaatcagttgaatttctggaaatgattacctgtcttgacgtagaccagctttctggccaggtgatttctgtgggtgcatcgcggcttcatactggccgtaatgcagcagggcgctttgttcgtcaggttggtgtggatggtaatacctacgatctggttgaaacggacagctgcgccgcattgcgctgggatttgctttccgtatgggctaacgccggtaaagaagaaaatgagttcttcaatctggtgcaatccttttcaacccagattttcgctctggacatgttgcgcattggtttcaacggtacgcatcgtgcggccactactgatgctgaagccaacccaaacggtgaggatgtgaatatcggttggcatgaacgcatgaaaacactgctcgacggtaatcagattatgaatgatgaagtcgtactggatcaggccggtgactacaaatcactggatgctatggcgcaggatttgattaacgccaaaattccggcgcagtaccgtaatgatccgcgtctggttgtgctggttggtgcagacctggttgctgctgaacagtaccggttgtatcaggcagctgaccgtccaacagagaaaattgcagcgcagatgctgggtagcaccattgccgggcgcaaagcgattattccgccattcatgccgggtaaacgtatggtggttacgccactgagtaacctgcacatctatacccagcgtaatacgcgccagcgtaaagcccgctttgaggatgatcgcaaacaatacgaaaacagttacctgcgcaacgaaggttacgccattgaagtgccggaactgtatgcggccattgatgaatcggcggtgaccatcggcgcagtatctgaaccagcggagggctga

SEQ ID NO: 74055 - DNA, 699 bp, Citrobacter koseri
atggcactttctcccgcacagcgtcatagccagcgcattctggccgaacagcaactgaaaaagcgccgggcgattgaaacgctggagagtctgcatgtgcaaatccagatcctgaatcaggatatcgcgtttttacgtggactcccgacgattgcagatcgtgtgacatacaagcgcgatgagctgattccacgctggaagccgactgttgatgaatatctgacaggtgaaagcgtgtatgaaaacccggtctttgcctggttcgttgtgtggatgttcgatgttggtgagcttgatgaggcgttgcgcctggctgatatcgcgattgagcagcaacagccaacgccggagaacattaagagccgctttccggtatttgtcgctgatacggtgatggagtgggcggaaagcacggcagcagcgggggaaagtgtcgagccatatttttcacaggtttttgagaaagtgactcagcgctggcggcttcatgaagagattaccgccaagtggtttaaatttgccggattgatgctgttacgcgacgacaacggccagccacgcgctacggcagtggaagatgttgacacgttgttaaaggccaatgaactgctggcctgtgctgaaaatctctataagcgcataggtgtaactactatgcgagcacagattgcggcacgtattcgcagtctgacgaaataa

SEQ ID NO: 74056 - DNA, 504 bp, Citrobacter koseri
gtgtgtaactgcgccgtggaaaccggtcagtccgcctttttcgggggaattatgtttagcggaaagccgctggattatcaggatgagccgctgacaaataacggcttctggccggatctgaacctgaaagactttcaggcgcagcggtcactgccgccagatattgacgcggacacaatcagccaggcgctgcttgcagctgtagcggaggtcaatgcggagctggagaacgtggaagccatctggaaaacaaaaggatatgtgctggctgcggatgtaccgggcgtaaaaatgggcgagcttaacagtctgtgcgcccagtacatgaaagctgtatttgccagggcaaaagcggatctgctgggggagtttgccacaatcgggcggcgtgattctcatcctggacaggaaagccaggagacccgcgccggattacttgctgaggcttcagtggtgatccgccgtatgaaagggctgaaaagggcaacggtgaaaaaagtatga

SEQ ID NO: 74057 - DNA, 507 bp, Citrobacter koseri
atgagccagacgcagattcaaagcctgaccgaattttttaaagagaacgtcccgccccgcgcgatgcagtcgtttgacagcgtgctggatgagatgaagttcattcctgcggcgaaggattacgggctgggacaataccgccaggctgtgatccggtatgacgcggtgctgagctgggggcgtttcccttatcgcttgtgtcctccgcagttgcttatgtccttactggcggcgtggctggatgatgcggacagggaactactggatgaagtggggctgagtgaggcggaaccagactgggatgtatcggtagaggatgaggaaacggccactgttgtgctgaccgtgccgatggtggaagaactggtgatcaggcgggacgataacggggctattccgtggcagggggagcgctggtcactggttgagcctgaaatctggacggcgctgactgccagcatttacagcgtggatgaggctggtgcgccggtaggtgagggggaatga

SEQ ID NO: 74058 - DNA, 708 bp, Citrobacter koseri
atgattgtcggtggcgagctgaataaaaagcaactggccgaattgcgcaaggcgctggccagcatggatctgccgccgagaaaacggcagcgtctgatctggcgtctggccaaatatggcgtgatcgctgcggcgaaacggcatgtgcgcaatcaggaatcaccggatggccagaagtggccagggcgtaagacaaaacgcaaagggaagatgctgcgtaacctgccaaagctgctgcatatccgtgaaatgccagaaattcaggctgtgcggatctatttgcagggtggtggctaccggaacggggaaacaccggttccggccgggacagtcggttacgcacagcaaaacggaatgcgcttgactgtcagtcgtcgcaatcagtcacggaaggcagaggccgggaaaatggccacgccagcacaggccaaaaaactgagggcgctgggctatcgggtacgaactggcaagcgctggaaaaagcccacactgggtgagattacgcagacgatgccttacaaccaggcggggctgttgattcggaagttaagcggtaaagcggtgaaaaccagctggacagtggaacttcctgcccgtgtattcctgggcatgaatgacgatgaatttgataaagcgctggcgcgtcagcttcaggccattggctttggctggaatgttaaggcgcaggatattaaggggaaaacatga

SEQ ID NO: 74059 - DNA, 1128 bp, Citrobacter koseri
atgacctggccaaatgtgacagtgaaccaggtaaatcagcttttgggcgaaaccaatgaagtggaacgcacgctgctgtttatcggtacgggtaccaaaaatgtagggaaaacgctggcggtgaatgcccagagtgattttgattcactgctgggtgaggaggccagcccgctgaaaaatgatgttctggctgcgctggcgaatgctggccagaactggtggggattcattcacgtcctgtcagctgaagcggaggaggacgcctgggttaaagcggttctggccgcgcaggtggtgtgctctgtggaaggcgtggtgttgtctgatgatgtagccactaaagcgcaggtaaatcaggccgtgacgttacgatccacgctgatttcaaagtatggccgctgggtgtggttcattctggccgcgcaggggatgcagaacgaagaagcacaggcggattatctggtacgcatggccacccttcaggatggtattgccgaaaagtcagtacagctggttccgcgtctgtggggaaatgaaccgggtgtgctggcggggcgtctgtgtagccgtgcagtgactatcgcagacagtccagcccgtgtgaaaaccggggcgctgctgaacctgggcagtgatgaaatgccggttgatggtgccggagttgtgctggaactggccacacttcaggcactggaagcgcagcgctttagtgtgccgatgtggtacccggactatgacggcttttattggtctgacgggcgcacgcttgatgtggaagggggtgattaccagtcaattgaaaccctgcgtgttgccgataaagcggcgcgtcgtgtgcgtctgctggctatcagcaaaatcgcagatcgttcactgaacagcacgccgggcagcattgctgcacaccagacgctgtttgcacgtccgctgcgtgaaatgtctactgccgccagtattaatggggtgtcatttccgggggaagtgaagccgccgcaggatggtgatgtgaccattgtctggaagaacaaaaagacggtggatatttatctggtggtgcgcacctgggaagttccgctgcaaatcactatcagtctgttacttgatgccagtctggaggccgctgcatga

SEQ ID NO: 74060 - DNA, 456 bp, Citrobacter koseri
atgagtaaacgtatttcgggcatgtcctttgatacctaccttgacggtgatctgatccatattgagaaaatcacacttgatatcacggataacagcaccgccgcccagacccgtggtgtgccggatggtcatgttgatggtgatgtggccgcagagggagaaattgaggtcagttcaaaggtgctgggcgtactgacggctaaagcccgcgccgcaggttcgtggcgtggtattgaaccactggattttcttttctatgccaaagcgggcagcgaggaaatgaaagtggaatcgttcggcaacaaactccagctaagtaatcttctggatattgatccgaagggtggcggtgtggcgacgcacaaaatcaaatattttgtgaccagccccaagttcgtgagcatcaacggcgtgccgtatctggaagcggaagccacggaaaatctgatcggataa

SEQ ID NO: 74061 - DNA, 303 bp, Citrobacter koseri
atgcaggaacatgaaaagagcctttattcactgctgatcattggcgcactgattgctgtcggcaatgtgctgaccagtaatgaccccatcacgccgcgtctgtttgccggtcgtgtgatcctgggcagtctggtttcagtggtggcaggggcggtgctgattcagatcccggatgccagcccgctggccattcaaggactgggagcagcgctggggattgccggttatcaggcggtggaagtgtggctgcgcagacgagcagcgggaaagcagaacgggagcaagacaaatgaccctgagtga

SEQ ID NO: 74062 - DNA, 342 bp, Citrobacter koseri
atgaccctgagtgaaaaacaacaacgttttacgtctatgattgcgttgttaattcagtatgcaaatgcaaatggcatgtggttgacgtttggtgaagcgtaccgcacaccagaacaggctgcgctgaatgcgaagaaaagcagcggtatttcaaacagtctgcacaccctgcgtctggctgtagattttaatctgttcgtgaaaggggaatacaaaacccgtactgaagattatctgccgctgggggaatactgggaatctttaggcggcagctggggcgggcgcttcaaatcaaggccggatggtaatcatttcagcctggaacataacggggtacgctga

SEQ ID NO: 74063 - DNA, 339 bp, Citrobacter koseri
atgagcagcgggcagtggctggttgtggtggcgctggcgtttgtctggggctggctgactgcggactggcggcgcgacagtctggagctggcaatcaacacggctgcacaggtggcgggcgataaatcgcggaaggtgatgcaggatgttgccagtgattccgccagaacgctggaagataaactggaggcgttgaaagatgcgcaaccgcgcgaaattcgcactgaggtgcttaagcctgtttttaccaatgtttgtctgtctgatgagtttgtcagcatgtacaacagcgccgcagccagtaccgaacgtgcgctatcaggaaaacctgaaaactaa

SEQ ID NO: 74064 - DNA, 258 bp, Citrobacter koseri
atggaaaaaattaaattgtgtgtttgtggtgtggatattgtttttgaaccgaaccagaccgcatacaataaatttattaatgaaatggcaatggataataaaattgcccctgcgcataattatctgacgcgtattgtttcgactgaaagtaaagatgcgcttacggaagtattgaaacgaccgggcgccgcacttcaattggtcagtaaagtaaatgatatttacgcgccagaactggagattgaagtaaaaaactga

SEQ ID NO: 74065 - DNA, 1968 bp, Citrobacter koseri
atgaagcaattagattttacattaagcctgattgataaattgtcccgcccgttaaaacaggcgcagggcaacgtaacgggctttgctgaaaaatcaaaagcagcctttatgcaaattggtggcggcgggctggcgctggcgggtacaggtatggccattaaaggtgctctgatgcccgccattgaaatgtatgacgcgctgaatgatgcggctgcaaaagggattgatgattctgcgcttaaaactgttcagcgtgatgcgctgcgcttcagtacaacatacggtgccagctctgtggagtttgttaagtccactgaaaatattaacgcttctattgccggactgacgggcaatgagctgccgaaagtgacgaaagtcgccaatattctggcttttgcgctgaagtctaccgctgcggatacagcggagtttatggggcaaatgttcggtaacttttccgccgatgctcaaaggctgggcaaggttgaatttgctgaacaactggccgggaaaatggtgtacatgcgtaaaacctttggcacagaaatggccactatcaaagacttgatggaaggtgcacgcggagtcgggactaactacggcgtggggctggatgaacagctggccgtactgggtcagttaaaccgtacgctgggtacggaggcaagtagcgcttacgagggctttatgacaggcgctattgacggggctaaaaagttggggctgtccttcaccgactcaaccggaaaaatgctctcgatgccggaaatgctgatcaagttgcagggaaaatacgggaaaagcctggaaggaaacctgaaagcacaggcggagcttgatgcggcatttggtgacagttcagccgtggtgaagcacctttacggcaatgtagcgttgctacagcggaatatcacagaactgggaggggcggacgggctgaagcgtacccaggaaatggcgcagaaaatggttaagccgtgggatcgctttgtcgaaatccttaaagccatccagactgtcattggactgacgctgatcccggtgctgtatccgttgctcaaccgcctggcggatatgggacagacttttgcccgctggatgcaactgtttcccaacattgcgcgtgtcgttggttatgcagcaatggccttactcagctttgccgcagtgggggctgtggcaaatatcgtgatgggtgtatccaaatttatcatgatgggtttacgtgggatctggtctgcgctgacggctgttacgaaggtatataccgccacggtatggctggctaatatggccgtgattgcctggaacgctacgctgaaatttctgcgcggtgcgttgctggcggttcgtatggcggcaatgatggccgggattggtatcaatctgatgagctggccgattctgcttgtgattggtgcgatagccctgcttgctgccggttgttatctgctgattaagcactgggatacggttaaagccgcagtgatgaatactgaagcatttcaggcatgtgcggcggttgttgagtggcttgccggggtgtttgcttcagcctggcagtttatcagtgagggctggaatagttttatttcattgttgaccagtttttctccttctcaggcattaagtgggctggccacgggtatcgtgtcgctgtttgataatgtctggctatccgttaaaaacggttttttgaaatcatggaactggattatagagaaaataaataaaattcccggagtggatatatcattggcgacagataccgcaccatctttgacaggtaacactctttctactggtggggaattaaagggagttgacaggggcggcattaataaaactatcagcagtaattcaaaatctgtgactgataacagccggaaaattgatgtggtgaatgtttatccaaaagaaatggtaacgcctggtcagttaatggagtttcaggagcttggcgcatga

SEQ ID NO: 74066 - DNA, 330 bp, Citrobacter koseri
atgaatgagagtctttatattgatttacttattcagaatggtgattttgttctgaatactggccgcgaacctgaattgtgtaataaccgtcaaagtataggacaggatattactcattctattatcgaaagtggattagcaacggaactaattgctgaacgtagcccaactatgcgggctgatatttttactcgcatggaattactgattgaagatgatgagcgtattgtgcctggaacggtagaaatcagtgaggaaagtcagaagcgattatggatcactgccagcacatatgattttggcggaatttctgcgcaggtggatttatga

SEQ ID NO: 74067 - DNA, 1185 bp, Citrobacter koseri
atgacggaaaaaccacaggttgattttgaagaggtggtgaaagccagcggaatgccggtgacggaatctgaggtgcgagaccgatttaatgcgattgcagatgatgagggcatgatcaccaacaattcaaaaatgtcaccgttctggaagttgattacagccattgtggttgcaccggtgatgtggctgaaggacgtcatagtgtccactgtgctggcaaatatgtttgtggccactgccagtgggagtatgttgcggctgcttgcctgggcggtgaacgttacgccgaaaccagccagcgctgcgcagggtgtgatccggttctttaaggaagatgcaaaagctgtggtgacggtgaaggccgggacgcttattcagacagaacgcatcaacggtaaagtttatggagtggccacaacacaggatgttgttattccttcagggacggccagtgcgctactgccggtaaaggcgacgggaacgggaggcgcttacaatcttgcgccgggatattaccgcattctgccagttgccgttgatggtatcagccacgccgccagtgaagaggactggctgactgtaccgggggcggatgaggaaagtgatgatgaattgcgtgaacgctgccggaatcagttcaaccttgtggggaattaccatactgatgccgtataccggtcaatgattgccggagttgccgggttgagtattgatcggattttcttcgagcatgaagcaccgagggggccgggaaccgccaatgcgtatctgctgcttgatagcggggtggcatctgcgccgttcgttgatgccgtcaatgactatatcaatagccaggggcaccacggtcacggtgacgatatgcagtgctacgcaatgccggaaacgcttcacgatctgtccgtcactgtttacgtcaaaaacctgagcaatttaagcgatgacgaaataaaaacgctgaaggatggcgttgaaaacatgattcgctgcgcatttcgtgaaaatgctgatttcgacgtcagaaagacgtggccgtattcgcgtttttcattttcccagcttgggcgggagattcacaaaacattttcgctgacggaatcactgacgttttctctgggtgacattaccagtgatctgagtgttccgcgtctgaaatcactggttgtgagcatagaaaatgaatga

SEQ ID NO: 74068 - DNA, 588 bp, Citrobacter koseri
atgaatgagttcctgaaaaagctggcggggatggtgcttccgtcatggatgaataaaggtgaacccgcaaagctgcttaaagttgctcgccgatactggacggaagtttacggctggatcacatggccgttgaatcagtttgatccgctgacgtgtacaccagcattactgaacctgctggcatatgaccgcgatataacccgttttgacggggaaccgctggtgctgtttcgtaagcgcgtggcgtatgcctttgttaatgcccgtgatgccggttctgtagagggattcatcaatatttttgagcggctggggattgggtatgtggagttacaggagcgtcagccggatattgactgggacgtgattcttgttcgcgtcacagacagtcagatagcggacaacacgcagctgttgatccagattatccggcagtacggacgtacatgtcgccgttatcagtttgaagtgattacgtctgaaagcctggttatccgggcaggatgggatcagggggaatacgttgtttatccggcacggctggtcgatgcggaaaacaacggcgcaacattcagcgcgagtttatag

SEQ ID NO: 74069 - DNA, 1881 bp, Citrobacter koseri
atgtcacagacagttatcactctggcgtttgagcagtggaaaaccagccaggccgtgacgggtgaacccgtactgctggatgagtttgtttttgcgaatgtaccagggcttgatcctgctatgccgattgaccgtagcgagacattgccgcctgtggcgcagattgttcaccgacaggctgtaagccgtaaaggtgttgtgagtgaaaatgcggtggtgcattccgttgttttgggtgcagatgttggtgatttctcgtttaactggattggactcattaacaaagctagtggcacgctggctatgatcgtacatgccccggaacagcaaaagctgaaaacagcggaaggacagcagggcaacgtgctgacgcgctcattcctaatggaatacaacggcgcacaggctgagacaggaattaatacgcctgcggaaacatggcagattgatttcactgcccgcatggcggggattgatgagcgtcagcgcctggaaaatattgatctttacggtgcggctgcgttcttcggtgacggttatctggtggcgaaaaccggcaatcagttttttgtcaccaaaggcaccggttatgttgccggattacgcacatcactggccgcaaatcagaatattactgtgacaactaagccagtaaaaatctggcttgatgtgtgctgggctgggacgctgacaagcgcatggggcgttcagagcaagattacggtagctgcaaatctggctgattatgtacaaaatggcgtacagcattatgtatttgcagtggcttctattgatgcgaatggcgttattacagatttgcgaccaaaaggtaccctgggggaacaacaggcaaatagtgattttgtccgtaaagacaagaatctttctgatattaacgataaggcaaagtcattatcaaatatcggtggagtcccgaaaacaacaaaaattaatggttatccattatctggtgatattgatttatcgtttgatgatgttagtgcaatgcctgtcgaagttaacggagttatcagggatggcgcgacaatggcagcagcaaataaggggggatggtggcgcgttgttgtcacgaatcctgctgctatgtcagattttcctgcgcgtccaaatggtacaaagctgtatggctatggatatatgtttgtcatgttgagcgaaaactcatggcttcagcactattattcacatcgtggcgaagtcgctattcggcaggaatggacaacggggccaactacagatgtggcgtggaatattgattacaattccgcgaataaacccactgctggcgatgttggggcgcttcctgtgtcaggtggtgaagtgcaggggccggtgacggtaaaaagaaataatgccgcaattactattaagaatgcgtcacctaacttatctctttatatgctgggtgttgatgaagatggaggtaatcttttctatgttggacggggcggggctggctatgctgtcgcactatataattataaaggtagcaatggcataaatttaaatgaagatggctcagtttccatcatcgttaaggacggaaagagtgtaacaacaaacaggcaatttgtgccatcggactacggtaattttgattcacgttaccaggcaaaagggaattacacgcccgcaggagaggcttatacaaaggcgcagtctgattcacgctatttgcaggggattcgcgtaagcgcaacgcaagtcagggagttcagagatggtgggggatattcttctaacgatgcggcatttgcaaccgcgatacagatggtgggcggtagctcaaacgttggttctctgcttgtcaggtatctccagcggaatattaacggcacctgggtaaatgtagctacgtaa

SEQ ID NO: 74070 - DNA, 546 bp, Citrobacter koseri
atgcagcatcttaaaaatttaaaaaaatatactccagctgacgcatataaactgttcttaatggatgagcatggcgcagagttttttatctctgacgatggtcgggactggtatgaatcacaagccgcttttcttccagatacattgaaagtggcatatgatgaagcgggaattattcgttgtatcagcaatgatgtgtcaactatttatccacgagattttagcatcgtggaagttaaagccacggcaaaaaataaaatggcggatatttcaggggaatgggtatttaaagatggaaaaatccagcagcgtcagtattcgcaaaatgagctaatcgaacaggcggaaacaaagaaaactgaattattgtcagccgcagccgctgcaattgcgccgttgcaggatgccgtcgatattggggaggcaacggaagaagagtccgcgtttttgctggagtggaaaaagtaccgggttctgcttaatcgcattaagccagctgatgcgccagatattaactggccggaggtgccaggacatgtggcgtga

SEQ ID NO: 74071 - DNA, 726 bp, Citrobacter koseri
atgtggcgtgaagtgcgtctggcatttgatgattcggttgcggcgctgaattgctccatcgttccggcgcatccgtgggtttatggactgggtcaactgactgaaagcggggcgtatttgagtcccgttaacgcagtctcttaccttgctgaaaaactggccggaactggtggtgtggctgatgtagtgatcttcatggtgaccgggcagacacatgaaaattttatggccagtcttggtggcctggtagatgtattccccgccccggcattcacacaggtaaagaggctggcgcaatcagcggcggagctggccattgaaaaaatgcagatcccggcaaaatcaactgcgggtttacctgcacctgttccgttgtctgttcctaccagcaggatggcgttatcagctgctgcaatcagtgcggcgcaacaggcggctggtgccggatttgatataagtgaattaaagcaacaactgggagagttcacgcagctgcgcgacaaactgatcggtgatgtggccagcggactgaatgaattgcagggaaaaagtgccagagcgtgggtttttacagccagtggagacaccgccaccacgttgctggaactggtaaaagggattccgcagcagtccgctgtttacacggcggcgatgatgctggttggcgataatcttgatggaataaagggaatgattcatgacttcgatcccaacactggcgcttaa

SEQ ID NO: 74072 - DNA, 546 bp, Citrobacter koseri
atgacttcgatcccaacactggcgcttaacggcgaggcgatacagctaaaaaatatgcgcgtgactgtttcacagcagtttcaggacaaagaccagtccggccagaccagtgcgacgtccaaatcagagcagggcgcaaagggtaaagagctgcgcattagtggagagatcccctttaaaaacccggagatccttaaacgcatctttgagctggccagcgccaccgacagcggcggtaagcgccagaaataccgcgttgcgcatgaggttgccagggtggtgaattttcgtgaagccacattcacaggcacgctcgatgccccgcagcaggatgggaaaatggcctggctggtgacattcacgctggcggaacatatcagcgtgcaggaaaagcgggaagcgagggcgacgggcaaaacaacggcgaaaaaacagactgccggaagcgccgggaagtcaggcggtcagaatgccggtgaggatgaagaaaaactgacgtggtttgagcgtaaagtgctgaagcccgtaaatgatgcgctggggtaa

SEQ ID NO: 74073 - DNA, 1704 bp, Citrobacter koseri
atgatgaaaccagtaaaacgcctttacctttcaacggatgaagtgcatctgacggatgcaagtctggttctggagttgagcagttgcggacgcggttttattactgctgagacgacaaatgattacacagggaaactggtgcggctggatgtggggtattccgatctgcttttgcgctggtttaccggctatgtggaacgctcacaacctgccgaaaatggttttcagcgcctgtttgtacgcgagctggtcggcatatttgagagaatgtggccatgttcgtttcagcacccaactttacgccagatcgccagctggctggaggaaaacagcggaattgctgtcagtgtgtcggatgccccttacagcgataagccgatcccgcacttcacccataacggcacgggctatcagctgctgaataatctgggtagggcgttcagtatcccggattacatctggtatcagttgcctgatggttccctgtatgtgggcggcgcggaaaaagcgatgtttgctgatcgcccggtagatatcccggcagagttcagtcagggggctgcgggcggaaattccatgacgctgccagtgatccagagtctgcgtccgggtgtggagctgaacggggaatgcgtgaccaaagttcatctgaccaatgacacaatggccatcacctggacatccagaaaccgcgcaacaggtcagccattacagaaaacaccggcacagcgtcagattgaaagccattacccggaactggcttccgggctgcatctgccaaaacaggccagggtggtggcacacagtgaagccgtgaaaagcggtaattttgccgatccgttccggccgcgctatgcagtggatgtgcaactgcttgacgcagacggaaacccggacaacaagacgccggtttattctgctgtgccgctgccggttcctatggccggtaatgattcgggcatgtttcagttcccgcctgaagggacgctggttgaagtggcatttactggcgggaggccggataagcctttcatccggcagacgctaccggatggcaccagtttgcccgatgttaagcctggcgaacaattacagcagcagcgcgaggaagtgtcacagcgggttactcaggctggcgactgggtacggcagaccgatcagactatcagtgaaaaatcgatggtgcgaagcgttaaagctgatacagaacagcgcgaactggtcagccgtgaaaccacggtaaaggccacggataaaaccacggtactgggaaccgccacgctgctggctggggctatccagcaggtaagcgctggtgattacagccaggcggtgaaaggtaacaggctggccagtattgaagggaacgaagaaacggacataacaggacggcagtccaccaaagtgggcggagccgtggatattgaagtgggggaatccctgacagaaaaaattgccgcactgcgtaaatctgtagccgctggcggtcagcaggttatggggaaaaccgttcatattggcagtgagagtatcaacgccctgaccatgatgctggacaccattgatttactggcagagctggcgcagcaatgtgcgagccattcacaccccagcgttggtacgccaataaatgccggagcatttacccagacggcagagaaggccggacagacacgcagcaaataccagagcataatcgcctga

SEQ ID NO: 74074 - DNA, 498 bp, Citrobacter koseri
atggcactcactaaatgcaaagaatgcaaaaaagaagtatcaacctctgcaaagacttgcccacactgtggcgtaaaagatccgggctttggtgctaagcagaaacttagcggctgtctgatactgattattattgtgggaataatcatgtatttcgttggtagtggtgacgatgaaaaagcagctgaaactccaaaggtatgttctaacactgacacccagtgcaactttgataagaacctggtagatgctgtgaccaaatgcaaaccattggttgagcgttccgcgaagtatgaatttgaatggactgacggaatgttagatccaatgttttctcatggcaggattgacagcaaaaagaaccagttaaccttcatcggtgataaggtcaaatttacaaacggcttcaacgcaaaaatgaacatgacctatgcctgtacactggatctgaaaaccaaagaagtcgtggatttcaatatttcggaaggaaaactttaa

SEQ ID NO: 74075 - DNA, 474 bp, Citrobacter koseri
atgagtcgtcgcgcaggtacgccaacaacaaaaaaagtgacgcaattagtgaatgtcgaagaacacgtcgaagggttccgccaggtcagggaagcgcatcgccgtgaactgattgatgactacgttgagctgatttctgatttaattatcgaggtcggtgaagcgcgtcaggttgatatggcggcgcgacttggcgtttcccagccgacggtcgccaagatgctcaagcgtctggcgtcggtagggcttatcgaaatgatcccctggcgcggggtattcctgaccgcagaaggcgagaagctggcgcaggaaagccgtgaacgccaccagatcgtggaaaactttttactggtgctgggcgtcagcccggaaatcgcacgccgcgatgcggaagggatggagcaccatgtaagccaggaaacgcttgaggctttccgcctgtttacacaaaagcacggaacgccttctgaatga

SEQ ID NO: 74076 - DNA, 1110 bp, Citrobacter koseri
atgagttttccttttctgcggtcattaagacgcgatcgtttcctgctgttattactccttgtcggggccggactcagtctgttcgtcccgtttactccccgcacctggccgggtgcaattgactggcacaccattattacgctgagcggtttgatgctgctgaccaaaggcgttgagctgagcggatattttgatgtgctgggccgcagaatggttcgtcgttttaaaacggaacgccgtctggcaatgtttatggtgctggcggcggcggtgctgtcaacgttcctgaccaacgatgtggcgctgtttatcgtcgttccgctgaccattaccctgaaaagactgtgtgcgattccggtaaaccggctgattatctttgaggcgctggcggtcaatgccggttcgctgctcacgccgattggcaatccgcaaaatattttgttgtgggggcgttccggtctctcatttgcggcttttgtctggcagatggcgccgcttgccgccgtgatgatgctgacgctgttggtgctgtgtggcctttgttttccggggaaggcgttgcaataccataccggtacgcgcgcccctgagtggcaaccgcgcctggtgtggagctgttctgggttgtatatcgtgtttctgaccgcgcttgaactgaagcaggaactctgggggctggcgattgtggcggcagggttcatcgtcctggcgcgccgcgtggtactgaacgtcgactggacgttgctgctggtgtttatggcgatgtttatcgacgtgcatttattgatacagctaccggtgttacagggcgtactgcgccatgttgaaacgctctctgcgccggggctttggctgactgcgctcggcctgtcgcagtttatcagcaatgtgcccgccacgattttattgctcaactacgttccgccgaccgcgttgctggcctgggcggtcaatatcggtggttttggtttgttaccgggatcgctggcgaatctgattgcattgcggatggcaaatgatcggcgtatctggtggcggtttcattggtattcgttgccgatgctgctctgggcggcgctggtgggatatggattgttgctgctgaagtga

SEQ ID NO: 74077 - DNA, 921 bp, Citrobacter koseri
atgaatatgaaattaacaacgtttttcgcggcggccctcgctgtagttggcttttgcagcaccgcctcagcggtgacttatcctttaccgaccgatggcagtcgcgtcgttggtcaaaaccaggtgatcactatcccggaaggcaatacccaaccgctggagtattttgcggctgaataccagatggggctgtctaacatgctggaagcgaacccgggtgttgataccttcctgccaaaaggcggtacggtgctgaacattcctcagcagctgatcctgccggacaccgtgcatgaaggcattgtcattaacagtgcggaaatgcgcctgtactactacccgaaaggcaccaacacggtgatcgtcctgccgattggtatcggtcagttagggaaagacacgccaatcaactggacaacgaaagttgagcgtaagaaagcaggcccgacctggacgccgacggcgaaaatgcatgccgaataccgcgcggcgggcgaaccgctgcctgccgtcgtgccggctggcccggataacccgatgggtctgtacgcgctgtacattggtcgtctgtatgccattcatggcaccaacgctaacttcggtatcggcctgcgcgtcagccacggctgcgtccgtctgcgtaacgacgacatcaagttcctgttcgaaaatgtgccggtcggcacccgcgtacagtttatcgacgagccggtgaaagcgaccactgagccagatggcagccgttacattgaagtccataaccctctgtctaccactgaagcacagttcgaaggcggcgagatcgtaccgattaacctgaacaaaagcgttcagagcgtcaccagccagcctgatgtcgatcagtctgtggttgagcaggccgttcagaaccgttccggtatgccggttcgtctgaactga

SEQ ID NO: 74078 - DNA, 1596 bp, Citrobacter koseri
gtgttagtttccagcaacgtcaccatgcagttcggcagcaagccgctgtttgaaaatatttccgtcaaatttggcggcggcaaccgttacggcctgattggcgccaacggtagcggtaaatccacctttatgaaaatcctcggcggcgatctcgaaccgacgctgggcaacgtctctctcgatccgaacgagcgtatcggtaagctgcgccaggatcagtttgccttcgaagagttcagcgtactcgacacagtgatcatggggcatgttgagctgtgggaagtgaaacaggaacgcgaccgcatctacgcgctgccggaaatgagcgaagaagatggctataaagtggccgatctggaagtgaaatacggcgaaatggatggttactctgccgaagcgcgcgcgggcgaactgctgctgggcgtgggtattccggttgagcagcactacggcccgatgagcgaagtcgcgccaggctggaagctgcgtgtcctgctggcgcaggcgctgttttccgaccccgatatcctgctgcttgatgaaccgaccaacaacctcgacatcgacacgatccgttggctggagcaggtactgaacgaacgtgacagcaccatgatcatcatttcgcacgaccgtcacttcctgaatatggtgtgtacgcatatggcggatctggattacggcgaactgcgcatttacccgggtaactacgacgagtatatgactgccgccacccaggcgcgtgaacgcctgctggccgataacgccaagaaaaaggcgcagattgcagacctgcaatctttcgtcagccgctttagcgctaacgcgtctaagtctcgccaggcaacgtctcgtgcccgtcagattgataaaattaagcttgatgaggtgaaggcctccagccgtcagaacccgttcatccgttttgaacaggataagaagctgttccgtaacgcgctggaagtggaagcgctcgcgaaaggctttgataacggcccgctgttcaagggcgttaatctgctgctggaagtgggcgaaaagcttgcggtactcgggactaacggcgtgggtaaatccacgttgctgaaaacgctggtgggcgatctggcgccggataacggcaccgtgaaatggtcagaaaacgcgcgcattgggtattacgcgcaggatcacgaatatgagttcgaaaatgacctgacggtgtttgaatggatgagtcagtggaagcaggaaggcgatgacgagcaggcggtacgcagcattcttggccgtctgttgttcagccaggacgatatcagaaaaccggcgaaggtgctctccggtggtgaaaaagggcgtatgttgttcggtaagctgatgatgcagaaaccgaatatcctggtgatggacgaaccgaccaaccacctggatatggaatcgatcgaatcgctgaacatggcgctggagatgtatcagggcaccctgattttcgtttctcacgaccgtgagtttgttagctcgctggcgacgcgcgtgctggaaattacgccgcagcgcgtggtggacttcagcggcaactacgaagattatctgcgtagtaaagggatcgacggctaa

SEQ ID NO: 74079 - DNA, 2364 bp, Citrobacter koseri
atgaaaaccctgaaaaactggattgtagagaaacagtcggcccatcatctggaactgctggttgatggtcaacaccatctgtgcctgtacgtactggaagaaaatctgtttcgcgtgctgatcaaacgtaaaggcgaactggcattagacagaacctggagtatcgccccggcgcaggatgtgccgtgggaaggccgcagccgtgaggatgtcagcggctttagctgcccggcctggcaactgacgcagcaggatggcgcgctgattgtcgccactgagcaactgcgcgtgaccgtccaccagccgctgtggctggagtggcactatcgcgatgaaacgggcgactggcaaccgctggtcaacgaccgccccaccagcgcctatctgctgaacgctcacggcgacggcgtggcgcactatttaagccgccgtaaagatgaacgtttttacggtctgggcgagaaagcgggcgacctgcaacgcaacggccaacgctatgagatgcgcaaccttgacgcgatgggctataacgcggtcagcaccgatccgctgtacaaacatattccattcaccatcgcccgccgcgatgacgtcagctacggtctgttttacgacaacctgagcagttgctggctggatctgggcaatgaaatcgacaactatcacaccgcctatcgccgctggcaggcggaagcgggcgatatcgattactacatctttaccggcaagcgcgtgctggatgtcaccaaagcctttgtgcgcctgacggggaaaaccctgttcgggccgaagtggagcctgggttacagcggctcaaccatgcattacaccgatgcgccggacgcgcaaaaccagctgatgaactttatccgtctgtgcaatgaacacgcgattccgtgcgattcgttccagctttcatctggctacacctccattaacggcaaacgctatgtctttaactggaactacgacaaggtgccgcagccgaaagtgatgacccaggcattccacgatgcggggttgaagctggcagccaacattaaaccgtgtctgttgcaggatcacccgcgctacaacgaagtcgcggaaagagggttatttatccgtgattcggaaaccgacgcgccggaacgttcaagtttctgggatgacgaaggttctaaccttgatttcaccaatccgcaaaccgtcgcctggtggcaggaaggcgtcaccacgcagttgctggagatggggatcgactccacctggaacgacaacaacgagttcgaagtgtgggatggcgaagcccgctgccacggctttggccacgaaatcgccatcaaacatattcgcccggtcatgccgctgttgatgatgcgcgcctcgctggaagcgcagcagcgctttgcgccggaaaaacgcccgtacctgatctcccgttccggctgcgccgggatgcagcgttacgtgcaaacctggagcggcgataaccgcaccagctgggataccctgcgctacaacacccgcatggggctggggatgagtctgtccgggctgtataacgtgggtcacgacgtcggcggtttctctggcgataaaccggatgcggagctgttcgtgcgttgggtacagaacggcgtgatgcaccctcgctttaccatccactcatggaatgacgatcatacggtgaatgagccgtggatgtacccgggcgtaacgccggcgattcgtagcgcgattgagctacgttaccgtctgctgccctacttctacacgctgctgtggcaggcgcacgccgacgacgagccgatgctgcgccccactttcctcgaccacgagcacgacgcgcaaaccttcgcagagtgcgacgacttcctgcttggccgcgatattctggtggcaagcgtggtggaacccggtcaacgtgaacgccgcgtctggctgccggataacgaaaccggctggtacgatttcgatagccacgaatggttctctggcggccagtggatcacgctgaacgcgccgctggaaaaactgccgctgctggtacgcgccggtgcaggcctgccgctgagcgaacggatcacccatgtcagcgctgaacgcgacgatacccgcgagctgaaactgttcccggtcaaaggcgtggggacaacgtccggtctgctgtttgaagacgatggcgaaagctggggttatcagacgggcaatgccctgtgggtggagtgggaaatggtgtgcgatggggcgaccgtcaacctgaagatcaacgcgcgtggcgactatcgtccggcatggaacgcgttgaaggtatcgttaccggcgggggaaaaacgcacgctgcgggtgaacggcgttgaagggagtgagtgggtgctctga

SEQ ID NO: 74080 - DNA, 1302 bp, Citrobacter koseri
atgagtcaggacatcaataacactgtcgccgcgagtaaaacccgccgcgtcatcaaaaatttgcgctggtatgtgctggtgctgttcttactgggtgtgaccgtaaactacatcacgcgtaactcgctgggtatcctggcaccggagctaaaagagagtctggggatcaccaccgagcaatactcctggattgtcggcgcgttccagattgcctacaccattttccagcccctgtgcggctggctgatcgatgtgattggcctgaagattggctttatggtctgcgccgggatctgggcgctgatgtgtatcttccatgcgggtgccggaagctggctgcatctggcaattttgcgcttctttatgggtgcatctgaagcggccgctacgccagccaacgccaaaaccatcggcgaatggttcccgaaatcagagcgtccggtcgcggcgggctgggcgggcgtcggcttctcaattggcgccatgctggcgccgccaatcatctacttcgcgcacgcctcattcggctggcagggcgcatttatgtttaccggcgtgctggcgctgctgtgggtgatcctgtggtgggcgttctaccataacccggaacagcacccgaacctgagtgaagaggaactggagtatatcaagcaggataacgagcctccggccgtgaaactgcccttcctgaccgcgctgaaaaccgtgtcgaaaaataaacgtttctacggtatcgcaatcccggcctttatggcagaaccggcctgggcggtgctgagcttctgggtgccgctgtatctggcgaaggaacacggcatggatctgaagcagatcgccatgtttgcctggctgccgttcctcgccgccgatctcggcagcgtggcgagcggctacctcacccgtctgtatacccgtctgtttggctgctctcgcgttaactccgtggtggcaagctccgtgaccggcgcgtttctgatgatttctctcggcatcgtggccattacccgcgatccgtatatcaccatcgtgctgatctccatcggcggcttcggtcatcagatcatctcctgcatgctgagcgcgctggtcgtggagtcgtttgataaaggccagatggcgaccgttaacggaatgcgcggctctgcggcgtggatcgccagcttcctcttctctctgttaattggcgttaccgccgacaaaatcggctttaacccgctctttatcgccatggggttctttgacctgattggcgctgttttcctggtggcatttattgctgaacgtcgcgccaagcgcgcctga

SEQ ID NO: 74081 - DNA, 1074 bp, Citrobacter koseri
atggataaaaggctcaaaatcagcgaaattgccgcgcggacgcagctttccgtcagcaccgtttcccgcgtgctggcggggaaggcaaataccagtgaaaaagcgcgcaacaaagtgctggagtgcgcgcgggagctgggcgtcatggacgggatggcggcaggcaggctgttgctgaatagtctggtggtctttgcgccgcagcgggcgtttgatgagcggtccgacatcttttactaccgcgtgattcagaacgtgagtaaaggactgacggcgtatgaagtacggctgcgttattgcgcgcttgaggagctggacagtgacgcgcagcttttcctcgcgcggatgaacgaagcggaaacacaggcggcgattttgttagggattgacgatccgcatattcacgatttggcggtggacgtggggaaaccctgcgtactgattaattgccgcgaccagcgaatgcgtttgccagccgtttcgcccgatcaccgagccattggcgaacttgccgctgattatcttttttcaatggggcatcgcgacgtgatgacggtgctctgtctgcgtcgctacacgatggagctgcgtctggccggcattcgcgacgcctggcaaacccataatctgaaatttaacgataagcgggatttactggtatcgccgagtttcagtgcgaaagaggcggagcagcgggtcagcgaatggctggcgaatacgccggataaggcattgccgacggcgtttttggtcggcggtgattttatggcggcgggcgtcatcagcgcgttgcaaaagcgcggccttcgcgtgccgcaggatgtgtcagtgatgagtattgacggctttaatctggcggaaattcaggatgtgccgttaacagcagtacatgtgccgcgcgatgagctggggacggaggcggtacatatgctgcaacaacgtctggttcgtccgaatgcgccaatcggtacgctgttgctgaacggtacgttgacggtgcgggagtcggtgcggcggatacgtccagggaaacgacgcaccgccgtagagcgggaagggctgtatgacgcttaa

SEQ ID NO: 74082 - DNA, 1263 bp, Citrobacter koseri
atggctttaaccttcacaagcgatacattaccggccgatcataaagcggcgatccggcagatgaagcaggcgttgcgggcgcagctcggtgatgtgcagggcgtttttgacaggctcagcgaggtgattgccacacgcgtggcggaaatcaatacgctcaaagcgcagggcgatgccgtctggcctgtgctgtcttacgcggatatccagtccggcgccatcacggcagcgcagcgtgaacagctcaagcggcgtggatgcgcggtcattaagggccatttcccgcgggaacaggcgctggcatgggatcaatccatgctggattatctggatcgcaaccattttgatgaggtgtacaaaggtcccggcgataacttcttcggcacgttaaccgcctcccgccctgaaatttatccgatttactggtcgcaggcgcagatgcaggctcgtcagagcgaagagatggcgaacgttcagtctttccttaatcggctgtggacatttgaaagcgacggcagacagtggttcaacccggatatcagcgtgatctacccggatcgcatccgccgccgcccacccggcaccacctcaaaaggtctgggggcgcataccgattccggcgcgctggaacgctggctgctgcccgcctatcaacgggttttcgccagtatctttaacggtgagctggagaagtacgatccctggcatgccgcccaccgtaccgaagtcgaagagtatacggttgataacaccaccaaatgctcggttttccgcaccttccaggggtggacggcgctgtcagatatgctgccgggccagggcttgctgcatgtggtgccgattccagaagcgatggcgtatatcctgttacgccccctgctggatgacgttcctgaagatgaactgtgcggcgttgcaccaggccgggtgctgccggtttcgcaacaatggcatccgctgatgattgaggcattgaccagtattccgcaactggaggccggggactccgtctggtggcattgcgatgtgatccactccgtcgcgccggtggaaaatcagcaaggctgggggaacgtgatgtacatccccgccgcgccgatgtgcgagaaaaacctggcttacgcgcacaaggtcaaagccgcgctggaaacgggcgcatcgccaggcgattttccgcgtgaagattacgaaacaaactgggaaggccgttttacgctgagcgatctgaacgttcacggaaaacgcgcgctgggcatgagttaa

SEQ ID NO: 74083 - DNA, 816 bp, Citrobacter koseri
atgaccgttaaagttatcgtcacggatatggacggaacttttctcgacgacgccaaaaagtacgatcacgcacgatttatggcgcagtatcaggaactaaaaaaacgcggcatcgaatttgtcgtcgccagcggtaatcagtattaccaactcatttcctttttccccgagctgaaagacgaaatttccttcgtcgcggaaaatggcgcgctggtttatgagcatggcaagcagctgtttcatggcgaactgacccggcatgaatcccgtattgtgattggcgagctgttaaaagataagcagcttaattttgtcgcctgcggcctgaaaagcgcttatgtcagcgaacatgcgccggaatcttttgtggcgctgatgtcgaagcactaccaccgtctgcaaccggtgaaggattaccaggacattgacgatgttctgtttaagttttcactgaacctgccagaccagcagatccccttcgtggtcgatgcgctgcatacgtcgctggacggcattatgaaacccgtgaccagcggcttcggcttcatcgacttaatcataccgggattacacaaagcgaacggcatcagccgtctgttgaaacgctgggatctttcgccgcaaaacgtggtggcgattggcgacagcgacaacgatgcggaaatgctgaaaatggcgcggtacgctttcgcgatggcgaacgccgcagacaacatcaaagccctcagccgttatcataccgaggataacaaccatcagggggcgttaaacgtgattcaggccgtactggataacgccccgccttttaacgtctga

SEQ ID NO: 74084 - DNA, 681 bp, Citrobacter koseri
atgaatataaacaaactgcttttaatcccactgctgataatcgcctctggctgcagcccgcagaaacctgaacctttgcagtcaaaacaggccgccagcggcgactggacgctgccttatggcgagtggagtttttcttttgtcaccccttctgaactacccgcagaagtccttcatgcccgggttattgatacggatggttatctgtataccttcaatacacttgaccaaactgctcaggctccggattccatcgataaatgggccccgactgtctatggccccagcgtcattttcaacaaagtcaaaaaaccgcctcagtacattgtcttctgctgggaatcctatatcgacaaacaaacttacgagaccagcgccgtgttcggaccagaaacctggctacggatgaaaacccctgccgatcatacctgggacggggatgccgtctggtacgacaatataactttcggcctgtcccctggtggcaaagtcaacgtctggttccccgatgtcgccgggcgtcccagccttcccgtaaaaccgctgaaaatgtggaccctcgcaggcaacgagatgacgctctgcaaagactacgtcgttcccggcggcacgtttaatttcattcagtcaacgcaggatttcattaaaggcaaaacctacccgtatggaaactgggattaa

SEQ ID NO: 74085 - DNA, 681 bp, Citrobacter koseri
atgaaaaggcattacgtactgacacttacactattactgtcaatcactggctgcagcccacagaaacctcaccctttgcagtcaaaacaggccgccagtggtgactggacgctgccttatggcgagtggagtttttcctttatcacgccctatgagctaccagcggaaacgcttcatgcccgggtgatagacacggatggttatctgtatacctttaatacgcttgacccgacgtcccgcgactcagaatccgtggacaaatggactgatgtggcctttggcggtagcgtcgttttcaacaaagtcaaaaaaccgcctcagtacattgtcttctgctgggaatcctatatcgacaaacaaacttacgagaccagcgccgtgttcggaccggaaacctggctacggatgaaaacccctgccgatcatacctgggacggggatgccgtctggtacgacaatataactttcggcctgtcccctggtggcaaagtcaacgtctggttccccgatgtcgccgggcgtcccagccttcccgtaaaaccgctgaaaatgtggaccctcgcaggcaacgagatgacgctctgcaaagactacgtcgttcccggcggcacgtttaatttcattcagtcgacgcaggatttcattaaaggcaaaacctacccgtacggcgactgggaataa

SEQ ID NO: 74086 - DNA, 1986 bp, Citrobacter koseri
atgagtaacattatttatttaacgctggagggtgatattcagggaaagatttctgcaggttgtggttcacaggcctctgttggtaaccgctatcagctgggacacgaaaatgaaatctttgtcttcagcctgacgcaggcagtggacggcgttaacggacgtatccatcaccacgttctgcaattttgcaaactcctggataaaagctctccattactcaataatgccattaataataatgaacgtctaaaactgacgtttgatatttaccgtactaataaacacggacacatggaaaagttttatcttatcgaacttcgcggggcaacaatacgatctgttaatcagttagctaaaatgaacgatatgcactatgaatatatatcggtggattatgattatattctgagtcgtcatctcatcgccggtaccgaattcgattacctgctgacgccggagaattatggtcgtcttttcccggtgatgcagaaggtcacgcttcccaaagagccgccggagcgtaaggtaacgctggtgctgggggtattctttgatggcacgggtaataatgcggtgaatacccggaacatgcttgaggcgctaacggcgcagcactttgatatcaacagcccggatgcgacaaccattctcgccaagaatgcttcggaaaagatggggattagcgggattggggcgggtagttatctggggtattatacgaacattcattggttgaatgagttatataaacaaacctttccacctgacggcaactatatgcaaggtgctgtctatgttgagggcattggcacacgcgctggcgagcctgataacccgataggcctggggctgggcaccgcagaaaccgggattatcgccaaaactgacgatgcggtggcgcaacttgaagctggaataaagaaaacacgatctcgtttaaacggtaagtatgttgtcgataccctgctgtttgatatcttcggtttcagtcgcggtgcagccgctgcccgccactttgccaaccgcgtccagtcagcagatcccgctattgccaatgcaatttcggcaggcatgggcaaagtgagctatagcggtgcatcatcgggcaaaacccgctttctcggcattatggacaccgtggcggcagtgggtacggtggctaacggccttaacccgcacaacgcagataccggaaacgtcaacatccgcctgcgccccggcgtggcgcaaaaggtgtttcacattatcgcccaacacgagtgccgctataacttcgccctcaacagcgttgccccggtctggccggagctgtcgcttcccggcgcccattccgatatcggcggcgggtatctgccgcagctgtgggaagacctctttctcacccgcccgctggtggaaaccctgcctcataatcaaccaagcgcgcaatctcacgtttaccagcagacgatggcgcagctgcgcgtgctggagcattcgccggccatcatgcccgtcattcgtaccaacgctattaccccggaagtatgggaggacgatttagcgccagcggatcgctacagccagccgcaaaaacgcacctttgccgcgctgacgttgcgccatcgcacggtcagctatgactggtcgaaggttgcgctacgggtaatggtcgatgccgcagtcgaagctggggcgttgtttgctgacgtagacaaaaccagaggacatgcgctgcctgatgaactgaaaccgttatgcgaacatgcccgtgagatgggaaaagcagctcgccggcatgcagccgtcaacggtttttcgcctgaagacgtggatttgattgcccaaaactatatccactgctcggcccactggaacgccgtagatctcagacagaacggggaattacagggtggcgcttcagcctgcgaaaccatcagctttgtgaaccggccggacgaggactggctaagaacgatttacaacatggacggaaaaaaacgatga

SEQ ID NO: 74087 - DNA, 129 bp, Citrobacter koseri
atgttaaattatagtgagtacggaaagaagtatcttattatcagcgtagtcatatgcaaaaaatccccagcaatgtatgccggggatttgtgtctacaaattaaagtgtatgttcagtacgggcgatga

SEQ ID NO: 74088 - DNA, 2433 bp, Citrobacter koseri
atgaccacactgaaactggatacgctcagcgaccgcatcaaagcgcataaaaccgcgctggtgcacattgtgaagccgcccgtatgtacggagcgcgcgcagcactacaccgagatgtatcagcaacatctggataagccgattccggttcgtcgcgcgctggcgctggcgcaccatctggcggaacgcactatctggatcaaacatgacgaactgattatcggcaaccaggcaagcgaagtgcgcgccgcgccgatcttcccggaatacaccgtctcttggattgaaaaagagatcgacgatctggccgatcgccctggcgccggttttgcggtcagcgaagagaacaagcgcgttttacacgccgtgtgcccgtggtggcgtggtcagacggtacaggaccgctgctacggcatgtttaccgatgagcaaaaaggtctgctggaaaccggcatcattaaagccgagggcaacatgacctccggcgacgcgcatctggcggtaaacttcccgctgctgctggaaaaaggtcttgatggtctgcgtgacaaggtggcagaacgccgttcgcgcattaacctgaccgtactggaagacctgcacggcgagcagttcctgaaggcgattgatatcgtactggaggcggtcagcctgcacatcaaacgttttgccgacctggcgcgtcagatggcggcgacagaaagccgtgaaagccgccgtgacgaactgctggcgatggcggagaactgcgatctcatcgcccatcagccgccgcagacgttctggcaggcgctgcaactgtgctatttcatccagctgattttgcaaatcgagtctaacggccactccgtttcgtttggacgtatggaccagtatctctggtcgtattaccgtcgtgatgtggagcaaaaccagacgctggatcgcgaacacgcgattgaactgctgcacagctgctggctaaaactgctggaagtgaacaagatccgctccggctctcactccaaagcctctgcgggcagcccgctgtatcagaacgtcaccattggcggtcagagtctggtcaacggtcagccggtggatgcggtcaatccgctctcttacgctattctggagtcctgcggccgcctgcgttccacccagccaaacctcagcgtgcgctatcacgccggaatgagcaacgacttcctcgatgcctgcgtgcaggttattcgctgcggctttgggatgcccgcgttcaacaacgacgaaatcgttatcccggaatttattaaactcggtatcgacccacaagacgcttacgactacgcggccatcggctgtatcgaaaccgccgtgggcggcaaatggggctaccgctgcaccggcatgagcttcattaactttgcccgcgtgatgctggcagcgctggaaggcggtcgcgacgccaccagcggtaaggtcttcctgccgcaggaaaaggcgctctccgccggtaacttcaccagcttcgatgaagtgatggacgcctgggatacgcagattcgctactacacgcgcaaatcgatcgaaatcgagtacgtggttgacaccatgctggaagagaacgtccatgacattctctgctcggcgctggtggatgattgcatcgaacgcgcgaagagcatcaagcaaggcggcgcgaaatatgactgggtttccggtttgcaggtcggtatcgctaacctcggcaacagcctggcggcggtgaaaaaactggtctttgaacagggggctatcggccaacagcagcttgccgccgcactggccgatgactttgaaggcctcactcacgaacagttacgccagcggctgatcaacggcgcgccaaaatacggtaacgacgatgacaccgtcgataccctgctggcccgcgcttatcagacctatatcgacgagctgaagcagtatcacaacccgcgttacggtcgcggcccgaccggcggcaactattacgccggaacctcgtccatctctgcaaacgtaccgtttggcgcggcaacgatggcgacgccggatggccgtaaagcgcataccccgctggcggaaggggcaagcccggcttccggtactgaccatctcggtccaacggcggttattggctccgtcggcaaactgcctaccggctcaattctcggcggcgtgttgctgaaccagaagctgaacccggcgacgctggagaacgaatccgacaagcagaagctgatgatactgctgcgcactttcttcgaagtgcataaaggctggcatattcagtacaacatcgtgtcgcgcgaaacgctgctggacgcgaagaagcacccggatcagtatcgcgatctggtggtcagggtggccggttattccgccttctttaccgcgctgtcgccggatgcgcaggacgatatcatcgcccgtactgaacatacactttaa

SEQ ID NO: 74089 - DNA, 900 bp, Citrobacter koseri
atgattttcaatattcagcgctattctacccatgatggccccggcattcgcaccgttgtcttcctgaaaggctgctcgctgggctgccgctggtgccagaacccggaaagccgcgcacgcgccagagatctcttatacgatgcgcgcctgtgccttgacgggtgcacgctgtgcgcgcaagccgcgccagaggtgatcgaacgcgcgctgaacggcctgcttattcatcgcgaaaaactgaccgatgcgcatatggatgccctcacccactgctgccctactcaggcgttaaccgtctgcggcgaaacaaagcgcgtggaagagatcatggacaccgtactgcgcgacaagccgttttacgatcgcagcggcggcggtataacgctctccggcggcgagccctttatgcagccggaactggccgccgcgttgttcaaagccagccatgatgcgggtatccataccgcggtcgaaacctgtctgcacgtaccgtggaaatatatcgaaccgtccctgccgaatgtcgatctgttcctcgccgatttaaaacacgttgccgaggcgccgtttaagcagtggaccgatggcagcgcttctcgcgtactggaaaacctgaaaaagctcgctgccgccggtaaaaaaatgatcatccgcgtgccgctcattcagggttttaacgccgatgaagaggcgatcaaagccattaccgattttgccgccgacgaactgcacgtcggtgagatccattttctgccctatcacacgctgggcatcaataaataccacttactcagtcagccctactatgccccggacaaaccacttgatgcgcccgcgttgcttgattttgcgcagcagtacgccagcagcaaaggtttaaccgcgactttacgaggataa

SEQ ID NO: 74090 - DNA, 663 bp, Citrobacter koseri
atggaactctatctggatacgtctgacgttgaggccgtgaaatcgctggcgcgtatattcccgctggcaggggtgacgacgaatcccagtatcgtggcggcaggtaaaaaaccgttggaggtgttactcccggaattgcacgacgcgatgggcgggcaggggcgtttattcgctcaggtgatggcgagcacggcgcaaggaatggtcagcgatgcgcgtaagctgcgggcgattattcctgatatcgtggtaaaagtgccggttacagccgaaggactggcagcgattaaattgttgaaagcggaaggtattccgacgctggggacggcggtttacggcgcggcgcagggactgttatccgcgctggcgggcgccgactacgtggcgccttacgttaaccgcgtggacgcacagggcgggaacggtattcagacggttaatgatttgcagcagctactgaaaatgcacgccccgcacgccaaagtgctggcggccagttttaaaacgccgcgtcaggcgctggactgcctgttggccgggtgtgaatccatcaccctgccgctggatgtcgcgcagcagcttatcagttacccggctgtcgatgccgcagtagcgaagtttgagcacgactggcaaggcgcgttcggacgaacgtcactttga

SEQ ID NO: 74091 - DNA, 768 bp, Citrobacter koseri
atggcggaactcagcgaccaggagatgatgcgctacaaccggcaaatcattctgcgagggttcgattttgaaggacaggaagcgctaaaggatgcgcgggtgctggtcgttggcctgggtgggctcgggtgtgcggcaacgcagtacctcgcgggcgcgggcgttgggcagctcacgctgctcgattttgacaccgtttcagtgtcgaacctgcaacgccagacgctgcacagcgatgccaccgtcgggcagccgaaggtggattcggcgcgcgaggcgctggcgcgcatcaacccttatatcacccttacaccgatcaacgccctgctggacgaaccggcgctgaatgcgcttatcgccgggcacgatctggtgctggactgtactgacaatgttgccatccgtaatcagcttaatgccggatgtttcgccgccaaagtgccgctggtttccggcgccgccatccgtatggaaggacagatcaccgtctttacctggcaggaaggcgaaccctgctaccgctgtctgagccgtctgtttggcgagaacgccctcacctgcgtggaagcgggcgttatggcgccgctgataggggtgatcggttcattgcaggcgatggaagccatcaaattgctggcgcattacggtcaacccgcatccggcaaaattgtgatgtacgacgcgatgacctgtcagttccgcgaaatgaaattaatgcgcaatccaagttgcgaggtgtgcggagcaccggagccggatggcggctga

SEQ ID NO: 74092 - DNA, 1236 bp, Citrobacter koseri
atggaatttaccgccggactgatgccgcttgaaacggcgctcacccagatgttgtcgcgcattacgccactcacggcattcgaaaccctgccgctggttcactgttttggccgcatcctggcaaacgatgtggtctccccgctggacgttccgggattcgataacgctgcaatggacggttacgcggtgcgtttggcggatctgaccgctggtcaaccgctgccggtggcggggaaagcctttgccgggcaaccgttccagggggaatggcctgctggcgcctgtatccgcattatgaccggcgcgccggtgcctgcggggtgtgaggcggtggtcatgcaggaacagacggagcaaaccgacgaaggcatccgctttaccgctgacgttcgtaacggacaaaacatccgccgccgtggggaagacatcacccatgacgccgtggttttcccggcggggactcgcctgaccaccgcagaactgccggtactggcttcgctgggcatcgccgaagcgcaggtcgtgcgcaaagtgcgcgtggcgctgttctccaccggcgatgagctgcaattgccgggtcagccgctgggcgacgggcaaatttatgacaccaaccgcttaaccgtacacttgatgcttgaacagttaggctgcgaggtgatcaatctcgggatcattcgcgataacccgcagcagctacgcgccgcctttatcgaagccgacagccaggccgatgtggttatcagctctggcggcgtttcagtgggcgaggcggattacaccaaaacgatccttgaagagctgggggaaatcgcgttctggaaactggcgattaaacctggcaaaccgttcgccttcggtaaactgagcaacagctggttctgcggtctgccgggcaacccggtctctgcggcgctgacgttctatcagctcgtgcagccgttgctggcgaaacttagcggcaatatcgccagcggtctgccagcgcgtcagcgcgtgcgtaccgcttcacggctgaagaaaacgccgggccgtcttgattttcagcgcggcattctgcaacgcacggctgacggcgaactggaagtcaccaccacgggacaccagggttcgcatattttcagctcctttagcatgggtaactgttttattgtgctggaacgcgatcgcggtaacgttgacgcgggcgaatgggtggaagtcgagccgtttaacgcgctgtttggaggcctgtaa

SEQ ID NO: 74093 - DNA, 942 bp, Citrobacter koseri
atgggcaaagcagtcattgctattcacggcggcgcaggcgcaattacgcgcgcacagatgagccaggagcaggaacagcgctatattcaggcgctgtcggacatcgtcgaaacaggacagaaaatgctggaggcgggcgaaagcgcgctggatgtggtgacggaagcggtgcgtttgctggaagagtgcccattatttaatgccgggatcggcgcggtttacacgcgcgacgccacccacgaactggatgcctgcgtcatggacggcaatacgcttaacgcaggcgctgtcgctggcgttcgccatttacgcaacccggtgctggccgccaggctggtgatggagcaaagcccgcatgtgctgatggtgggggacggggcggaagcgtttgcggcttcccgggggatggagcgtgtttctgccgatcttttctccacgcctgagcgctatgcgcaactgctggcggcgcgtgacgccggagagacggtgctcgaccatagcggcgcgccgttggatgaaaccaccaaaatgggcaccgtgggcgcggtggcgcgggatcggtttggtaatctggcggcggccacgtcgacgggcggcatgacgaataaactgcctggtcgcgtaggcgacagcccgctggtcggggctgggtgttacgccaacaacgccagcgcggcggtttcctgtaccggaacgggcgaggtgtttatccgcgcattggcggcctacgatatcgccgcgctgatggactacggcggactcagcctggcggaagcctgcgagcgtgtggtcatggagaaattgcctgcgctgggcggcagcggtgggctgattgccgtcgatcacgaaggcaacgtcgccctaccttttaacagcgaaggcatgtatcgcgcctggggatatgccggagatacgccaacgacggggatctaccgggagtga

SEQ ID NO: 74094 - DNA, 1872 bp, Citrobacter koseri
gtgccacacagtcacgaattagatgccagcgacgtactggcggtcaaaaatttgaacattgcgttcgagcaggagcagcaacgcgtcagcgcggtgcgcaatgtgtcgtttcggcttcagcgaggcgaaacgctggcgattgtcggcgaatcgggatcggggaaatccgttacggcgttatcgttgatgcgcctgatcgagcaggcgggcggcgacgttcactgcgatcagatgctgctgcggcggcgtaatcgccaggtcattgaactgggagagcaaagcgatgcgcagatgcagcgcgtgcgcggcgcggatatcgccatgatctttcaggagccgatgacctcgcttaacccggtatttaccgtgggcgagcagattgccgagtccattcgtctgcatcagggggcgagccgcgaagaggcaatggcggaagcgaaacggatgcttgaccaggtgcgcattcctgaatcgcaggccatcttatcgcgttacccgcatcagctttccggcgggatgcgccagcgggtgatgatcgcgatggcgttgtcgtgccgcccggcggtgctgattgccgatgaaccgaccaccgcgctggacgtcacgattcaggcgcagatcctgcaactgatcaaagtgctgcaacaggatatgtcgatgggggtgatttttatcacccatgatatgggcgtggtggccgatattgccgaccgcgtcctggtgatgtatcagggcgaagcggtggaaaccggcagcgttgagcaaattttccacgcgccgcagcacccttataccaaagcgctgctggccgccgtgccgcagttaggcgagatgagcggacacgatctgccgcgccgctttccgctgatttcactgaacgatcccgatcgtgtggaaccgcaaactgagcaggacacggtggtggcaggcgatccaatcctgcaagtgcgcaacctggtgacgcgttttccgctgcgtagcggcattcttaaccgcgtgacccgtgaagtgcatgcggtggaaaacgtcagctttgatctctggcctggcgaaacgctctcgctggtgggggagtccggctgcggtaaatcgaccaccgggcgggcgctgctgcggctggtggagtcgcaggctggcgaaattaccttcaacgggcggcggatcgacacgcttcctgccggtaagttacagccgctacggcgagatattcagtttatttttcaggacccttacgcttcgctcgacccgcgccagacggtgggttactccataatggaaccattgcgggtgcatggtttgctggaaggcgaggcggccgcgtcgcgggtggcgtggttgcttgagcgcgtaggattgcgcccggaacatgcgtggcgttatccgcatgagttttctggcggccagcgtcagcgtatctgcatcgcccgcgcgctggcgctgaatccaaaagtgattatcgccgatgagtcagtctccgcgctggatgtctcgattcgcgggcagatcattaatctgttgctcgatttgcagcgggaaatgggcatcgcgtatctgtttatttcacacgatatggcggtggtggagcgcatcagccatcgcgtggcggtgatgtatctggggcagattgtggaaatcggcccccgccgggcggtgtttgaaaatccgcagcatccctatacccgtaaattaatggcggcagtaccggtggccgatccttcccggcacaggccgcagcgcgtgctgctgtcggacgatatccccagcaacattcgtaaacgtggggaggagatcgcgcccgctccattgcagttagtcgggccggggcattatgtcgcgcgcccgcaggcagaaaatgtgttatcgcgtttataa

SEQ ID NO: 74095 - DNA, 1539 bp, Citrobacter koseri
atgacaacatttgtaacccgtaattggctggttgcgctgggcgtcgcttctgcactggcggcatctccggcgtttgctgctaaagatgtggtggtagcggtaggctctaatttcaccacgctcgatccgtacgatgcgaacgacaccttatcgcaggcggtggcgaagtcgttttatcaggggctgtttggtcttgataaagacatgaagttaaaaaatgtgctggctgaaagctacaccgtttccgacgatggcctgatctacaccctgaagctgcgccagggggtaaaattccaggacggcaccgactttaacgcagcggcggtgaaggccaacctcgatcgcgcgagcgatccagaaaaccatctcaaacgctacaacctgtataaaaacatcgataaaaccgaagcggtcgatccgacgacggtaaaaattacgctgaaacaaccgttctcggcgtttatcaatattctggcgcacccggcgacggcgatgatctctccggccgcgctggagaaatacggtaaggacattggctttcatccggtcggcaccgggccgtatcagctggatacctggaaccagactgatttcgtgaaagtgaagaaatttgccgattactggcagaaaggcttacctaaactggatacgatcacctggcgtccggtaacggacaacaacacccgcgcggcaatgctgcaaaccggggaagcgcaatttgcgttcccgatcccttacgagcaggcgacaattctggagaaaaacaaaaatctacagttggttgccagtccgtcgatcatgcagcgttacatcagcatgaacgtgacgcaaaaaccgttcgataatccgaaggtgcgggaagcgctgaactacgccatcaaccgtcaggcgctggtcaaagtggcctttgccggttatgcgacgcctgccacgggcgtggtgccgccagccattgcgtatgcgcagagctacgcgccgtggccttacgatccggcgaaagcgcgcgaactgctgaaagaggcgggctatccgaatgggtttagcaccacgctgtggtcgtctcataaccacagcaccgcgcagaaagtgctgcaatttacgcaacagcagctggcgcaggtcggtattaaggcgcaggtaacggcgatggacgccgggcagcgtgcggcagaagtggaaggcaaggggcagaaagagagcggtgtgagaatgttctacaccggctggtcggcttccacgggggaggcggactgggcgttgtcaccgctgtttgcctcgcaaaactggccgccaacgctgttcaatactgcgttctacagcaacaagcaggttgatgacgacttagcggcagcgctgaaaaccaacgatccgcaggagaaagcgcgcctgtataaagaggcgcaggacaccctctggaaagagtccccctggattccgctggtggtggagaaactggtctcagcccacagtaaaaatttgacgggtttctggatcatgccggacactggcttcagttttgatgacgcggatttgcagtaa

SEQ ID NO: 74096 - DNA, 921 bp, Citrobacter koseri
atgcttaattatgtgcttaagcgcctgctggggttgattccgactctgtttattgtggcggtgctggtgtttttatttgttcatctgttgcctggcgatccggcgcggctgattgccgggccggaggctgacgcgcaggtgattgaactggtgcgacagcagcttggtctcgatcggccgttgcatgtccagttctggcattacatgactaacgtgttgcagggtgatttcggcacgtcgatggtgtctcggcgtccggtatcggcagagattgccagccgctttatgccgacgctgtggttgaccatcaccagtatggtatgggcggtactgttcgggatgaccgccggaattatcgccgccgtctggcgtaatcgctggccggacagactcagcatgacgctggcggtaaccgggatttcgttcccggcgttcgcgctggggatgctgctgatgcagatattctccgttgagctggggtggttgccgaccgtgggcgcagatagctggcagcactatattcttccctccatcacgcttggcgccgccgttgcggccgtgatggcgcgctttacccgagcgtcgtttgtggatgtcctcagtgaagactatatgcgcaccgcgcgcgcgaaaggggtcagcgaaacctgggtggtgctgaaacacggtctgcgtaacgccatgatcccggttgtgaccatgatggggttgcagtttggctttctgctcggcggttcgattgtcgtcgagaaggtcttcaactggcccggactggggcggttgctggttgattcagtggaaatgcgcgactacccggtgattcaggctgaagtgctgctgttttctctggagtttattcttattaatttagtggtggatgtgctttatgccgccattaacccggctatcaggtacaagtaa

SEQ ID NO: 74097 - DNA, 912 bp, Citrobacter koseri
atgcgattatttaactggcgccgtcaggcggttttagatgccatgccgttggtcaaacccgaccgggtgcgtacgccgtggcatgaattctggcggcgttttcgccgtcagcatgtggcgatgatcgcagggatatttgtgctgttgctgatcctggtggcgatattcgcccgctggctaacgcctttcgatgcggaaaattactttgattacgatcgcctgaatgacggtccttcggcggcgcactggtttggcgtggactcgctggggcgggatattttcagccgcgtcctggtcggggcgcaaatttcgctggcggcaggcgttttcgccgtctttatcggcgcggcgctcggcacggtgcttgggctggtcgcgggctattacgaaggctggtgggaccggctgattatgcgtatttgcgatgtgctgtttgcgtttccaggcattctgttagcgattgcggtcgtggcggtgctcggtagcggtattgcgaatgtgattatcgccgtcgccatcttttctatccccgcgtttgcccgtctggtgcgcggaaacacattagtgctgaaacagcagacgtttattgagtcggcgcgcagtattggcgccagcgacgcgacgattttgttcaaccatattttgcccggcacggtctcgtcgatcgtggtctttttcactatgcgcatcgggacgtcgattatttctgcggcaagcctgtcgtttctggggttaggcgcgcagccgccaacgccggagtggggggcgatgctcaatgaagcgcgggcggatatggtcatcgcgccgcatgtggcgatttttccggcggtggcgattttcctgacggtgctggcgtttaacctgctgggcgacgggctgcgcgacgcgctggacccgaagattaaggggtga

SEQ ID NO: 74098 - DNA, 1326 bp, Citrobacter koseri
atgagcaatgtaacccgccagccgaaaatcggcttcgtttccctgggctgcccgaaaaacctggttgattcggagcgaatcctgactgaactgcgtaccgaaggctatgacgtcgtaccgagctacgacgacgccgacatggtgatcgtcaatacctgtggctttatcgacagcgccgtacaggagtctctggaagcgattggtgaagcgctgactgaaaatggtaaggtgattgtcaccggctgcctgggcgcgaaagtcgatcagatccgtgaagtgcaccctaaagtgctggaaatcaccgggccgcatagctatgagcaggttctggaacacgttcaccattacgtaccaaaaccaaagcacaacccgttcctgagcctggtgccggaacagggcgttaagctgaccccgcgtcactacgcctacctgaagatttctgaaggctgcaaccatcgctgcaccttctgcattattccgtccatgcgcggcgatctggtcagccgtccgattggcgaagtgttaagcgaggccaaacgtctggtcgatgcgggcgtgaaagagatcctcgtcatctcccaggatacctccgcttacggcgtggatgtgaagcaccgcaccggtttccacaacggcgagccggtaaaaacgagcatgatcgacctttgcgagcagttgtcaaaactgggcatctggacgcgcctgcactacgtctacccttatccacacgttgatgacgtgatcccgctgatggcggaaggcaaaatcctgccgtatctggatatccccctgcaacatgccagcccgcgcattctcaaactgatgaagcgtccgggcgctgtcgatcgccagctggcgcgcatcaaacagtggcgtgagatttgcccggaactgaccctgcgttcgacctttatcgtcggtttccctggcgagacggaagacgatttccagatgctgctcgacttcctcaaagaggcgcgcctggatcgcgttggctgcttcaagtacagcccggtcgaaggcgctggtgcgaacgcgctgccggatcaggtgccggaagaggtgaaagaagagcgctggaaccgctttatgcagctgcaacagcagatctccgcagaacgtctgcaagagaaagtggggcgcgaaatcctggtcattatcgacgaggttgacaaagaaggcgcgattggccgcagcatggccgacgcaccggaaatcgacggcgcggtctacctcaacggtgaaaccaacgttaaacccggcgacgttatccgcgtgaaagttgataacgccgacgaatatgacctgtggggcagccgcgtttaa

SEQ ID NO: 74099 - DNA, 384 bp, Citrobacter koseri
atggtcgttgacagactaagaaccgagctacttaacaagctgataaacgcccgaatcgatctcgccgcttatttgcagttaagaaaggcgaaaggctatatgtcagtcagcgaaagtgatcatctgcgtgacaacttttttgaactgaatcgtgggcttcacgataaatcactgctgcaaggtctgcatctggatcaggaagaatggaatgctttacatcgtgctgaaggcgcactggcagccgccgcagtatgtctcatgagcggacaccatgactgtccgacgtttatcgccgtcaacgcagagaaacttgaaaactgtctgacaacattgacgctgagtatccagagcctgaaagcgcaatcaccgcttgaacaggtctaa

SEQ ID NO: 74100 - DNA, 1116 bp, Citrobacter koseri
atgcgtcggacacttttctctgttgccttattggcactgttttctcctttcgtgaatgcagaaactccggcggtgaaggtggaggttttgcagaccaaacttgatcatccctgggcgctggcttttctgccggataaccgcggtatgttgataactctcagaggcggccagcttcgtcactggcaggcgggtaaagggctttccgatccgataacgggcgtgccgaaggtctgggcgaacgggcaggggggattactggacgtggcgctcgcgcctgattttgagcagtctcgccgcgtctggctcagtttttctgaggccgatcgcgaggggaaagccggaacggcggtaggcttcgggcgactcagcgatgacctgaagcatctggaggaattccagaccgtttttcgtcagatgccgaaactctcaaccggtaatcatttcggcggacgactggtttttgatggcaaaggccatctgtttatcgggcttggcgaaaataatcagcgccctaccgcacaggatctggacaagttgcagggcaaagtggtgcgcctgaccgaccaggggagcgtgccgccggataatccctttgtgaatcagaccggcgcgcgccctgagatctggtcgtacggcatacgtaacccgcagggtatggcgataaacccgtggagcgatgcgttgtggttgaatgagcatggcccgcgcggcggcgatgaaatcaatatccccgaaaaaggtaaaaattatggctggccgctggcaacctggggcatcaactacagcggctttaaaatcccggaagcgaaaggtgaaattgtcgagggaacggagcagccgatcttctactggaaaaaatcgccagcggtcagcggcatggcgttttataacagcgacacgttccctcaatggaagcagaaactgtttatcggcgcgctgaaagagcaggatgtgattgtcctgagcgttaacggcgataaggtgacggaggacggacggattctgggcgacagagggaaacgtattcgcgatgtgcgcgcaggacccgacggttatttatatgtcttaaccgacgagtccgacggagaactgctgaaagtcagcccacgcgcttag

SEQ ID NO: 74101 - DNA, 627 bp, Citrobacter koseri
atgattacgctgtggggacggaataactcaaccaacgtcaaaaaagtgcgatggacgctcgacgaactggagctgccttatacgcaaattctggcaggcgggcagttcgggctgaatcatgacgctgactatctggcgatgaacccgaatggcctggtgccgctgctgcgcgatgatgaaacggacgttttgctctgggagtccaataccatcgtccgctatctggcggcgcagtatgggcaaaagcgtctgtgggtagactctccggcgcgacgggcagaaggggaaaagtggatggactgggcaaaccagacgttaagcccggcgcatcgcgtgatcctgatgggtttagtccgcaccccgccggagcagcgcgaccaggcggcgatcgacgccggcgccaacgtctgcgacggcctgtttggcattcttgatgaggcgctggccagccagacctggttctccggcgcggagttcggcacggcggatatcgcgatcgcccccttcgtctacaacctgtttaacgttggcctgagctggacgccgcgccctcaccttgagcgctggtatcagcaacttaccgaacgtccggcatttcgtaaaacggtgatgatcccggtcagctaa

SEQ ID NO: 74102 - DNA, 1203 bp, Citrobacter koseri
atgacgcaatactcttcttcccttcgtagtcttgctgcgggttcagcactcttattcctttttgcgccgacgttacaggcggctgagcagacaacggcgccgccgagcgttgatgcgcgcgcgtggattttaatggactattccagcggcaaggtgctggcggaaggcaacgccgacgagaaactggaccccgccagcctgaccaaaattatgaccagttacgtcgtcgggcaggcgctgaaggccggaaaaattcagctcacggatatggtgacggtaggaaaagacgcctgggccacgggcaacccggctctgcgcggttcgtcggtcatgtttcttaagcccggagatcaggtctcggtatccgatctcaacaagggtgtgatcatccagtcgggtaacgacgcctgtattgcgcttgcggattatgttgccggaagccaggagtcgttcattggtttgatgaatggttacgcgaaaaaactggggctgaccaacacaacgttccagacggttcacggcctggatgcgccggggcagtttagtaccgcgcgtgatatggcgctgctgggcaaagcgctgatccatgatgtgccggaagagtacgccattcacaaagaaaaagagttcactttcaacaagattcgccagccgaaccgtaaccgcctgctgtggagttctaatctgaacgttgacggcatgaaaaccgggacaacggcaggcgccggatacaatctggtggcctctgcgactcagggagatatgcgtttgatctccgtcgtgctggggacgaaaaccgatcgcatccgttttaatgagtcagagaaattgttgacctggggcttccgcttctttgaaacggtgacacccattaaacctgacgcgacgttcgtgactcagcgcgtctggtttggggataagagcgaggtgaatctgggcgcgggagaggcgggttccgtgacgattccacgcggacagctgaaaaacctgaaggccagctttacgctgacggaaccgcagctaaccgcgccgttgaagaaaggccaggttgtcggcactatcgacttccagctcaacggaaagtccattgaacagcgtccgctgatggtgatggaaaacgtggaagagggcggcttctttgggcggatatgggacttcgtcctgatgaaattccaccagtggtttggcggctggttctcttaa

SEQ ID NO: 74103 - DNA, 759 bp, Citrobacter koseri
atggaaacacgacgcgacgagcgtattggtcaattgctgcaagcgctaaaacgcagcgataaattacacctgaaagaagccgcgactctgctgggcgtatcggagatgaccattcgtcgcgacctgaataataaaagcgcgcccgtcgtgttactgggcgggtatattgttctggaaccccgcagcgccagccattatttattgagcgatcaaaaatcccgcctggttgaagagaagcgccgcgccgcgcagctggccgccggtctggtacaggcgcatcagacgattttttttgactgcggcaccaccacgccgtggatcattgaagccattgataacgaattgcctttcaccgccgtctgttattccctgaatacgtttctggcgctccaggaaaaacccctgtgccgggcgattctgtgcggcggggaatttcacgccagcaacgccattttcaaaccgctcgattttcaggaaaccctgaataatatctgccctgatatcgccttttattccgccgcaggcgttcatatcagcaaaggggcaacctgttttaacctcgaagagctgccggtgaaacactgggccatgtcgatggcgcaataccatgtcctggtggtggatcacagtaaattcggcaaggtgcgacccgcgcggatgggggaattaacgcgttttgatgcggtagtgagtgactgccgccctgacgatgagtttgtcgattatgccaaagcgcagcgcattacgttgatgtattga

SEQ ID NO: 74104 - DNA, 609 bp, Citrobacter koseri
atgctggaaaaccttaacaactcgctgttttacttaatcaatgccacccccgactccgcacagtggatgatcgccctggccattttcattgccagagatttgattaacatcgtgccgctgctggccgttgtgctttggttatgggggccgcgcgatcgggtctgcgctcaacgccagctggtgattaaaatgggtatcgcgctgctcatcagcctgacgatctcctggataatggggcatcttttcccgcacgatcgtccttttgtcgatcgtatcggctataacttcctgcatcacgcgcccgatgactccttcccgagcgaccacggcaccgttgtctttacctttgcgctggcgtttttattctggcaccgcgtctggtctggcgtactgctcatggcgctggccgtgacggtcgcctggtcacgcgtttacctcggcgttcactggccgctggatatgctcggcggtttgctggtcgggatgatcggctgcctgagcacgcaaatgctgtggcaaaaatatggggttgctctctaccacggcctacaaacgtgctaccgcgtctgcttcgcgctgcccattcgtaaaggctgggtacgtgactaa

SEQ ID NO: 74105 - DNA, 1233 bp, Citrobacter koseri
atgcaaaacctttcacaaacaggcgtccggctcggacgtcaggcactgcttttccctctctgtctggtgctttacgaattttctacgtatatcggcaacgatatgatccagccggggatgctggcggtggtggaacagtatcaggccgggatcgactgggttccgacctcgatgaccgcctacctggcgggcgggatgtttttgcagtggctgttagggccgctgtcggatcgtattggacgccgcccggtgatgttagcgggcgtgatctggtttatcgtcacctgccttgccacactgctggcgcaaaacattgaacagttcaccctgctgcgttttttgcagggggtaagcctgtgctttattggcgccgtggggtacgccgccattcaggaatcctttgaagaagcggtgtgtatcaaaattacggcgttaatggctaacgttgccctgattgcgccgctgctggggccgctggtgggcgccgcctgggtgcatgttctgccgtgggaagggatgtttgttctgtttgccgtactggcggcgattgcttttgtcggcttacagcgcgcgatgccggagaccgcgacccgcctcggcgagaagctgtcgcttaaagaactggggcgggattacaagctggtgctgaaaaacgtgcggtttgttgccggcgcgctggcgctggggttcgtcagcctgccgctgctggcgtggattgcccagtcgccgatcattatcatcagcggtgagcagctcagcagctatgaatatggcttgttgcaggttcctgtctttggcgcgctgattgccgggaatctggtgctggcgcggttgacttcccggcgaacggtgcgcgcattgattatcatgggcggctggccgattgtggcgggattgctgatcgccgcagccgcgacggtggtctcttcccatgcatatttatggatgacggcgggtctgagcgtctacgcctttggcatcggcgtggcgaacgcggggctggtgcgtctgaccctgttcgccagcgatatgagcaaaggcacggtttctgcggcgatggggatgttgcagatgctgatctttaccgtgggtattgaagtgagcaagcatgcttatctgagcggcggcaacggcttattcagcctcttcaacctggcgaacggcattctctggctgctgctgatggttatcttcctgaaagacaaacgggttggggattcacgggaagggtga

SEQ ID NO: 74106 - DNA, 816 bp, Citrobacter koseri
atgggtatcaagctaattgcggtagacatggatggcacctttttgagcgatcaaaaaacctataatcgcgaccggtttatggcgcagtatcggctaatgaagcagaaaggcatccgttttgtggtcgccagcggtaatcagtattaccagttaatctctttctttccagagatcgcccacgaaatcgcctttgtcgctgaaaacggcggctgggtggtcagcgagggcgaagacgtgttcaacggcgaactggcgaaagaggattttgctgccgttgtcgatcatctgctgacccgcgcggatattgaaatcatcgcctgcggtaaaaacagcgcctataccctgaaacagtacaacgatgaactgaaacaggttgcggcgatgtactaccatcgccttgagttcgtggacagcttcgacaacatcaatgatgtgttctttaaattcggcctcaacattactgatgaccgtattccccaggttcagacggcgctgcatgatgcgattggcgatatcatggtgccggttcacaccggttacggcagcatcgatttgatcattcccggcgtacacaaagcgaacggcttgcgtctgctgcaacaacgctggggtattaacaatgatgaggtcgtgacgtttggcgacggcggcaatgatattgagatgctgcgtcaggccggattcagttttgcgatggaaaacgccggggcggcggtggcctctgcggcgaaatatcgggcgggctcgaataacgcggaaggcgtgctggacgttatcgaccgcgtgctgaaaaacgaagccccgttctgtgggtaa

SEQ ID NO: 74107 - DNA, 1209 bp, Citrobacter koseri
atgaccgccatctcatcacgtaaagccttaagacgccggacctgggcgctttttatgttcttcttcttgcctgggctgttgatggcctcatgggcaacccgcacccccgccattcgcgatatcctttcggtatcaacggcagaaatgggggcggtgctgtttgggctttccatcggttcgatgagcggtattctgtgttccgcctggctggtaaaacgatttggcacgcgtaacgtcattcagactaccatgtcctgcgccgttgcggggatggttatcctcagcattgcgctgtggttcgcttctccgctggtttttgcgcttggcttaggcgtattcggcgccagctttggcgccgccgaagtcgctatcaacgtcgaaggggcggcggttgaacgtgaaatgaataaaaccgtcctgccgatgatgcacggtttttacagcttcggtacgctggctggcgctggcgtcggcatggcgctaaccgcctttaacgtccctgccaacgctcatatcctgctggcggctctcatcgcgatcgtccccatttttattgctattcgcgctattcccgacggcacggggaaaaacgccgccgacggcgcccacacaacggaaaaaggcgtacctttttatcgcgatgcccagctactgttgatcggcgtggtggtactggcaatggccttcgctgaagggtccgccaacgactggctgccgcttctgatggtggatggtcacggcttcagcccaacgtccggctcgctgatttatgcgggctttacgctcggtatgaccgtcgggcgctttaccggcggctggtttatcgaccgttatagccgcgtggcggtagtccgcgccagcgcgctaatgggagcgctcggtattggtctgattatcttcgtcgacagcgcctgggtcgcgggcgtttccgttattctctgggggcttggggcgtcgcttggcttcccgctaacgatttcagcggccagcgataccggcccggacgcgccaacccgcgtcagcgtggtggcgacaaccggttatctggccttcctggtggggccgccgctgctgggctatcttggcgaacattatggtttgcgcagcgcaatgctggttgtgctggcgctggtcatcctggccgctcttgtcgcgaaggctgtcgccaaaccaacatcgaacactcaatctgttatggagaatagttaa

SEQ ID NO: 74108 - DNA, 543 bp, Citrobacter koseri
gtgcgacgagctaacgatcccctgcggcgagacaaaatcgttcaggccacgcaggaagcgataataacgcatggcattcacggcgttacgcaccgcaaaatcgcggcgatagcgcaggtgccgctcgggtcgatgacctattatttttcgggaatcgatgagttgctgatcgaggcgttaagccggtttacagaaacaatgtcgcaccagtttcagtcattctttgccgatgtcacgaacgttcaggacgcctgtcacgccattaccgacatgatctacagctcgctggtgaccacgccagataatatggagctgatgtaccagctgtatgccttcgccagccgaaaaccggcgctgaaaacggtgatgcagaactggatgcagcgcagtcagcaaacgctggagcagtggtttgaaccggtgaccgcccgcgcgctggacgcgtttatcgaaggcatgaccctccatttcgtcaccgacagagcgcctttaacgcggaaagatattctggtcatggtgaagcgtattgccgggcaggcgtga

SEQ ID NO: 74109 - DNA, 1686 bp, Citrobacter koseri
gtgaatataaacgtcgcagatttgttaaatgggaattacatcctgttattatttgtggtcctggctctcgggctatgtctgggtaagttacgcctgggttcagtccaactcggtaattccattggcgttttagtggtctccctattattagggcagcagcactttagtattaacaccgatgcactaaatctgggctttatgctgtttattttttgtgtcggcgtcgaagctggccccaactttttttctattttttttcgcgacggcaaaaattacctgatgcttgctctggtcatggtcggtagcgcgctgctgatcgcattagggctgggtaagctctttggctgggatatcggcctgaccgccggtatgctggcgggctccatgacctcgacccctgtgctggtcggcgcaggcgacacattacgccattccggtatggagagttcgcagctctcggtcgcgctggacaacctgagcctgggctacgcgctgacctacctcatcggcctggtcagcctgattgtcggcgcacgttacctgccgaaactgcaacatcaggatctgcaaaccagcgcccagcagattgcccgcgagcgcggcctggataccgacgccaaccgcaaggtctatctgccggtcatccgcgcttatcgcgtcggcccggaactggtggcctgggccgacgggaaaaatctgcgcgagctgggcatctaccgtcagaccggttgctacattgagcgcatccgccgtaacggtattctggcgaacccggatggcgacgcggtattgcagatgggcgatgagattgccctggtcggttacccggatgcacacgcccggctggaccccagcttccgtaacggcaaagaagtcttcgaccgcgacctgctcgacatgcgcatcgtgaccgaagagatcgtcgtgaaaaaccacaatgccgtaggccgccgtctcgcccagttgaagctgaccgaccacggctgcttccttaaccgcgtgatccgcagccagattgaaatgccgatcgacgacaacgtggtgctgaataaaggcgacgtcttgcaggtgagcggcgatgcgcgtcgcgtgaaaaccgtcgcggaccgtatcggctttatctcgattcacagtcaggtaaccgatctgctggccttctgcgccttctttatcatcggcctgatgatcgggatgatcaccttccagttcagtaatttcagcttcggcatcggcaacgccgccgggctgctgttcgccgggatcatgctcggtttcctgcgagctaaccaccccaccttcgggtacatcccgcagggcgcgctgaacatggtgaaagagtttggtctgatggtctttatggccggcgtcggcctgagcgcgggcagcggcatcgggaacgggcttggcgcggtcggcgggcaaatgttgattgccggtcttgtggtgagcctggtgccagtcattatctgcttcctgttcggcgcttatgtattacgtatgaaccgcgccctgctcttcggcgccatgatgggcgcgcgtacctgtgctccggcgatggagatcatcagcgacacggcgcgcagcaacattccggcattaggctatgcgggaacctatgcgatagccaacgttctgttaacgctggcggggacacttattgtcatcatctggccgggcttaggataa

SEQ ID NO: 74110 - DNA, 378 bp, Citrobacter koseri
ttgaaacataaacaaggttgggcgggtgcaatctgctgctttgtactctttattgtggtgtgcctttcattaacgatgcatatgaaaggggcatttcgggttgccgggcatcctgagattgggctgttgttttttacgttacctggcgcggtggccagttttttttcccatcgcagagaagtcattaaacctcttatcggcgccatgctggccgcaccatgttgtctggtcctgatgcgatttgtttttatgcctacgcgctccgtatggcaagaactggcgtggttgttcagtgcggtgttctggtgtgcgctcggcgcgctttgctttttatttatcagcagcctgtttagtcagcgacgtaaaaagaaccgataa

SEQ ID NO: 74111 - DNA, 264 bp, Citrobacter koseri
atgtttaccgttatttttggtcgcccagggtgcccgtattgcgtgcgtgcgaaagagttagcagaaaaactgagcactgagcgcgatgattttaactatcgctatattgatattcatgctgaaggcattaccaaagcggatctggaaaaaaccgtgggtaaaccggtagagaccgtaccgcagatttttgtcgatcagaaacacatcggcggttacaccgattttgaggcatgggcaaaagagaatctgaacctgttcgcctga

SEQ ID NO: 74112 - DNA, 291 bp, Citrobacter koseri
atgcgctcgattggcgctttacccaaaagcgtgttgattctggaaattctcggtatggttttgctggcagcggcgttgctgtcgctcaatcagtacctcacattacccgcgccgatgaacagcccgctggcggtaacggtgatgatatttctcggtatcctgcttatgcttcccgctgcggtggcgctgatgtggcggatcgcgcagcttattgcgccgcaactgatgacgcgctcacccgattcttcttcccgttcagcaagagaaaaaccgcatgactccaaccattga

SEQ ID NO: 74113 - DNA, 723 bp, Citrobacter koseri
atgactccaaccattgatttaatccgtggtcaccgttctattcgtcatttcaccgatgagccgatttccaatgcgcagcgtgagtcgattattgccgccgcgcggggaacctcaagctccagttttttacagtgcagttccattatccgcattaccgataaagccatgcgcgaagcgctggtgcccctgacgggcgggcaaaagcacgttgcgcaggccgcggaattttgggttttctgcgctgattttaatcgtcacttacagatttgcccggacgcgcagctcgggctggcggaacagctgctgctgggcacggtcgatacggcgatgatggggcaaaatgcgctgactgctgccgaatccctggggctgggcggcgtctatatcggcggtatccgcaatcatattgaagcggttacggaacggctgaaattaccgaaatatgtcctgccgctgtttgggctgtgcctcggctggcctgcggataaccctggcgttaagccgcgtttgcccgcagaactggtggtgcatgaaaatcactatcagcctgtggatgccgcgctgctggcgcaatatgatgagcagatcgcggagtactacctgacccgcgacagcaatacgcgccgcgatacatggagcgaccatattcgtcgtaccatcatcaaagagaatcgcccgtttattctggactatttgcataaacagggttgggcgacgcgctaa

SEQ ID NO: 74114 - DNA, 903 bp, Citrobacter koseri
gtgaaaattgccatattgtcccgggacggaacgctctattcttgtaaacgcctgcgcgaagcggcgatgaagcgcggccatctggtcgaaatactcgatccgctttcctgctatatgaacatcagcccggcggcctcttctattcactataaaggccgccagttgccgcattttgacgccgtcatcccccgtattggctccgccatcacgttttacggtacagcggcgctgcgtcagttcgaaatgctgggtagctatccgctgaacgaatctgtggcgattacccgcgcgcgcgataaactgcgttcgctacagttactggcccggcagggaattgacttgcccgttaccggcattgcgcattcgccggatgacaccagcgatctgatcgacatggtcggcggcgcgccgctggtggtaaaactggtggagggtacgcagggcattggcgtggtgctggcggaaacccggcaagccgcagagagcgtgattgatgcgtttcgcggtctcaacgcgcacattctggtgcaggagtacatcaaagaggccagagggcgtgatatccgttgtctggtcgtgggcgacgaagtggtggcggccattgagcggcgggcaaaagagggcgattttcgctccaaccttcatcgcggcggtatggcgagtatcgccagtatcacgccgcgtgaacgagagatcgcgataaaagcggcgcagacgatggggctggatgtcgctggcgtcgatattctgcgcgcggagcgtgggccgctggtcatggaagtgaacgcctctccgggtctggaaggggtagaaaaaacgacgggagtggatatcgccgggcgaatgatccagtggatcgagcgtcatgccacccccgaattttgccttaaaacgggcggttaa

SEQ ID NO: 74115 - DNA, 477 bp, Citrobacter koseri
atgacatcactggtcgttcctactctggatacgttgcgtcaatggctcgacgacctgggcatgagtttttttgaatgtgatacctgtcaggcgctgcatttgccccatatgcaaaattttgacggcatttacgatgcgaaaatcgacctggtggataacacggtgctgttttccgcaatggcggaagtgaggccctctgcgctgctgccgctggctgccgatctgtcggcaattaacgccagctcgttaacggtgaaagcgttcctggatatgcaggatgataatctgccaaaactggtggtttgccagtctttatccgttatgcggggcgtgacgtatgaacagttcgagtggtttgttcgtcagagcgaagagcagatttctatggtgattctggaagccggagcgcatcagctgctgttcagcgcagaagaggacgcgcaaaaaagtagcgctgaaaatcattttcttcactga

SEQ ID NO: 74116 - DNA, 1113 bp, Citrobacter koseri
atgaccgccttaaataaaaaatggctatcgggtctggttgcgggtgctctgatggccgtctctgccagcacgctcgccgctgaacaaaaaacactgcatatctataactggtctgattatatcgccccggatacggtcgcgaactttgaaaaagagaccggtatcaaagtggtctatgacgtcttcgactccaacgaggtactggaagggaaactcatggccgggagcaccggttttgacctggttgtcccgtcggccagttttctggaacgccagctcactgcgggtgtattccagccgctggataaaagcaaattaccaggctggaaaaacctcgatccagagctgttgaagctggtagcgaagcacgatcccgacaacaaatatgcgatgccgtatatgtgggcgaccaccggtatcggttataacatcgataaagtcaaagcggtgctgggggctgacgcaccggtcgatagctgggatctggtgctgaaacctgaaaatctggaaaaacttaaaagctgcggcgtctccttccttgatgcgcctgaagaggtgttcgcgaccgtgctgaactacctggggaaagatcccaacagcaccaaagcggatgactacacagggcctgcgaccgatctgctgctgaagctgcgcccgaacattcgttatttccactcgtctcaatacataaacgatctggcgaacggcgatacctgcgtggcgattggctgggcaggggacgtatggcaggcggctaaccgcgcgaaagaagcgaaaaacggcgtgaatatctccttctccattccgaaagagggggcgatggcgttctttgatgtgttcgcgatgcctgctgatgcgaaaaacaaagaagaggcttatcagttcctcaactacctgctgcgcccggatgtgatcgcccacatttccgaccatgtgttctacgccaacgccaacaaagaagcgacggcgctggtcagcgctgaagtgcgtgacaacccaggcatttatccgcctgcggatgtgcgagcgaaaatgttcacgctgaaagtgcaggaaccgaagatcgaccgtgtgcgtacgcgtgcctggacgaaggtgaaaagcggtaaataa

SEQ ID NO: 74117 - DNA, 1134 bp, Citrobacter koseri
gtgaacgacgcgaccccccgcccacaggcgaaaacccgtaaagcgctgacgccgcttcttgaaatccgcaacctgacaaaatcatttgatggtcaacacgccgtggatgatgtcagcctcactatctataaaggcgaaatatttgcgctgcttggcgcatcgggctgcgggaaatccacgctgctgcgtatgctggccggatttgaacaaccctccgccgggcaaatcatgctcgatggcgtcgatctggcgcatgtcccgccttatctgcgccctatcaatatgatgttccagtcctatgcgctgttcccccatatgacggtggaacagaacattgcgtttgggctgaagcaggacaagctgtcgaaggcggaaatcaccgcgcgcgtgaacgaaatgctggggctggtgcatatgcaggagttcgctaaacgtaagcctcatcagctttccggcggccagcgtcagcgtgtggcgctggcgcgtagcctggcgaaacgcccgaagctgttgctgctcgacgaaccaatgggtgcgctggataaaaagctgcgcgaccggatgcagctggaagtcgtcgatattcttgagcgcgttggcgcgacctgcgtgatggtaacgcacgatcaggaagaggcgatgacgatggccgggcgaattgcgatcatgaaccgtgggaaattcgtgcagattggcgaaccggaagagatttatgaacatccgaccacccgctacagcgcggaatttatcggttctgtgaatgtctttgaaggcctgctgaaggaacgtcaggatgatgggctggttattgattcgccggggctggtgcatcctctgaaagtggatgcggatgcgtccgttgtcgataacgttccggtgtatgttgcgctgcgcccggaaaaaatcatgctgtgcgacgcgccgccagaagacggctacaactttgccgtgggtgaagtggtgcatatcgcctacctcggcgatttgtcgatttatcatgtgcggttgaaaagcggccagatgttgagcgctcagttacagaacgcgcatcgctatcgcaaagggttgccgacctggggcgatgaagtgcgtttatgctgggatgcggacagttgtgtggtgttgacggtttaa

SEQ ID NO: 74118 - DNA, 954 bp, Citrobacter koseri
atgagtacacttgaacctccggctcgcgataaaaagcccggcggcctgacgctgtggctggcgcggatgcaaatgaagcatgggcgtaagctggtcatcgcggtgccgtacctttggctgatcctgcttttcctgctgccgtttctgattgtgtttaaaatcagcctggcggagatggcgcgggcgatcccgccctataccgatctggtggcgtgggccgacgggcagctatccctgaccctcaatctgggaaatttcctgcaactgacggacgatccgctctattttgacgcctatttgcagtctttgcaggtggcgggcgtttcgactctttgctgtttgctgctggggtatccgctggcctgggcggtggcgcacagcaggccgtcaacgcgtaatattctgctgttgctggtgatcctgccgtcctggacctcgtttttgatccgcgtttacgcctggatggggattctgaaaaataacggcgtgctgaacaacttcctgatgtggctgggggttatcgatcatcccctgacgattttgcataccaatctggcggtgtatatcggtattgtctacgcctatctgccgtttatggtgctgccgatttatatcgcgctgacgcgcattgactattcgctggtggaggcctcgctggatctgggcgcgcgtccgctgaaaaccttctttagcgtcattgtgccgttaacgaaagggggcataattgccggatcgatgctggtgtttattccggcggtgggggaatttgtgatcccggaactgctcggcgggccagacagcattatgatcggccgcgtactgtggcaggagttcttcaacaaccgcgactggccggtggcctctgcggtggctatcatcatgttattactgctgattgtaccgattatctggttccataagcatcagcaaaaaagcgagggggaactcggatga

SEQ ID NO: 74119 - DNA, 846 bp, Citrobacter koseri
atgaatactttaccggtggttcgttcgccctggcgaattgttattctggtgctcgggtttacctttctgtatgcgccgatgctgatgctggtcatctattcgtttaacagctcgaagctggtgactgtctgggcggggtggtctacgcgctggtatggcgagctgttccgggatagcgcgatgataagcgccgtcggcctgagcctcacgattgccgcttgcgccgcgacaatggcggctattctggggacgattgccgccgtggtaatggtgcgttttggccgttttcgtggagcgaatggctttgcgtttatgatcaccgcgccgctggttatgccggatgtgattaccggactgtcgctgttgctgctgtttgtggccctggcccatgccatcggctggcccgcagatcgcggaatgctgacaatctggctggcgcacgttaccttctgtacggcctatgtggcggtggttatttcatcgcgtctgcgcgaactggatcgctcgattgaagaggcggcgatggatcttggcgcgacgccgttaaaagtgttctttgtgattacgctgccgatgatcatgcctgcggtgatctctggatggctgctggctttcacgctgtcgctggacgatctggtgatcgccagttttgtctctggcccgggggcgacgacattgccgatgctggtcttctccagcgtgcgtatgggggttaacccggagattaacgcactggcgacccttatcctcggcgtggtaggcattgtcggttttatcgcctggtatctgatggcgcgcgcagaaaagcagcggatgcgtgatatccaacgtgcaagacgcggctga

SEQ ID NO: 74120 - DNA, 489 bp, Citrobacter koseri
atggaagacgattcgttgggattttttaagaaatcatcctcatcacatgcccgtttaaatgtacccacgctggtgcaggtggcggcgctcgcgattattttgatccgctgcctcgatttgctgatgatttttaacacgctcggcatgcggggaatgggggagtttattcatcgcagcgtgcaaacctggaatctgacgctggtgtttttaggcagcctggcgctggtctttactgaaatatattgcgcgttttcgctggtgaaagggcgcaactgggcgcgctgggtgtacctgctcacgcagattattgccacaggttatctgtgggcggcgtcgttgggctatggctacccggaactgttcagtattgccggggagtcgaaacgcgaaattttgcacacgctggtgatgcagaaattgccggacatgctggttctgatgctgctctttattcctgcgggcagcaggcggttcttccgtttgcaataa

SEQ ID NO: 74121 - DNA, 1131 bp, Citrobacter koseri
atgcagtgcgcactctacgacgccggtcgctgtcgatcctgtcagtggatagtccagccgatccgcgatcaactctccgccaaaaccgccgatctgaaggggctgcttgccgatttttcggttgaacagtggtgcgcgccggtcagcggcccggaacaggcctttcgtaataaagccaaaatggtggtcagcggcagcgtggaaaagccgctgttaggcatgttgcatcgcgatggcaccccggaggatttgagtgactgtccgctctatcccgacacgtttgctcccgttttcgccgtgctgaagccgttcatcgcccgtgccgggttaacgccttacaacgtggcgcgcaaacgcggcgagctgaaatacatcctgctgacggaaagtcagttcgatggcggcatgatgctgcggttcgtgctgcgctcagaaaccaaactggcgcagctgcgcgcggcgctgccgtggctacaggcgcagttaccgcagctgaaggttattaccgcgaatattcaaccggtacacatggcgattatggaaggggagacggagatcttcctgacggagcagcaggcgctggcagaacgttttaacgatgtgccgctgtggatccgtccgcagagctttttccagaccaacccggtcgttgcgagccgtctgtatgcgacggcgcgtgactgggtgcgtcagctgcctgttcatcacatgtgggatctgttttgcggcgtcgggggatttggtttgcactgcgccaccccggaaatgacgttgacgggcattgagatcgcaccagaggcaatcgcctgcgcgaagcaatccgccgcagaactggggctgacgaatcttcattttcaggcgctggactctacgcaattcgcgaccgggcaaggggaagtgccggaactggtgctggtgaacccgccgcgtcgtggcattggaaaagccctgtgtgactatcttagccagatggcgccggaatacatcatctactccagctgcaacgcgcagacgatggcaaaggacattgccaacttgccgggctaccgtattgagcgtgttcagcttttcgatatgttcccgcataccgcgcattatgaagtgttaacgctgttgaccaaaacacgctga

SEQ ID NO: 74122 - DNA, 708 bp, Citrobacter koseri
atgaagcagatcctgctggtggaagatgaccacgacatcgcggcgctcctgcgcctcaatctagaagacgaaggctacgccattactcaccaaccggatgggggtaaggcgttacagtgccttgaaacccagccctgggatgccgtgatcctcgacctgatgctccccaacgttgacggtctggaaatttgtcgtcgcatccgtcagatgacccgctacctgccggtgattatcatcagcgcccgcagcagcgaaacggaccgcattaccgggctggaaaccggggcagatgattacctggcaaaacccttctcggtgcaagagctgatcgcgcgcatcaaagcgctgtttcgccgtcagcaggctatggggcaggcacagactgccgggcatattcaggctcatggcctgacgcttgatccgctggcgcgtacggtgcgcctgcacggtcaggatgtggacctcacgccgcgtgaatttgagctactgtacttctttgcccgtcatccaggcgaagtcttttcgcgtctggcgctgctggaacaggtctggggctatcagcacgaagggtatgagcacaccgtcaacacccacattaatcgcctgcgtatcaagattgaaaaagatgccgctgaaccggagattattcgtaccgtctggggcaaaggttacaaatttgcggagctgaaccatgatgcggcgctttag

SEQ ID NO: 74123 - DNA, 1470 bp, Citrobacter koseri
atgatgcggcgctttagcctgagccagcggctgacgctgctgttcattctgctgctgatgctctgcgccaccgttgcctgcgcggtgcaactctacagcagcatgcagtacggcaacgcgatggtgcagcggctgtccggcgggctggcgcaacaaattgtgcagcgtgaacccattctggatgcgcagggcagggttgaccgcagcgtgctgaagccgttgtttgaccgcctgatgacctttaacccgagcgttgagctgtatgccgtctcctctgacggcgaactgctggccgatgccgcgccgccgggccatatccagcggcaaaagatcgatattagtccattgcaaacgtttctcagcggcgcagcgatgcccgtctatggcgacgatccgcgtagtcagagtcagaaggttttcagcgttacccctttacgtcaggatggtgagcttaaaggctatttgtacatcatcctgcaaggtgaagagtcaaatgcgctggcagaaatggcctggcataaagcactctggagtacggtgttgtggtccctgctatgggtggcgctgttcggcctgctggcggggttactgatctggtactgggtgacgcgcccggtaaaacgcctgacgatggacgttgccgggctggagcaggacagcattaccgccatcaaacagctggcggcacagcagccggaaaccacggtgaatgatgaagttgcggtgctgcgcaatacttttatcgagctggcgcgcaaaatcgccggtcagtgggatcaactggccgacagcgaccggcagcgccgggagtttatcgccaatatctcgcatgacttacgcacgccgctgacgtcattgctgggctacctggaaacgttatcgcttaaatccgctacgctgacgccgcaggaaacgcagcaatatctcgccactgcgctgcgtcaggggcacaaggtgcggcacctgtcgcagcagcttttcgagctggcgcggcttgagcatggcagcattaaaccgcaactggagcgctttgctattggtgagctgattcaggatgtggcgcaaaaattcgatctgacaatagagacccggcagttgcatttgcaggtcgatatgccgcattccctgccgcttatcaatgctgacgtctcaatgatagagcgggtagtgacgaatttgctggataacgccgtgcgccattcgccgcaggggagcactatccggctgaaggtgtggcaggaggaggcgcagctacaggtagaggtcagcgacagcgggccaggtatcgacgaagcgttgcgtgaacaactgttccagcgaccatcggtgctggggcatcaggcgtcgcgggaagatcgcggagggttagggctgctgattgtaagacggatgctggaactgcacggcggtgggatcaggctgatggattcggtgagtggcgcgcggtttaggttctttgtgcccttatag

SEQ ID NO: 74124 - DNA, 732 bp, Citrobacter koseri
atgaaaaagttagttctggccgcattactcgctactttcgccgctggcgcctcagctgccgataaaatcaatttcggcgtttccgctacttacccgccgttcgaatcactggatgcgagcaataaaatcgtcggtttcgatatcgatctggcgactgcgttatgcaaacaaatgcaggccgactgtacttttaccaaccacgcgtttgacagcctgatcccggcgctgaaattcaaaaaatatgacgcggttatctctggtatggatattacccctgagcgtagcaaacaggtgacgttcaccagcccttactatgccaactccgcgctggtgattgcgaaaaaagacagctataaaacctttgccgacctgaaagggaaacgtatcggcatggaaaacggcaccacgcaccagaaatacctgcaagataagcatcctgaagtgaaaaccgtggcttatgacagctaccagaatgcgattatcgacctgaaaaatggccgtattgatggcgtattcggcgataccgccgtggtgaatgagtggctgaaaaccaatccgcaactgggcgcggcaacagaaaaagtgaccgatccgcaatacttcggcaccggccttggcatcgctgtgcgcccggataataaagcgctgctggaaaaactgaacaccgcgctggcggcaatcaaagctgacggcacttatcagaaaatcagcgatcagtggttcccgcagtaa

SEQ ID NO: 74125 - DNA, 669 bp, Citrobacter koseri
atgtttgagtatttacctgaactgatgaaagggctgcacaccagcctgacgctgacggttgcgtctatcatcgtcgcgctgatcctggcgctgattttcaccatcattctgacgctgaaaacgccggtgctggtatggctggttcgcggctacattacgctgtttaccggtacgccgctgctggtgcaaatcttcctgatctactacggcccggggcaattcccgtcgttacaggattacccggtactctggcatctgctgtccgagccgtggctatgcgccttacttgccctgtcgctcaacagcgcggcctataccacgcagttgttctatggcgcgattcgcgcgatcccggaaggccagtggcagtcctgcggcgcgctggggatgagcaaaaaagataccctggcgatcctgctgccgtacgcgtttaaacgcgccctctcctcttactccaatgaggtggtgctggtcttcaaaagcacctccctggcgtacaccattacgctgatggaagtgatgggccacggccagctgctgtacggtcgtacctacgatgtgatggtgtttggcgcggctggcgtgatttatctgatcgtcaacggtttgctaaccttgctgatgcgcctcatcgagcgtaaagcgctggcgtttgagcgcaggaattaa

SEQ ID NO: 74126 - DNA, 717 bp, Citrobacter koseri
atgaacgaattttttcctttagcaagcgccgccgggatgaccgtcggccttgccgtttgtgcgctgatcatcggcctcgtcctcgctatgatttttgccgtctgggagtccgtaaaatggcgcccgatagcctggacaggttccgcagtggtcacgattctgcgcggcctgccggaaattctggtggtgctgtttatctatttcggttcctctcagcttctgctgatgctgtctgatggcttcaccatcaacctggggtttgtgcaaatcccgttgcagatgcagattgaagacttcgacgtcagtccgttcctgtgcggcgtcatcgcgctgtcgttgctgtatgcggcatacgcgtcgcaaacgctgcgcggcgcgctgaaagcggttccgtctggacagtgggaatccggtcaggcgttgggcttatcaaaaaccgcgatttttttccgcctggtgatgccgcaaatgtggcgtcatgcgctgccagggctgggcaaccagtggctggtattgctgaaagataccgcgctggtcagccttatcagcgtgaacgatctgatgctgcaaacaaaaagcatcgccacgcgcactcaggagccgttcacctggtacattgtggctgcggctatctatctggtgattacgctggtgagtcagtacattctcaaacgcattgacctgcgcgcgacacgttttgagcggagaccaggctga

SEQ ID NO: 74127 - DNA, 732 bp, Citrobacter koseri
atgaaaaaagttctgattgccgcgctaattgcaggctttagcctttccgctacagcagctcaaaccatccgtttcgccacggaagcatcctaccctccgttcgaatctatggatgccagtaacaaaatcgtcggctttgacgtcgatctggccaatgcgctgtgtaaagagattgacgcgacctgcacctttaccaaccaggcgtttgacagcctgatcccaagcctgaagttccgtcgtttcgacgcggtgatggccggtatggacatcacgcctgagcgtgaaaagcaggttctgttcaccacgccttactatgacaactccgcgctgttcatcggtcagcagggtaaatacaccagcatcgatcagctgaaaggcaaaaaagtgggcgtacagaatggcactacccaccagaagttcatcatggataagcacccggaaatcaccaccgtgccttatgacagctaccagaacgcgaagctggatctgcaaaatggtcgtattgacggcgtgttcggcgacaccgccgtggtcactgaatggctgaaagataatccgaagctggcgccagttggcgataaagtgaccgacaaagattacttcggcaccggcctcggcatcgcggtacgccagggcaacacggaactacagcagaaattcaatactgctctggaaaaagtgaagcaagatggcacgtacgaaaccatctacaacaaatggttccagaagtaa

SEQ ID NO: 74128 - DNA, 729 bp, Citrobacter koseri
atgagtattcaattaaacggcattaattgcttctacggcgcgcatcaggcgctgttcgatatcacgctggattgccctcagggcgaaacgctggtgttacttggcccaagcggagcgggtaaaagctcgctgctgcgtgtactcaatctgcttgagatgccgcgctccggcacgctcactatcgcaggaaatcatttcgacttcacgaaaacaccttccgataaggcgattcgtgaattgcgccagaacgtaggcatggtttttcagcaatacaatctctggccgcatctcacggtacaacaaaacctgattgaagcgccctgccgcgtgctgggtctgtcaaaagaccaggcgctggcgcgtgccgagaagctgctggaacgtctgcgtctgaaaccttacagcgatcgctatcctctgcatctttccggcggtcagcaacagcgtgtggctatcgcccgtgcgttaatgatggagccgcaggtgctgctgtttgacgagccaaccgccgcgctggacccggaaatcaccgcgcaaatcgtcagtattattcgtgaactggcggaaaccaaaattacccaggtgatcgtcactcacgaagtagaagtggcgcgtaaaaccgccagccgggtgatctatatggaaaacggtcacatcgtcgagcaaggggatgcgagctgctttgcaaacccgcagaccgatgcattcaaaaactatttatctcactaa

SEQ ID NO: 74129 - DNA, 516 bp, Citrobacter koseri
atgcgctacagcaaactctctctgctcgtcccttgcgcactgctgctcagtgcctgcacaaccgtcactcctgcttataaagacaatggcccgcgcagcgggtcgtgcatagaaggcgggccggacagcgtggctcaacaattttatgactaccgcattcaaaaccgtactaacgacattaccgcccttcgcccttacttaagcgacaacctggcaaaactgctctctgacgccagccgtgacagcgaacaccgccagttgatgagcagcgacccgttctccagccgcaccaccttcccggatagcgccagcgtagccagcgcgtccaccattcctaatcgcgacgcccgcaacatcccgctgcgcgtggagctgaagcaaggcgaccagacctggcgcgacgaagtgctgatgatccatgagggtcagtgctgggttattgatgatgtgcgttatcttggcggcagcgtccacgcgccagccggtacgctgcgccagtccgtcgaaaaccgctga

SEQ ID NO: 74130 - DNA, 324 bp, Citrobacter koseri
atgcagttttcgacaaccccgacgctggaagggcagaacatcgtggaatattgcggtgtggtaacgggtgaagccattttgggcgccaacattttccgtgacttcttcgcgggtattcgcgatatcgtcggcggacgttcgggttcctatgaaaaagagttgcgtaaagcgcgtgaaatcgcttttcaggaactgggcgaacaggcgaaagcgctgggtgcggatgcggttgtgggcatcgacattgactatgagaccgtaggcaaagacagcagtatgctgatggtgagcgtcagcgggacggcggtaaaaacgcgccgatga

SEQ ID NO: 74131 - DNA, 831 bp, Citrobacter koseri
atgagacgcctgctctggctggtcgcgttcgcgcttctgttaaccgggtgcgcgggcgagaaagggattattgataaagacgggtatcagctggatacccgtcatcaggcacaggcggcgtacccgcgcatcaaaatcctggtcatccactacacggcggatgactttgatacctctctggcgacgttaacggataaaaacgtcagctcgcactatttaattcctgctgtaccgccgcttcaccgtggcaagccgcgtatctggcaactggtgccagagcacgatctggcgtggcacgcgggcattagcttctggcgcggcgcaacgcgcatcaacgacacgtccgttggtatcgaactggaaaatcgcggctggcaaaagtcggcgggaatgaaatacttcgccccgtttgaacctgcgcaaattcaggccctgatcccactggcgaaagagatcattgcccgctacgacattaagccgcaaaacgtggtggcgcatgcggatattgccccgcagcgtaaagacgatcccggccctctgttcccctggcgcgatctggcggcgcagggcattggcgcctggcctgatgaacagcgcgtggcgttttatctggcgggacgcgcgcccaatacgccagtcgatcccgcatcattgctcgacttgctttcgcgttatggttacgaggtcaaaccggagatgaccgcgcgtgaacagcagcgggtgatcatggcgttccagatgcatttccgcccggcgttatggaacggggtggcggatgcgcaaacgcaagcgattgctaatgcgttactggaaaaatatggccagaattaa

SEQ ID NO: 74132 - DNA, 624 bp, Citrobacter koseri
atgttaagcatttacggtaagaaaattcgtccgcatcatgaaatggaacgtattatttctttaacgtcaggttataaagaaaaaaccttaaaaaaatggcagaaaatcaccaccagtgactcggaatgtattcatattatcgtgagcggtgacgttgaatttcgccgtacctccgatgagttatgtatgtttaccctgcaagggcagtgtatctttgggctgtctgccatattttatggttctctgcatatgtatgggcttgctcgtaccaataccgtcgtgcgctcaatcaaaaaagatgagtttatgcgcctgttgactgaacacagtttatggccagatctcaccagggtgctgtcatggtatatttgcctgcttagcaaacgtgatgatgttttggttgcccgtagcgcttactctgttattcgtgaatttttaatcgaaattaatgagctgattattcaccataaccgtgacatcaatgtatacgactatattcaggagtatacgaattttgcccgcagtacgatcatcaaaattctctctgaccttaaaaaaggaaactatatcgtcattgagaaaagccgattaatgtcgatgacgaccttgccagaaaaatattaa

SEQ ID NO: 74133 - DNA, 501 bp, Citrobacter koseri
atgtccaccatttgccttgctgcacagcgcagtttcacgacgggagaagcggtctattttgcctggcgccttccggcgccccaaaaagtgctgttccgcgccatgatgtggctgctgaccctctgcacgtttattattgccggactgtatgcccatatttactggaactgtcagcatccgacgcctgagccgaaaccgacaaaagtggaaaacccggatacccggctttctgagatgcactatgtttatatttcgaagccgttcccgcagccagcccccaaaccgacccctgcaccccaggcgttacccccattgcaggatgaagcgccggtaagtcaagacagcgactggcggcaagcgccggaaggcgatctctcggatcgggcattgcccggcgcggaagaacagacgccatcgttgaaagtgcgtttcctgcaagcgttacaggagcaaaaagaggactatcagcagggaaaaataccggaaccgcccgatgactga

SEQ ID NO: 74134 - DNA, 1578 bp, Citrobacter koseri
atgtatcagcatcattttaaattttccgctcagccgtttggcaaactcacccggcgaacgggggagtttttcgttcattatcatcaggacatcttttccctgttgcaggaaaaaaccaacgtgcccggcatcatcggtctgttttctgacgaacctgaattagacaatgcctttgtggaaaaactgcgtaacggcggcacacctgcactggccattaacgccttccccaaactgagcgccagtacgctgctctataaactgaaccctgccgttaaagagggtaaaaacaaaatttatgccattgatgccattttgcgccaatggcatgaggaaacgccttcgcgtaataaaaaaggcaaactgctgatcctctccacggcacaagccatgaaagataattgttgggatgttctgggtatgttgctgacgcgggcgcaagagctgaacttcccgctcacgattcttctgaccggctctcccgatcagaaatcccgtcttctggatcattctggtttacagccccgcgttcatacctgccttgcgctacgttcgctgacctgccgtgaatatatcgactacgtcggggcacagatggacgaacagaacgtcgatacctcgccactgacgcccgcacgggtgcgcagaatgcatgcgctgaccaaaggccgcgtgaccggactcaataaactggcgcatctggcgctgcttgccgcatggaccgagcgggcgatacaggtttccccacgccatttacgcctggctgccggtgaactcctgccgcccacgccgcgcggtaaacgcctggcaaccgcagggctgtttgcctccgtcctgttcgcctgctgcggctggtacttttccggcgcgatcgcgtctcgcctgccgcaacaagtgccggttccggccagctggaaaaagacgctgcctgagacgactgcgcctgttatgcccaccattgaaaatgaggtggtgaatcagtcggacgccatgcatcagctctatcttatgtggggttatgatgcttccgcgaacgatgcgctatgccagaacgcagcgcgagtgaacctgatgtgccgtcaggggaatacgtctttacaggcgctggaacaggaaggatatccgtgggcaggagagatcaaaacgggtaatcacctgaattacgccgtcgtggcccacgttgataaacagtcgctcgatcttctgatcaataaccgaacctggcaggtaagcagacactggtttaatcaacacgccaccggaaattacacgcttttgcatcgtttaacgccgcaagggaaagatgagattagcgcgaccagcggcgataaagacctggcgtggctggatcaaacgctaagccagacgttgaatgaaccgctgacccactcgcgaagctggacggctgaactggcaaaacgcacccgtgaatttcagggtaaggcaggactgcatgtcgacggcatcgccggcgaagagacgctgatgcagttaatgcgcgcaaccaacagcgttccgggcgtactggcgcaaacactaagccagaagcaggaacataaaacgcaagggaacacgaaataa

SEQ ID NO: 74135 - DNA, 774 bp, Citrobacter koseri
atgaggatgcagcttttctcccgattgattgcaccctgcatgatgtttgttttactgatattcagcgggcatcaagggtatgtcgtttttagaaactataataaggttacaaacaagttaaataacagaaaaattaacgtgcgtaaaaatgacgaaaaagaaaagtcatttgcgctttttcaacctgccgtctggcagcgaaatacgccagcagcggttaaatcgccgctctctgccgagattgaaggcatcgtcagcagcgatgaaaaatggctgtcgtttgccgttattaaaacgcctgcgggacagcaaagttatcgcgaaggcgaaagcctcgtgggagtgagtaacgcctgtattgaggagatcaataacgacaatgtggtggttaattacgaaggtactacgcaggtactggcattaaagaaacctgattatttcagaggcggtgttgaaagcggcccgctacaaaaaccgacaaacgatgccggtgcagagagcctgcatcttaatgatgtcctggtgctaaaaccgtttatcgaaaaaggtcgtctggaggggtacgaaatcaacccgcgcaatgcttcgtctttctttcagaacagtgggctggagaagggcgatgtggttgtgaaggtgaacagtaccgatatgacaaaagaagaacaggcgaaaagcattattgctggctggtcaaaaatgaaagaagcggcggtagtcgtaagacgtcacgctcacctggaaaatattcaggtcaatgttttaaacaactaa

SEQ ID NO: 74136 - DNA, 1923 bp, Citrobacter koseri
atgaagaaatttccatgggcgtgcgtggcgctgacaactctggcgttatattccagttcgctctttgcggcgaattttagcgccagctttaaaaatactgatattcgtgaatttattgatacggttggccgtaatcttaataaaacgattctggtcgatccgtcggtacagggaaccgtatcggttcggacgtataacgtcctgaccgaagatgaatactatcagtttttcctcagcgtgctggatttgtacggactttccgtgattccgatggataacggcatggtgaaagtggttcgttcatccgttgcgagaaccgcgggaacgccgattgccgacagcaaaaatcccggtaaaggggatgaaattattacccgcgtcgtgcggatggaaaatgtaccggtacgcgagctggcgccgctgttgcgccagttgaacgatgcgaccggtatcggcaacgtggtgcactttgagccgtcgaacgtcctgctgctcaccggtaaagcctcggtggtgaaccgcctggtcgatctggttcagcgcgtcgatcgttcaggcgtacagcggcgcgaaatcgttccgctgcattacgcctctgcgaaagaactttcggatatgttgaataacctcaacaacgaagagcaaaaagggcagaacgcaccgcaactggcgaccaaagtggtggcggatgaggagacgaatagcctggtcattagcggcagcgaagaagcgcgggcgcgtacccgcacgctgatagcgcagcttgatcgcgagcagaataacgaggggaatacccgcgtcttctacctgaaatatgccaatgccgccaaagtggtgccggtgttaacgggcattggagagcagatgaaggacaagccgggcgcggcgaaaagtaaatcgccggttgccgcgaccgatctgaatattactgccgacgagtccacaaactcgctggtgatcaccgcgcagccgaacgtgatgaactcgcttgagaaggtgatcgacaagctggacattcgccgtccccaggtactggtggaagccattatcgctgaagtgcaggatggcgccggaaccgatctcggcgtgcagtggacgagtaaacacggcggcgtacagtttggcgcaaccggtctgccgatcggccaggttaagaacgggacgataaaaggcgtgaattttaccggtatggcgacaggtttctttaacggcgatttcggcgcgctgatgacggcgctgtcgaccaacggcaaaaacgacattctctccacgccgagcgtggtgacgctggataacaaagaagcgtcgtttaacgttggtcaggatgtgccggtgctttctggttcgcagacgacgacgggcgacaacgtctttaacaccgttgagcgtaagacggtggggacgaagttgaagatcctgccgcagattaatgatggcgacatgatccacatgaagatcgagcaggaagtttccagcgtggacgccagttcgacggaggattcgtctttaggccccacctttaacacccgcacgatcaataacgaagtgatggttcacagcgggcagacggtagtactgggagggcttatcgaaaatgtcaccaaacagaatgtgtcgaaagtgccgctgcttggcgatattcctctggtggggcaactgttccgctacacctcgcaggataccaccaagcgaaacctgatggtctttatccataccaccgttctgcgcgatgacgataactacagcgccgcgtcgaaagagaaatacgaccaggtgcgcgcgcgccagcagcagcgtatggaggagaagaaaatgggcatcctggagccgggcgataacgccattctgcccgcgttcccgtcgcccgtaaaaaccagcactgctgcgccagccacggcgtcgcgcaatccgtttaaagagtaa

SEQ ID NO: 74137 - DNA, 1479 bp, Citrobacter koseri
gtggatgaattaagcaaaaatttgtgcagcagcagcttcgcaaaagacaacggtgtgctgctttatcacaacgacgtatatatccgtgaggatgcgcccgcctttgccctgctggagatgcgtcgcgtgctggggcgtgcctttacgccggtaacattaacgccagaagcgtttgaagagatgctggctaaaatctggcagcagaatagcggtgtttcgcagcagctggttgatgatatggatgccaatatcgatctgatggcgttaaccgaggagatccccgataacgaggatttgctggataacgatgaaaactcgccggttatccgtctgattaacgccattcttggcgaggcggtgaaggatggcgcgtcggatatccatatcgaaacctttgagcgcacgctgagtatccgttttcgcgttgatggcgtgctgcgtcctgtattacagcccgcgcgtaagctggcgccgctgctggtatcgaggattaaggtgatgtctaaactggatatcgccgaaaaacgcctgccgcaggacggtcgcatctccctgcgcattgggcgtaaagcggtggatgtgcgtgtctcaaccatcccgtcgcagtatggcgagcgggtggtcatgcgtctgctggataaaagcaacctgaagccggatatcaataagctggggctgatcgacgaagaactggaacagctcaaaggactgattggccgtccgcacgggattatcctggtgaccgggccgaccgggtccggtaagagcacgacgctttacgccatcctctcggcgctaaacggccatgaacgcaatattcttaccgttgaagatccgatcgaatatgaactggaaggcgtggggcagacgcaggttaacccgcgagtggatatgacgttcgcccgaggcctgcgcgcgatcctccgtcaggacccggatgtggtgatgatcggtgaaattcgtgacggcgaaaccgcgcagattgcggttcaggcgtcgcttaccggccatctggtcatgtctacgctgcataccaacagcgcggcgggagcgattacccggttgcgcgatatggggctggagtcgtttttaattggttcatcgctgcttggcgtcattgcccagcgtctggttcgtcggctgtgccctcactgccgtgccgtcagtccgctggatgataatgaaaaaccgctgttcagctttatggagagtccccccgacgtgatttatcgcgccgtggggtgtgaacagtgccgccagagcggttaccagggacgcgccggtattcatgagtttctgctggtggacagcgcgatgcgccgcgctattcatgaagataaagacgaaatgtcgattgaaactcagctgtttaagcaggcctacagcctgcgggaaaatggtttgttgaaggtgatctccggcgtcacctcgctggaggaagtgatgcgtgttaccgccgagcgcggaggtgacgaataa

SEQ ID NO: 74138 - DNA, 1209 bp, Citrobacter koseri
atggcctggttcgcatggacggctacggatgccgtcgggaaaacccggtgcggcgtcttgcaggctgaaggcccaaagcaggtacgccagacgctacgcgaacagaagctaatgccgatcagcattacgctcacccgcgagcgcgccgccggaaagggggctcagaaaggtgcaaaactttcgacaccggtgctctcaatgtttacccgccagctgtcgacgttggttaatgccgcactgccgctggagagtgcgctgaaggcgatttctaagcagacggaagacaaaaagctggcggtgatggtcggtgagatccgcgataaagtggtagaagggcacacgcttttcgacgctttcagccagtttccacgtactttcgacaagctctattgcacgctggtgatggcaggggaaaagaccgggcatctcggcggcgtgctggaaaagctggctgaatacaacgaacagcgacagaaaatgaaaagcaagctgtcgcaggcgatggtctatcccatcaccctgacggtggtggcgattgcggttatctccattctgctggtggcggtggtgccgcaggtcatcgaacagtttgtgcatatgaagcagcagttgcccgtcaccacccgtaccctgattgcggtcagcgattttttgcaggcttacggaatggttatcggcggcggccttgtcggatcgtttatcgcttttaacgcctggcttaaaaaagagcgtcatcgttttgcatatcaccgctggctggtgaaccgttcgccgctgaaaaaactggtctgtgcaataaacagcgcccgttacatccgcaccctgagcattttacaagccagtagcgtgccgttgctggaaggtatgtatatcgcgatggacggtattgagaatctgtatgcgcgtcaggtgctggaacaggcggcggataccgtgcgtcagggcgcgtcattatataacgcactggagcaggccagattatttccgccaaccatgctttatatgattgcttctggcgaagagagtggcgaactcggttcattaatggatcgcgccgccgaaaaccaggagtcggcattacaacatcgcattacattaacgctgtcggtatttgaaccggcgctggtggtgacgatggcgacggtggttttatttatcgtactgtcaatattacaaccgcttcttcagctcaataatatggtgggttaa

SEQ ID NO: 74139 - DNA, 450 bp, Citrobacter koseri
atgtctgtgaaaaaaaatagcctgaaaggtcaggccgggtttactttgctcgaattaatggtggtcatcgttattcttggcgttctggccagcatggtggtgccgaatctgatggggaataaagagaaagcggatgcgcaaaaagcgaccagcgatattgtcgccctggaaggctcgctggatatgtataagctcgataaccatcgctacccaaccaccgaacaggggttgcaggcgttggtgacgaagccggagatcgcgccgattcccaacggctatcgtgctgacggttatattcgccgtctgccgcaggacccgtgggggaatgattacattctggttagccctggcgaacatggcgcggtagatgttttctcctccggcccggatggtgaagcgaataccgccgatgatataacgaactggtctttagataaaaaagataagtaa

SEQ ID NO: 74140 - DNA, 486 bp, Citrobacter koseri
atgaataagcaacgtggatttacattgctggaaattattctggcgctggttatttttgccagttgcgccatgatggtggtttcgacaataccctcacgcagcggcgcagatatattaggccagcaattacaatccctcgttgaatatggttctgatcgggcagtgatggacggaaatatagtcgggctggtgatgacgccaacggaatatcagctggtgaggtgggccggggaaaacggcgggcgtcattgggcgccgctgacagccgggcgtattttcacccacggacagtttcctgaagagatgcatgtttcgctcgctccccagcgtctggcggccacgcctgatgccgacccgcaggtgctctttttaccggatggggaaattagccgattcacgctgacgttgcagagctatgacaaacagcaccatttccgcgtggtgtcgcagggcgcttcacccgttttggtagagaacaatgactaa

SEQ ID NO: 74141 - DNA, 381 bp, Citrobacter koseri
atgactaaaccggaagcgaaagaacagggcatgacgctgttggaagtcatggtggcgctggtgatcttttctaccgccgcgctggcgttgatgaattccgtctcgctgaatgtgcgttttacgcacggtcttgccgatacgctacaggccagttgggttgcggaaaaccagctcgcgcaagcgcagcttgcaaaaagcgtttttcccgacgtcgctgaagaaggcagtgaaacgatgggtggacgcagctggaactggcgcaaacagcgggtgaaaaccgatgacaaggcgtttgccgatgaagtccaggtgtatgccgaaggcgaagagggccagccggtcatcacgctgcgggttgtcccgccgaaggagcgcaaatga

SEQ ID NO: 74142 - DNA, 666 bp, Citrobacter koseri
atgaatacgccactccgtcgccagcaaggttttacgctgctggagatcatgattgcgctgacgatttttgccgtgatcagcacccttgcctggcaaatccttgacggcgcgatgcgcaccaccacggcaacggatgctgctgcgacgacgcttaatcagcttcagcgagcctgtaacctgctggagcgcgatttctctcagctccagccgcgcgcgccgcgcaatgaaacggatgtgttccgtctggatcaacatgccgttgagctgacgacggtaagcggcgtcagtgggcaaattcagctggaacgcgtgcgctggcggctggaggcgcatcgcctgtggcgtgatgtctggcctgacattgatagcccggctgacgtgagtccagaagaagtaccgattttaagcaacgttaaagcgatgaagtggcgattctggcgacagggctggcagacgacatggcttgaaaccgcccatcagccggaaggcgccgaactgacgctgacgatggaaaacggggatacctggcgctgggtgtttatgacgccgggagacatgccggaaatccagggagcaaagaaagacgaaagcgctgaggctgcacaacccacgcctgctgacgttacggcatcggttccgccagcacgcggtggagaacagcaatga

SEQ ID NO: 74143 - DNA, 1017 bp, Citrobacter koseri
atgaacacgcaatcggcgcaaaaacagcgcggcgtcgcgctgctggtggtgttgattttgctggtgatgatgtcagcgctggcggcaaagatcggtcagcagttttgccgaaatttgcagaaaacccgctatcaggtcagtcagcagcagctgcgctgggcgatgcaaggccaggctgcggcgataaaagatcgtctgcaaaccgacgccagcggtgagagcaatggattatcgccagaaggcgcgtggcacgaaccgctggaaactcagggtgagaactataccgtcgtgagccagattgaggacgcccagacctgctttaacgtgaacagtctgctggtcattgaccctgctcttcctgcggatagcgccgccgcgcagccgacaaagccggtgaaagagcagatcgttgaacagttgctgatcgacagcggcatcagtacggcagcggcggaagaggtttatcaacaactggtggattatctggacgctgacagcacaaccgcaaaagaggctctggaaagcgatgcctgggcgggtgtgacgccgcagcgccttcctgcgaatcagatgatgcgcaccatcagcgagataaaacggttgccgggttttccggtggcggcatatccccgcgtcagcaaggtgctgtgcgcgctgcctgatacggagagcaaagtggatgtgaataccctgaagcccgggcaggcgccgctgttgtctgcgctgtctgcggggacgttaagtgaggatgacgcagcacggctgattgcctcgcgcccggaagaagggtgggcgtcggttgacgcgttcagtaaaacgctcgaaacaaactatccgcagagcaaagcgatcctcgcgcagatgcaggcgtttgttgcggtgaacagtcactatttccgggtcgagagtaccggtaatactgatgatttaacgctgcgcgttgtcagccagattcatgtcgatcgtgactctggcgaggtgagaacctggcaacgccgttaccgaatgattgaataa

SEQ ID NO: 74144 - DNA, 1146 bp, Citrobacter koseri
atgaaacaggtactttttattcgtcccgatgcaaacgtggacgggaaaatcgagtggtgcgtctccggtagccagcaggtggcaacgctggaaagtcgggatgcgctgagaacgcttgccgtaaatcccctggcgacacgcgtttgtttgctgttgcccgccagtgagatggtgttccgtcattttaccctgcccaaaaaagggttatcgacggcctccacaccgttttcatggctggcggaagagacgctgatcggcgatgtggactcgctgcactggacggtattgcggaaacaagggcgggaagtggatgccgtggctattgacgccacctgctttgagcgctggcttgcgctgtgcgaagaggccggactgaaggtgattcaggtattgccggacgccattctgctgccggtaaacgaaggcggcagtacgctggtttcctgtgacgaaagctggtggctgcgctttccgccgttcggcgcctgcgaagcggatgctacgctgctgccgctgttgctggcgcaaggcggcgatggcgaagtgcgctgctacggcgaagcgcctgcgggtatcgatgtcactgaacaactgccgtggcagcatccgctggtattgattcagccgcaatggaaagcgtgtcgcgccaatatgctgcatggcgcatttgccgcctgcggcaaagaggtggggcgatttcgtcatctgaggacagcaatggcggtgtctgcgctgctgtcgatggggttgctgattggcccgcgcgtggcaatggcatggatgttggttcagcaggaaaatcaggtacaggccgagattgcccaggtcgctcaacactatttcccgagtctgcggcagaaaaccaatatcaaataccattttggtcagaatattaaaaaacagagtaaaggtatttttctgcaacttgaagcgctggaacaggttaaacagtctgtgcctgctattgagataaatgaagtggaatatgacaacgcgcagaatgtgttgacgctgaacgcggcttcaccgaattcgcaggcgctacaggatttcgttacgcaggccagcccccattttgactttgcgttacaaccggtttcgaaccagtcaccctatacggcgatcgtgacggggaaatataaatga

SEQ ID NO: 74145 - DNA, 486 bp, Citrobacter koseri
atgaaagagcgaattgcacaattaaaagcacgctatcaaaactacagcgatcgcgagcgtggtcttattacgctatgtgcggcggcgatgtgctgcgcggtaatttattacggcggcattattccgctggatcatatgattcaaaacagccagtccacgttaatgcggcaaaaagagacgctgcgctggatgcgggacgaaatcgataaaaatcatttacaggcgaaagtcttaaaaacgaacaacccgcgaacggttattgaagagagtgcgaaagagatccatctcgtgttgtctgatattcgtcaggatgaacgctcactctcttttgttgttgaacaggtcaatatttatgaactgaaaaactggctacgtgaagtgaatgttacgtccggcgttcagttgcaaaaaatggatttgcagccggtcgatcgtcaaagcgacgtgaaagccaatattacgctgagctggaataaaaacgcatga

SEQ ID NO: 74146 - DNA, 798 bp, Citrobacter koseri
atgaatacgatcatgttgtttcgggaaagctggccgattggattttgcataatgagcgcctgtctgggcggaatcctcggcagttttcttggcgtagtcagcgagcgcgttcccgcaatggtgatggaaaaggaaggggcggggaatttactttttccagcctcacactgcgcggactgcgggcatcaactggcctggtgggaaaatattccgttattgagttggtgctgcctgcgcggtcgctgccgccattgccagtctgtgattcccctgcgcttgctgttggtagagtcagccagcgcgcttttttttgcggcaacggcggcggtgctcccttcctctgtcacgctgatcgcgctgtgggttttatggtgcggtctgctgccgctcacgatgattgatgcgaaatatatgctgttgccggattgtctcacgcagccgctgctgtgggctgggctgctgctgcattgcgttttccacacgatgccgttggcgagcgcgttatatggcgccgttgcggggtatctcattctgtggctggtgtactggagttttcgcctgctgacggggcgggaaggccttggacagggcgattttaagctactggcggcgctgggggcgtggtgcggctggcaggcgttaccgttattaattctggttgcggcattaagcggtattgtgctgtatggccttttttactctggcgtaaataaagcggggcaaattccttttggtccctgtctggccttttcgggaatggtgatgtttatcttccagacattgcaattcacattctga

SEQ ID NO: 74147 - DNA, 2709 bp, Citrobacter koseri
atgaagtttatgaagcctaaatatctggcactttttgtggcagcagcgacaagtccggtttttgccgctgcgccgggtacgccgtctattaccagcggcaatgataaattcgccattgtggaagtggatcaggctgcgcaggattataacaacctggtgaaagttcataacgatggcgtggacgtcaaggtggaatggaacgtctggagcggcgatgcgccgacctccgcgaaagtgctgttggatggtaagaccgtatggtctggcgcaggtagcgctgccggttctgcgaccttcaaagtcaaaaaaggcggtcgttatcaggagcaggttgaattatgtaataccagcgggtgtacgaaaagcgccagcaagctgattattgtggcggataccgacggtagccatctgctgccgctgaataccaccatgaaggaaaacaataaaacgtttgctcagcataccgataaagtggtgggcgcgtacttcccggaatggggcgtgtatggccgtaatttcccggtagataaaatcccggcggctaacctgaaccatatcctgtacggctttattcccatttgcggcggtgacggcatcaatgacagcctgaaatccatcgagggcggcaacagttttgaagcgctgaaacgcgcctgtaatggccgacaggactataccgtggcgatccacgatccgtgggcggcgctgcaaaaaccgcaggctggcgtctctaactgggatgacccgtataaaggcaacttcggtcaattgatggcgctgaaaaaagcgcacccggatctgaaaatcctgccatcggttgggggatggacgctttccgatccgttcttccagatgcatgacagcgcgattcgcgcgcggtttgttgcttccgttaaggatttcctgaagacctggaaattcttcgacggcgtagatattgactgggaattcccgggcggcggcggtcagaatgaaacgctgggcaacccgcagcaggataaagcgacctacacggcactgatgcacgatctgcgcaccatgcttaacgaactgtctgccgaaaccggtcggacttacgagttgacctccgctatcggttccggtcaggacaaaatcgaagacgtggactacgcccaggcgcagcagtatatggatcacatcttcctgatgagctacgacttctacggcggctggagcaacaccgatctggggcaccaggcggcgctgcacggcgcagagtggaaaccggacaccaaatacaccacggaaaatggcgttaatgcgttgctggcgcagggcgtgcagccaggcaaaatcgtggtgggcgcggggatgtatggccgcggctggactggcgtgcatggctataccggcgacaatccgtttaccggtacggctaccggcccggtgaaaggcacctgggagccgggcgtggttgattatcgtcagattgttaacgaatacaaaggcaaaccaggctgggaataccgttacgacgctgcggcggaagcgccgtatattttcaataaatctaccggcgacctgattacctatgaagacgcccgttctgcggcggcgaaaggtaaatacgtcctggctaacaacctcggcggcctgttttcctggtctatcgactctgataacggcgacattctgaacgcgatgaacgaaagcttgctgggtgggggttctacaccggttgagccggttgtgaccaaccatgcgccagtcgcgaccgcagttgatcaggtcgtaaccggcccggcgacggtcacgctggacggttctgcctctaccgacccggatggcgatgcgatcacctataagtggatgcagatctccggtccgtccgtaacgctgaacaagagcaccagcgcgaaagcgaactttaacgtcgccgccgtctccagcaatcagaatctggcgttccgtctgaccgttaccgatgcgaaaggtctgagtaacgccattgacgttcaggtcgtgaacaaagcgccaaaagcgaaccaggccccggttgtgaatccgctggaaacggtgtcgcttgaagcaggcgcaacctacacgctgaatgcgcaggctgccgatcctgatggcgacgcgttgacctacgcctggagcgtgccgggcgacatgaacgcgacggggacggacacctccagcgtgaccatcaccgcgccggaagtaagctccgcctcgacttacaccgtcagcgtcgtggtcagcgatggtaaaaccagcgtgcagtccaacgtgcagattaacgttacgccaaaagcggcgccggtgccgtccgacgaagggacaacaccgtctgatgaaggcaccacgccagccgatgaggggacgacgccgtctgatgaaggcgcggcaaccggcggttgcgacagcccggttgatgccaatgccagccactacgcggcatgggacgccagcaaaatctacaacaatggcgataccgtcagttttgatcacctggtgtggaaagcgaagtactggacgcagggcaatcagccaggctttggcgtggacgcgtgggaactggtcagccaggtgaaattcaactggcgttccgatgtggtttacaacggcggtgagactaccacctatcaggggtctgtataccgtgccaaatggtggacgcagggtgataaacccggcaacagcgatgtgtgggtgaaagaaggcgccgccgcagactgtcaataa

SEQ ID NO: 74148 - DNA, 444 bp, Citrobacter koseri
atgagacgtttaattttgttgttattgatgttaagccaaagcgcgtttgccaactgctgggacagagccgcaaattattatcatgttgacccttatttattatttgccattgcgcaagtcgagtctggcatgaatccctatgcggtaggacgaaatcacgacgggacgagagatgtcgggttgatgcaaataaatagctcgcatttttcagcgctggaacgccgtggcattgatgagtatcgactgatgctggaaccctgtacatctattatggtcggtgcgtcgatcttatccgatatgatcaaagtatatggttataactgggaggcggtaggcgcatataacgccggagttaaaaaagagaattacccgcagcgcatgatttacgcgcataaagtctgggaaacataccagcgtataaaaatgaccacgcaatataaataa

SEQ ID NO: 74149 - DNA, 1821 bp, Citrobacter koseri
atgagcaaaaggacattattgagtgtactcattgcgggtgcctgtgcggtgccgtttatggcgcaagcaaatacattgcaggccagcagcagtgagccttacaccataaaagccagcgatctggcgaaaaaggagcaggagctgacaaatttcccgttgatggcttcggtgaaagagacgatccagacgctggataatgcccaggtagaactcattgaacccggtcgcgccgccaacccggaaaacgtcaaacgcgttgagggaatcatcaaagccagcgactgggaatatcttttcccgctgcgtgctaaagaatatacctacagcaatttcctgaaagcagtcggcaaattcccggcgctgtgtaagacctataacgatggtcgcgacagtgatgcgatttgccgcaaagagctggctacgatgttcgcccactttgcgcaggaaaccggcggccatgagagctggcgtccagaggccgaatggcgtcaggcgctggtgtatgtgcgtgaaatgggctggagcgaagggcagaaaggcggctataacggcgaatgtaatccgagcgtctggcaggggcaaacctggccgtgcggcaaagacaaagatggtgaattcctgagttactttggccgcggtgcgaaacagttgtcctataactacaactacgggccgttctccgaagcgatgtatggcgacgttcgcacgctactggataaaccggagctggttgccgatacctggctgaacctggcgagcgctattttcttctttgcctacccgcagccgccgaaacctagcatgttgcaggtcatcgatggcacctggcagccgaacgcgcatgataaggctaatggtctggtgcccggctttggcgtcaccacccagattatcaacggcggcgttgaatgcggcggcccgacggaaatcgcgcagtcgcagaatcgtatcaaatactacaaagagttcgctaactacctgaaagtaccggttccggcagatgaagtgctgggctgcgccaacatgaagcagttcgatgaaggcggcgcgggcgcattgaagatctactgggaacaagattggggatggagctcggatacgccggacggcaaaacctatgcctgccaactggtgggttatcagacgccattcagcgcgtttaaagagggggattacacgaaatgtgtacagcatttctacaatgtgaacatcattaatgatgacggttcttcgactaaaccggatgaagagcctgtaacgccaacaccggctgatgatacgcctgcacctgcgccagtgccggatgaaacgccagcagagccgaccaccgttaaccatgcgccggtagcccatattgcagggccgattggcgcggtagatgcgggggcgcaggtctctttgagcgcggagggttcgactgacgaagacggcaacaaactgacctacacctggcgtgctcaggatggtcagaccgtgtctggcgaagacaaagcggtcgtaaccttcgccgcgccggaagcggcgaccgctcagcagtacgaggtgagtctgaccgtcagtgatggtgagctgagcagcaccacctcttatctgctcaacgtgaaagcgaaagcggcaacgccatctcaggacgacggcgcttcgggttcgtatccggcatggagcgcgaacagcaagtacaatgcgggcgatatcgtgaataaccacggtaagctgttccagtgcaaaccattcccgtatagcggctggtgtaatacggcgccggcctattatgaacccggtgcgggtctggcatggtctgacgcgtggagcgcgctgtaa

SEQ ID NO: 74150 - DNA, 1014 bp, Citrobacter koseri
atgaaggtactggttaccggcgccaccagcggcttaggtcgaaacgcggttgagtttttgcgcaataaaggcatcagcgtcagagctaccggtcgcaatgaagcgatgggcaagctgctgcaaaaaatgggagcggaatttgtccatgcggatttaaccgagctggtctcttcgcaggcaaaagtgatgctcgcaggcattgatacgctgtggcactgctccagtttcacctcgccgtggggaacccaggaagccttcgatctggcgaacgttcgcgccacccgacgcctcggcgaatgggccgtcgcctggggcgtacgtaactttattcatatctcctctccgtcactctattttgattatcaccaccatcgcgatatcaaagaggattttcgtccgcaccgcttcgccaacgaatttgcacgcagcaaagcggccggtgaagaggtgattaacctgctggcgcaggccaacccgcagacgcgttttactgtcctgcgcccgcaaagtctgtttggcccacacgataaagtctttattccgcgtctggcgcatatgatgcaccactacggcagcgttctgttgccgcacggaggcagcgcgttggtggatatgacttattatgaaaatgccgtccatgcgatgtggctggcaagccaggaaagcagtgacaagctgccttctggtcgggtctataacatcacaaacggtgaacaccggacgctgcgcagcattgtgcagaagctgattgatgaattaaacattgattgccgaatccgttcggttccgtatccgatgctggatatgatcgcccgcagcatggagcgtttcggcaataaatcggcgaaagagccgacgctgacgcactacggcgtttccaagctgaatttcgattttacgctggacaccacgcgcgcccaggaggaactgggctatcagcccatcgtcacgctggatgaaggcattgagcgtaccgccgcctggctgcgcgatcacggcaagctaccgcgctga

SEQ ID NO: 74151 - DNA, 1431 bp, Citrobacter koseri
gtgccgcaacgtattttggttcttggcgccagtggttacattggtcaacatctggtgcgggcgctcagcgcgcaagggcatcagattctggcggcggcacgtcgcatcgaacggctggaaaaacagcaactggctaacgtcagttgtcataaagtcgatctcaactggccggataatctgcccgcgctgctccgcgaagtcgacaccgtctattatctggtgcatggcatgggcgaaggcggcgattttattgcccatgagcgccaggttgcgatgaacgtgcgcgatgcgctgcgtgaagtaccggtcaaacagctcatattcctcagttcattgcaggcgccgaaacatgagcagtctgaccatttgcgcgcccggcagttaactgcggagacgctgcgcgaatccggcgtgccggttactgaactgcgcgccggcattatcgtcggcgcaggttcagccgccttcgaagtgatgcgcgatatggtctacaacctgccggtgctgacgccgcctcgctgggtacgctcccgaaccacgcccatcgcgctggaaaatttgctgcactatctggtggcgttgctggatcaccctgcctgcgagcaccgggttctcgaagccgccgggccgcaggtcttaagttatcaggagcagttcaagcactttatggccgtcagcggcaaacatcgcctgctgatccccatcccttttccgacccgctggatttcagtctggtttttaaatgtcattacgtccgttccgccgaccacggcaaaagcgctgatccaggggctgaaacatgacctgctggccgatgataccgaactgcgggcgttggtcccccagacgctcatctcctttgacgatgccgtgcgtcgcacgctgaaggaggaagaaaaactggtcaactccagcgactggggatacgacgcccaggcgtttgcccgctggcgaccagagtatggctattttgccaaacaggccggattcacggttaaaacctccgccagccggaaagccctgtggcaggtgatcaaccgtctcggcggcaaagaaggctatttctttggcaatattctctggaaaacgcgtgcggcaatggatctgctggtggggcatcgactggcaaaaggccgacctgaacacgcgcttcttcagaccggcgacacggtagacagctggaaagtcatcattgtcgagccggaaaagcagctgaccttactgtttggcatgaaagcgccgggtcttggccgtctgagctttacccttgaagataaaggcgatcaccggcaaattgacgtgcgcgcctggtggcacccgcacgggatgcccggccttttctactggctgctgatgatcccggcgcatctctttattttccggggtatggcaaagcgaattgcccggcttgcagaacaaatcacagattaa

SEQ ID NO: 74152 - DNA, 1002 bp, Citrobacter koseri
atgatcgatttacgtagtgataccgtcacccggccaagtcgtgccatgctcgaagaaatgatggccgccccggtcggggacgacgtgtacggagatgacccaactgtcaacgccctccagcaatacgccgctgagctttccggcaaagacgcggcgatttttttacccaccggcactcaggctaacctggtcgctctgctcagccactgtgaacgcggcgaagagtatatcgccggtcagggcgcacataactatctgtacgaggcaggcggcgcggcggtgctgggcagcattcaaccgcagcccattgatgccgccgcagacggtacgttgccgctggataaggtcgccgcgaagatcaaggcggatgatatccattttgcccgcactcgcttactcagtctggaaaacacccacaacggtaaagtgctgccgcgcgaatatttaaaacaggcgtgggaatttacccgcgagcgcggtctggcgttacacgttgacggcgcgcgtatttttaacgcggtcgtcgcctacggctgcgaactgaaagacattactcaatactgcgattcattcaccatttgcctgtcaaaaggtctggggacgccggtaggctcactgttagtcggcaaccaggactacattaagcgcgccatccgctggcgcaaaatgaccggcggcggtatgcgtcaggcgggtattctggcttctgccgggctgtacgcgttgaagaataacgtcgcacgtttacaggacgatcacgacaacgcggcctggatggcggagcaactgcgtgaagctggtgcggatgttatgcgtcacgacaccaatatgctgtttgtccgcgttggtgaagagaacgcggcggcgctgggcgaatacatgaaggcgcgtgacgtgctgattaacgcgtcgccgatcgtgcgtctggtgacgcatctggacgtatcgcgtgaacagcttgctgaagtcgccgcccactggcgcgcctttttaacccgctaa

SEQ ID NO: 74153 - DNA, 1719 bp, Citrobacter koseri
atgaaacaaaccgttgccgcttacattgcaaaaacacttgaacaggctggcgtgaaacgtatctggggcgtgacgggcgactccctgaacggcctgagcgacagcctgaaccggatggggacgattgactggatgtcgacgcgccatgaagaggtcgccgcctttgccgctggcgcggaagcacaactcaccggtgaactggcggtgtgcgcgggttcatgcgggcctggcaacctgcatttgattaacggtctgttcgattgccaccgtaatcacgtcccggttctggctatcgccgcccacattccttccagcgaaatcggcagcggctactttcaggagacccacccacaagagctgtttcgcgaatgcagccactattgcgagctggtttccaccccggagcagatcccgcaggtactggcgatcgccatgcgtaaagcggtgcttaatcgtggcgtctccgtcgtggtactgccgggcgacgttgcgctgaaaccggcgccggaaagcgccagcacccactggtatcatgccccgctgccgatcgtaaccccggccgaagaagagctgaaaaaactggcacagctattacgttactccagcaatatcgccctgatgtgcggcagcggctgcgcgggcgcgcataaagagctggtggaattcgccgccaaaattaaagcgccaattgttcatgcgctgcgcggcaaagagcatgtagagtacgacaacccttacgatgtgggcatgacgggattgatcggcttctcatccggtttccatacgatgatgaatgctgacaccctgatcctgctcggcacccagtttccctatcgcgccttttacccgaccgacgccaaaatcattcaaatcgatatcaacccggcaagcattggcgcgcacagtaaagtcgatatggcgctggtcggcgatattcactccacgctcgccgcgttattgccgatgctggaagaaaaaaccgatcgtaaattccttgataaagcgctggagcactatcgcgacgcgcgcaaagggctggatgatttagccaaaccgagcgagaaagcgattcacccgcaatatctggcgcagcagatcagccgtttcgccgcagatgacaccatctttacctgcgacgtcggcacgccgaccgtatgggcggcgcgttatctgaaaatgaacggtaagcgccgtctgctgggatcgtttaaccacggttcaatggccaatgccatgccgcaggcgttaggcgcccaggccaccgaaccgggccgtcaggtgatcgccatgtgcggcgacgggggattcagtatgctaatgggcgatttcctctctgtcgtacagatgaagctgccggtaaaaattgttgttttcaacaacagcgtgctgggctttgtggcaatggagatgaaagcgggcggctacctcaccgacggcaccgagctgcacgacacgaacttcgcccgcattgctgaagcctgcggcattacagggctccgcgttgaaaaagccgccgacgtcgacgaggcgctgcaacgcgcgctgtctatcgacggtccggtactggtcgatgtggtcgtggcgaaagaagaactggccattccgccgcaaatcaaactggagcaggccaaagggtttagcctgtatatgctgcgcgcgatcatcagcgggcgcggtgatgaagtgatcgaactggcgaaaaccaactggctaaggtaa

SEQ ID NO: 74154 - DNA, 435 bp, Citrobacter koseri
atggttacaacgttattaaatgcagtgaaccgtatgctgacgcatgaagattttggcaagtttctgttacgcctcgcagtaggggggctgatgctgtttcacggcctgcataaactgttcgatggtattgatggcattagcaatatgctgattgcaaaaggattgcccgggtttatcgcctatggcgtgctggtgggcgaggtgattgcgccttgcctgattgtgctgggtattcttacgcgtcctgccgcgctggtgctggcattgacgatggtggtggcgtggttaatggtcggcaccgggaaaacctggcaactggatgccgtcggcgcatgggcgatagaaagtttagtttatttctttattggcgcgctggcggtggcgtttctgggggcggggcggttctctgttgcgggaaattcggcctggcggtaa

SEQ ID NO: 74155 - DNA, 969 bp, Citrobacter koseri
atgacgatgccaaccactcagtgtccgtggcggatgcaggtacatcacatccatcaggaaaccccggatgtgtggactctctcattactgtgtcacgatcactatccgtaccgtgccggtcagtatgcgctggtcagcgttcgcaactctgcggatacgctgcgggcctacaccatttcgtccacgccgggcgtgagcgagtacattacgctgacgatccgtcgcattgatgaaggcgcaggttcacagtggttaacccgcgaggtgaaacgcggcgattatatctggctgtccgatgcgatgggcgactttatctgtgaagacaaagccgaagacaagttcctgatgctggcggccggttgcggcgtcacgccaattatgtcgatgcgtcgctggctggcaaaataccgcccgcaggcagatgtgcaggtgatcttcaacgtgcgttcgccgcaggatgtgattttcgctgaggaatggcgtcagtacccggtcacgctggtggcggagaacaatgcgacccacggtttcgtggcgggtcgcctgaccactgaattactgaaaaacgtgccggacctggcatcgcgcaccgtcatgacctgcggccctgcgccgtatatggacatggttgagcaggaagtgaaagcgctcggcgtaacgcgcttctttaaagagaagttctttacaccggttgccgaagcggcaacggagggtctgaagttcaccaaactgcaaccggcgcaggagttttacgcgcctgtcggcaccacgctgctggacgcgctggaaagcaataaagttccggtgactgtggcatgtcgtgctggcgtgtgcggctgctgcaaaaccaaagtggtttccggtgaatatacggtcagcagcaccatgacgctgaccgatgcggaaatcgccgacggttatgtactggcctgctcctgccatccgcagggcgatttagttctggcataa

SEQ ID NO: 74156 - DNA, 1689 bp, Citrobacter koseri
atgtatattaaatataactttaaaaaaggtgtgaccatgttttgtgtgcaatgtgaacaaaccatccgtactccggcggggaacggctgctcctacgcgcagggtatgtgcggtaaaacagcggaaacgtccgatctccaggatctgctgattgcgtccctgcaaggtctgtctgcatgggctgttaaagcccgtgaatatggcatcatcgatcatgacgttgacaactttgccccgcgtgcatttttctccactctgaccaacgttaacttcgactctccgcgtatcgtcggctatgcccgtgaagcgatcgccctgcgcgaatcgctgaaagcgcagtgccagaacatcgatgcaagcgccacggtaaacaacccgatggccgacctgcaactggtcagcgacgatctgggcgatttgcaacgtcaggccgccgagttcaccccgaacaaagacaaagccgctattggcgagaatattctcggcctgcgtctgctttgcctgtatggcctgaaaggtgcggcagcgtatatggagcacgcccacgttctgggtcagtatgacaacgacatctacgcacagtaccacaaaatcatggcgtggctgggcacctggccttccgatatgaacgctctgctggaatgttctatggaaatcggccagatgaacttcaaagtgatgagcatcctggatgccggtgaaaccaccaaatacggccacccgaccccaactcaggttaacgtgaaagcggttgaaggtaagtgcatcctgatctccggtcacgacctgaaagatctgtacaacctgctggagcagaccgaagggactggcgtgaacgtctatacccacggtgaaatgctgcccgcgcacggttacccggaactgcgtaaattcaaacacctggtcggtaactatggcagcggctggcagaaccagcaggttgaattcgcccgcttccctggccctatcgtgatgacctctaactgcatcatcgacccgaccgttggcgcgtatgacgaccgtatctggacgcgcagcatcgtcggttggcctggcgtaaaccacctggaaggcgaagatttctctccggttatcgctcaggcgcagcagatggcaggcttcccgtacagcgaaatcccgcatctgatcaccgtcggtttcggtcgccagacgctgctgggcgcagcagacagcctgatcgacctggtcagccgcgaaaaactgcgtcacatcttcctggtgggcggctgtgacggcgcgcgtggcgaacgtaactacttcaccgatttcgcgaccagcgtaccggatgactgcctgattctgacgctggcctgtggtaaataccgcttcaacaaactggaattcggcgacatcgaaggtctgccgcgtctggttgacgccggtcagtgtaacgacgcttactccgccatcattctggccgtcacgctggcagaaaaactgggctgtggcgtgaacgacctgccgctgtctctggtactctcctggttcgaacagaaagcgatcgtcatcctgctgacgctgttgtctctgggcgtgaaaaacatcgtaaccgggccgactgcgccaggtttcttcaccccggatctgctggctgtcctcaacgagaaatttggcctgcgtcaggtcaccaccgttgaagaagatatgcagcaactgttgagcgcgtaa

SEQ ID NO: 74157 - DNA, 900 bp, Citrobacter koseri
atgttttcaggacttttaatcattttggttccactgattgtgggctacctcattccacttcagcatcaggccgcattaaaactgatcaaccggctgttaagctggattgtctacgtcattctcttttttatggggatcagcctggcgttcctggataatctcgccagtaatttgctcgctatttttcattattccgctgtcagtattaccgttattttgctgtgcaacatcgcggcattattctggctggaacgttcgctaccgtggcgacacaaccaccagcaggagaaattaccttcacgtatcgcgatggcgcttgagtcacttaaattatgcggcgtcgtggtgctgggttttctgcttggcctcagcgggctggcatttctcaaacacgctacggaagccagcgaatatacgctgatcttcttattattcctgatcggcatccagttgcgaaacaatggcatgaccttaaaacagattgtgctgaatcgccgggggatgattgtcgccgtggtggtggtcgccagctctatgctcggcggagtcatcaatgcgctcattctcggcctgccgatcaaaaccgcgctggcaatggcatcaggtttcggctggtattccctgtccggcattttattgaccgaatcgttcggcccggtaattggcagcgccgctttctttaacgatctggcgcgcgagctgatagcgattatgctgatccccggtctggttcgtcgcagtcgctccaccgcgttagggttatgcggcgccacgtcgatggacttcacgttgccggtacttcagcgtacaggcggtctggagatggtgcctgccgccatcgttcacggttttatcctcagcctgctggtgccgatcctgatggcctttttctcagcctga

SEQ ID NO: 74158 - DNA, 696 bp, Citrobacter koseri
atgtttagaaaattagcagccgaatgtttcggtacattctggctcgttttcggtggctgcggaagcgccgttctggctgcggcattccctgaactgggaattggttttgcgggtgtcgcgctggcttttggtctgaccgtactgacaatggcattcgccgtaggtcatatttccggcggacattttaacccggcagtgacattaggtttatgggctggcggtcgttttccggcaaaagaggtcattggctatattatcgctcaggttgtcggcggtattattgccgcggcggtgctgtatctgattgccagcggtaaagctggctttgatgccgctgccagcggtttcgcctctaacggttacggcgaacattcccctggcggttattccatgctttccgccatcgtcattgaaatcgtgctgaccgccggtttcctgctggtcattcatggcgcgacggacaaacacgccccggcgggttttgccccaatcgccattggtctggcgttaaccctgattcacctgatcagtattccggtcaccaacacctctgtgaacccggcgcgcagcaccgcggttgcgatcttccagggcggttgggcattacaacaactgtggctgttctgggtgatgccgattatcggcggtattctgggtggcgtgctgtaccgcacgctgcttgaaaaacgtgattaa

SEQ ID NO: 74159 - DNA, 1659 bp, Citrobacter koseri
atgattctcgaacgcgttgagattgtgggttttcgcgggatcaatcgattatcgttgatgctggagcaaaacaacgtgctgattggggagaacgcgtgggggaaatccagcctgctggatgccttaactttgctgctgtcgccagaatcggaactgtatcatttcatccgcgaggatttctggtttccccccggagatattcaaggacgtgaacatcatctgcatattatcctcactttccgtgaatctcagccaggccgccatcgggtgcgtcgataccgcccgctggaggcatgctggtctccctgtcaggatggttttcaccgtattttctaccgcctggagggggagagcgcggcagatggcagcgtgatgacgctgcgcagcttccttgatggcgacggccacccgctaccgatcgatgatattaatcgccaggcacaccatctcattcgtttgatgccggtactgcgcctgcgcgatgcgcgctttatgcgacgcatccgtaacggtacggtgcccgatgttcccgatgttgaagttaccgcctgccagctggactttctggcgcgagaactggcgacccgtccgcagaatttaacggacgggcagatccgccaggggctttcggcgatggtacagctgctggagcactacttttccgagcaaggcgcggggcaatcccgtcatcggttgatgcgtcgccgttcgaacaacgagcagcgtagctggcgctatctggacattattaaccggatgatcgacaaacccggcggccgcacgcatcgcgtgatcctgctggggctgttctccacgctattacaggcaaaagggacgctgcggctggataaagatgcccgaccattattattggttgaagacccggaaacgcgtctgcatccgattatgctgtcggtggcatggcagttgttgaatcttttaccgctgcaacgtgtggcaacgaccaattccggcgagctgctgtcgctgacgcctgtggagcacgttgtccgtctggtgcgtgaatcttcacgggtcgcggcctggcgactggggcctggcgggctgagcgcggaagatggtcgccgcatcgcctttcatattcgttttaaccgggcctcgtcgctgttttcccgctgctggctgctggtggagggcgaaacggaaacctgggttatcaacgaactggcgcgccagtgtgggcaccactttgatgccgaagggattaaagtgatcgaattcgcccagtctggcctgagaccgctggtaaaattcgcccgccggatgggaattgagtggcatgtgctggtggatggcgacgaagccgggaaaaaatatgccgcaacggtgcgcggtttgctgaataacgaccgggaagaagagcgtgagcacctgacggcattgcctgctctggatatggaacattttatgtatcggtcaggatttgctgatgtctttcatcgggtggcgcaaataccggaaaacgtcccgatgaatatgcggaaaattatctcgaaggcgatccaccgctcgtcaaagcctgacttagccattgaagtggcgatggaggcagggcgacgtggcgttgacgcggtgccgacgctgttcaaaaaaatgttctcccgcgtactctggctggcgcgcgggagagcggattaa

SEQ ID NO: 74160 - DNA, 1116 bp, Citrobacter koseri
atgaagctcaagggaaaaatgaaaaagcgctatcttctcatcgccctcattatcatcgtggcgatgtttacgctctggcgaacgttaaatgcgccgctaccccactatcaaacgctgattgtccgtccgggcgacctccagcagagcgtgctggcgacggggaaactggatgcgctgcgcaaagtggatgtcggggcgcaggtcagcggccagcttaaaacgctgtcggtcgcaattggcgacaaggtgaaaaaagatcagctgcttggcgttatcgatcctgaacaagcggaaaaccagatcaaagaggtggaagccacgctgatggaattacgcgctcagcgccgacaggctgaagccgagtggaaactggcgcgcgtcaccctgtcacgccagcaacagctggcgaaaacccaggcgatttcgcgacaggaactggatacggccgcgacggaaatggccgtcaaacaggcgcagatcggcacgattgacgcgcagattaaacgtaatcaggcttctcttgatacggcaaaaaccaacctggattacacccgcattgtcgccccgatggcaggcgaggtgacgcaaatcaccaccttgcagggacagacggtgattgccgctcaacaggcgccaaatatcctgacgctggcggatatgagcaccatgctggtgaaggcgcaggtttccgaagcggacgttattcacctgcgtcccggacaaaaagcctggtttaccgtgctgggcgacccccagacccgctatgaaggcgcgctgaaagatgtcctgcccacgcctgaaaaagtgaacgacgctattttctattacgcgcgttttgaagttcctaacccgaaagggattttgcgcctggacatgaccgcacaggtgcatattcagctcacggacattaaaaacgtgttgacgattccgctggcggcgcttggcgacccggtcggcaacaaccgctacaaagtcacgctgttgcgtaacggcgaaacccgtgaacgcgaggtgtcgattggcgcgcgtaacgataccgacgtggagatcgtcaagggactggaagagggcgatgaggtggtgatcagcgagagcaaacctggagccgcgcaatga

SEQ ID NO: 74161 - DNA, 1947 bp, Citrobacter koseri
atgacggcattgcttgagctgagcaatattcgccgtagttatccgtcaggtgaagaacaggtcgaggtgctgaagggcatctccctgcaaattcatgccggagagatggtagcgattgtcggcgcgtccggttccggtaaatcgaccctgatgaatatcctcggctgtctggataaacctaccagcggcacctatcggattgcggggcgggatgtctccacgctcgacagcgacgcgctggcgcaacttcgccgcgaacattttggttttatcttccagcgttatcatttgctctcacatctgacggcggcgcaaaacgttgaggtgcccgccgtttatgccggtacggagcgcaaacgacggctggagcgggccgaagagttgctgcaacggctggggctgggcgatcgggtggattatcagccttcgcagctctccggcgggcaacagcagcgggtgagtattgcgcgcgcgctgatgaacggcgggcaggtgatcctcgccgatgaaccgacgggggcgctcgacagccattccggtgatgaagtgatggcgattctgcatcaactgcgcgatcgggggcatacggtcattatcgtgacccacgatccgcaggttgccgctcaggccgaacgggtgattgaaatccacgatggcgagatcgtgcgtaatccgccgtcgcagaaaacgcaagcggggcaaggtatcgcggagcccgtcgtcaaaacggcctccggctggagccagtttgtcagcggatttcgtgaggcgctcacgatggcgtggctggcgatggccgccaataaaatgcgcaccttgctcaccatgctggggattattatcgggattgcgtcggtggtgtcgatcgtggtggtcggcgatgcggcaaaacagatggtactggcggatattcgcgccattggcaccaatactatcgatatttaccccggtaaagacttcggcgacgacgatccgcaatatcagcaggcgctgaaatatgacgatctgaacgcgattcagaagcagccgtgggtaacgtccgcgacgcctgccgtatcgcaaaatctgcggcttcgctacggcaacatcgacgtggccgccagcgccaatggcgtcagcggcgactattttaacgtctacggcatgacctttagcgaggggaacacgttcaacagagagcagttgaatggccgggcacaggtggtggtgctcgacagcaacacgcggcgtcaacttttccccaataaagcgaaagtggtgggcgaagtgatcctggtcggtaatatgcctgcaacggtgatcggcgtggccgaagagaaacagtctatgttcggcagcagtaagatcctccgcgtctggctgccgtacagcacgatgtccgggcgggtgatggggcagtcatggctgaactccatcaccgtccgggtgaaagagggatttgacagcgcgcaggctgagcagcagcttacccgcctgctgacgctgcgccacgggaagaaggatttctttacctggaatatggacggcgtcttgaaaaccgccgaaaagaccacacgtactcttcaactgttcctgacgctggttgcggtgatctcattggtggttggggggatcggcgtaatgaacattatgctggtttccgtcactgaacgaacccgggagattggcatccgtatggcggtaggcgcgcgcgccagcgatgtgctgcaacagttcttaattgaagcggtgctggtgtgtctggtcggcggcgcgttggggatcgggctgtcgatgctgatcgcctttacgctacagatgtttttacccggctgggaaatcggcttttcgcccgtcgcgctcctgacggcgttcttgtgctcgacgtttaccgggatactgtttggctggttgcccgcacgtaatgcggcacgactcgatccggtagatgcgctggcgcgggagtga

SEQ ID NO: 74162 - DNA, 222 bp, Citrobacter koseri
atggaaacgggtactgtaaagtggttcaacaatgccaaagggtttggtttcatctgccctgaaggcggcggcgaagatattttcgcccattactccaccattcaaatggatggttacagaacgcttaaagccgggcagtctgtccggtttgatgtccaccaggggccaaaaggcaatcatgccagtgtcatcgtgcccatcgaagcagaagccgttgcatag

SEQ ID NO: 74163 - DNA, 321 bp, Citrobacter koseri
atgggtaagacgaacgattggctggattttgaccagctggcggaagataaggtgcgcgacgcgctaaaaccgccatctatgtataaagtgatattagtcaatgatgattacactccaatggagtttgttattgacgtgttacaaaaattcttttcttatgatgtagaacgtgcaacgcaactgatgcttgcggttcactatcaaggtaaagctatctgcggcgtatttaccgccgaggttgcggagaccaaagtggcgatggtgaacaagtatgcgagggagaacgagcatccgttgctgtgtacgctggaaaaagcctga

SEQ ID NO: 74164 - DNA, 2277 bp, Citrobacter koseri
atgctcaatcaagaactggaactcagtttaaacatggctttcgccagagcgcgcgagcaccgacatgagtttatgaccgtcgagcacttgttactggcgttgctcagtaacccatcggcccgcgaagcgctggaagcgtgctccgtggatttggtggcgctccgtcaggaacttgaagccttcattgaacaaaccacacccgtactgcctgccagcgaagaagagcgcgacacacagccgacgttgagttttcagcgcgtgctgcaacgtgcggtctttcacgttcagtcctccgggcgcagtgaggtaactggcgcgaatgtgctggtggctatcttcagcgaacaggaatcccaggcggcctatctgctgcgtaagcatgaagtcagccgcctcgacgtggtgaactttatttctcatgggacgcgaaaggacgagccgagtcagtcttctgaccccggcaatcagccaaatagcgaagaacaagttggcggggaggaacgtatggagaacttcacgactaaccttaaccagcttgctcgcgtgggcggaatcgatccgctgattggccgtgaaaaagagctggagcgtgccattcaggtgctgtgtcgccgccggaaaaataacccgctgctggtgggtgagtccggcgtcggtaagacggcgattgccgaaggtctggcctggcgtattgtccagggcgatgtgccggaagtgatggcggattgcaccctctactcgctggatatcggctcgctgctggcgggcaccaagtatcgcggcgatttcgaaaaacgttttaaagcgctgctcaaacagctggaacaggacaccaatagcatcctgtttattgatgagatccacaccattatcggtgcgggtgcggcgtcgggcggccaggtggatgccgcaaacctgattaaaccgctgctctccagcggtaagatccgcgtgattggttccacgacgtatcaggaattcagcaacattttcgagaaagaccgcgcgttagcgcgtcgcttccagaaaattgatatcactgagccgtccgtggatgagactgtgcagatcatcaacggcctgaaaccgaagtacgaagcgcaccacgatgttcgctacacggcgaaagcggtgcgtgcggcggtagagctggcggtgaaatacatcaacgaccgtcatctgccggataaggcgattgacgtcatcgacgaagccggtgcgcgtgctcgtctgatgccggtcagcaagcgcaagaaaaccgtcaacgtggcggatattgagtccgttgtggcgcgcatcgcgcgtattcctgagaagagcgtctcgcagagcgatcgcgatacgctgaaaaacctcggcgaccgcctgaaaatgctggtcttcgggcaggataaggcaattgaagcgctgaccgaagcgatcaaaatgagccgtgcgggtctcggtcatgaacataaacctgtcggttcgttcctgttcgcggggcctaccggggtagggaaaaccgaggtaacggtacagctctccaaagcactgggtattgagctgctgcggtttgatatgtccgagtatatggaacgccacaccgtaagccgcctgatcggcgcgcctccgggatatgtcggtttcgaccagggtggtctgctgaccgatgcggttatcaaacatccgcatgcggttctgctgctggatgaaattgagaaggcgcatccagatgtctttaacctgctgttgcaggtgatggacaacggcacgctgacggacaacaacgggcgtaaagcggatttccgcaacgtggtgctggtgatgaccaccaacgccggagtgcgtgaaactgagcgtaaatcgattggcctcatccatcaggacaacagtacggacgcgatgggtgaaatcaagaaagtgtttacgccggagttccgtaaccgtctcgacaacattatctggttcgatcacctgtctactgaagtgatccatcaggttgtcgataagtttatcgtcgagttgcaggttcaactggatcagaaaggcgtctccctggaagtgagtcaggaagcgcgtgactggctggcagagaaaggctatgaccgcgcgatgggcgcacgtccaatgacacgcgtcgtccaggacaacctgaaaaaaccgctggcaaacgagctgctgttcggctcgctggttggcggcggccaggtgaccgttgcgctggataaagagaaaaatgagctgacgtatggcttccagagtgcgcaaaagcacaaaccggaagccgcgcattaa

SEQ ID NO: 74165 - DNA, 678 bp, Citrobacter koseri
atgtccagtcctgctaattttaatggtttgcgcccggtaattgacgttaacgattccgttatgctgttaatcgaccaccagagcgggcttttccagaccgttggcgatatgccgatgcctgaattgcgcgcccgtgcggccgcgctggccaaaatggcgaccttgtcgaagatgccggtcattacgacggcatctgtaccgcagggaccgaacggcccgctgatcccggagatccacgccaatgcaccgcacgcgcagtatattgcccgtaaaggcgagatcaacgcctgggataacgctgatttcgtccaggcggtaaaagcgaccggccgtaaaacgctgatcatcgccggtacgattaccagcgtttgcatggcattcccggcgattagcgcagtcgcggaaggttataaagtgtttgctgtcattgatgcttccggcacctacagcaaaatggcccaggagatcacgctggcacgcgttgttcaggcgggcgtcgtaccgatggataccgccgcagtggcttccgagttgcagggcacctggaaccgtgaagacgcagctgagtgggctgaggtctacaccaaagtgttcccggcatatcagttgttgatcgagagttacagcaaagcgcaggaagtggtgaaaaacggtgagatactggattcacagcgctaa

SEQ ID NO: 74166 - DNA, 867 bp, Citrobacter koseri
atgaaacagattacaggcgtctataccgcacctcgcccgcactgggttggcgatggatttccggttcgttcgctattctcttatcagtcccatgcagaacagttaagcccgttcctgctgctggactatgccgggccgcatacctttacccctggcgccgaaaacgaaaaacgtggagtgggagaacacccgcatcgcggctttgaaaccgtcacgattgtttacagcggcgaagttgagcaccgcgattcaacaggccgaggcggcgtcatcggccctggcgatgtgcagtggatgaccgcaggcgcaggcattttgcatgaagagtttcattcttcagcctttacccaacagggaggcgagctggaaatggtgcagctgtgggtgaacctgcccgcgaaagacaaaatggcggtgccgggttatcagggcatcagcagcgatctcatccctgccgtaacgctgcctggcgaagccggaaccgcgcgcattattgcgggccgctatcaggatgtgaaaggcccggcgcataccttctcgccgttgaatgtctgggatatgcgcctgcaacgcgatcgtcatcttacgctgcccgtcgctgaagggtggagcaccgcgctggtcgtcctgaaaggaagtattacggtgaatggcacaacaccggtaaatgaagcgcaactggtggtgttaagccaggaaggtgaaaacctgtatctcgaagccagtagcgatgccagcgttctgctgttgtcgggcgagccgctgaatgagcccattgtcggttacggcccatttgtcatgaacacaaaacaagaaatcgcagaagccgtacgcgatttcaactccggccgttttggccaaatctga

SEQ ID NO: 74167 - DNA, 912 bp, Citrobacter koseri
atgacaaaaccggatctcaatgattttgcgtggtttgttcatgtcgtcgaggaggggggatttgcggcggcagggcgagcgctggatgaaccaaagtcaaagcttagccgacgtattgcgcaactggaggaacggctgggcgttcgccttattcaacgaaccacgcggcaatttaatgtcactgaagtcgggcagaccttttatgaacattgtaaggcaatgctggtggaagcacaggcggcgcaggatgcgatagccgccttacaggtcgagccgcgcggcattgtaaaactgacatgtccagtgacgttgctacatgttcatatcggcccaatgctggcgaagtttatggcgcgttatcccgatgtgtcgttacaacttgaagcaaccaaccgccgtgttgacgtggttggtgagggcattgacgttgcaattcgcgtccggcctcgtccttttgaagacagcgatctggtgatgcgtgtgctggcggacagggggcaccgtttgtttgccagcccggcgctggtacagcgtatgggaaatccttcttcaccagcagaactgcatcactggcccggactgagcctggcttcaggtaaacatatccaccgctgggaactctttggtccacagggcgcgcgtgctgaagttcactttacaccgcgtttgatcactacagacatgctggcgctgcgtgaagcggccgttgcgggcgtcggcctcgttcagttacctgttttaatggtgaaagaccaactggctgcgggggagctggttgccttgctggaaggatgggaacccagaagagaggtgattcatgcggtattcccgtcccgccgtggattattgccgtccgtacgcgcgctggtggattttttgacagaagagtatgcgcggatggtggaggattaa

SEQ ID NO: 74168 - DNA, 219 bp, Citrobacter koseri
atggccaaagaagacaatattgaaatgcagggtaccgttctcgaaacgttacctaataccatgttccgcgtagaattagaaaacggtcacgtggttactgcacacatctccggtaaaatgcgtaaaaactacatccgcatcctgacgggcgacaaagtgactgttgaactgaccccgtacgacctgagcaaaggccgcattgtcttccgtagtcgctga

SEQ ID NO: 74169 - DNA, 705 bp, Citrobacter koseri
atgcgcctggttcagctttctcgccactcaatcgccttcccctcgccggaaggcgcgttacgtgaacccaatggtttattggcgcttggtggcgatctcagtcctgcccgcttattgatggcctatcagcggggtattttcccgtggttttcaccaggcgacccgattctttggtggtcacccgatcctcgcgctattttgcagcctgaaacattacacatcagccgcagcatgaagcgttttcacaaacgatcgccctatcgcgtcacgcttaattatgcgtttggtcaggttattgaaggctgcgccaacgatcgtgacgaaggaacctggatcacgcgcgatgtggtggaagcgtatcaccgcttacatgagctggggcatgcgcattccatcgaagtatggcgacacaacgcgctcgtcggcggcatgtatggcgtttcacaaggcaccctgttttgcggcgaatcgatgttcagtcgccaggagaacgcctccaaaaccgcgctgcttgttttttgcgctgaatttattcgtcagggtggaaaattaatcgactgccaggtgctgaatagccacacggcatcgcttggcgctgtcgaaattccccgcaggcaataccttgagcatctgggatcattacggcaacagcgattaccgggtcatttctgggtgccgcgcacgttattttcgcctcaggcgtga

SEQ ID NO: 74170 - DNA, 1722 bp, Citrobacter koseri
atgcgtgccttgctaccgtatctgacgctgtataaacgtcataagtggatgttaacgctcggtattattctggccatcgtcacgctactggccagtatcggtttgctgacgctctctggctggttcctctccgcctcagccgtagtcggtgtggcgggtatctatagctttaactacatgctgccggctgctggcgtgcgcggtgcggcgatcacccgtactgcgggccggtatttcgagcgtctggtcagccatgacgccaccttccgcgtattgcaacatttgcgtattcatacgttcagcaagctgctgccgctctcccctgctggtcttgcccgctatcgtcagggcgagctgctgaaccgcgtcgtcgccgatgtcgatacgctggatcacctctacctgcgcgttatctctccgctggttggcgcgtttgtggtgattatggtggtcacgctggggctgagtgttctcgatttcaccctcgcgattacgctgggtggcattatgctgctgacgctgtttattatgccgccgctcttctatcgcgccggaaaaaacaccgggcagaacttaacccatttacgcggtcagtatcgccagcagttaaccgcctggctacagggtcaggcggaactgacaatatttggcgccagctcgcgctatcgggcgcaaatggaagccacggaattacagtggcatgaagcccagcgacgtcagtctgaattaacggcgctatcccaggccttaatgctgctgattggcgcactggcggtaatgctgatgttatggatggcttccggcggcgtcggcgataacagccagcctggcgcgctgatagcgctgtttgtcttttgcgcactggcggcatttgaagcgcttgctcccgttaccggcgcgtttcaacatcttggccaggtcatcgcctctgcgctgcgtattaccgaactgaccgagcagcagcctgaagtgaccttcccggatggcgaagcagcggctccccggcaggtaacgctgacgctgcgtgacgtttcattcagttacccggagcagccacaaaaggcgctggatgccctttctctgcaagtcgcgcctggagaacatatcgctattctcggacgtaccggctgcggtaaatcgacattgctgcaactgctcacccgcgcctgggacccgcagagcggcgatattctgcttaacgaccaaccgatttcaacgctggatgaagcggccctgcgtcgcaccattagcgtggtgtcacagcgagtacacctgttcagcgccacattgcgtgacaacctgctgctggcagcgccagacgcaaatgacgatacgctctcagagatgctgcgccgtgtcgggctggaaaagctgctggaggatggcggacttaacagctggctaggcgaaggcggacgtcagttgtcaggcggcgagcttcgtcgtctggctatcgcccgtgccctgctgcacgatgcgccgctcatgctgctcgatgaacccactgaagggctggacgcgacaaccgaaagccagatgcttgaattgctggcagaggttatgcgcgggaaaaccgttttaatggtcacgcatcgtctgcgcgggctgtcacgttttgatcaaataatagtgatggacaacggacaaattattgagcaaggtaatcacgcagatctgttagccaggcaggggcgttattaccagtttaagcaacgtctgtaa

SEQ ID NO: 74171 - DNA, 1767 bp, Citrobacter koseri
atgaataaaacccgtcaaaaagaattgacccgctggttaaaacagcaaagtgtaatttcccaacgttggctgaacatttcacgcctgttgggtttcgtgagtggcgtactgattgtcgctcaggcctggatcatggctcgcattctccagcatatgatcatggacaatattccccgcgaagccctcctgctccccttcatcgtactgatgttggtgtttgtcctgcgcgcctgggtggtctggctgcgcgagcgggtgggttttcatgccgggcagcatatccgatttgagatccgccgccaggtgctggatcgcctgcaacaagcagggccagcctggattcagggtaaaccggctggtagctgggcgacgctggtgctggagcagattgacgatatgcatgattactatgcccgctatctgccgcaaatggcgcttgctgtctgcgttcccctgttgattgtggcggcgattttcccgtcaaactgggccgccgcgctgattttgctcggcaccgcaccgctgatcccattatttatggcgatggtgggaatgggcgccgccgacgctaaccgccgtaatttccaggcgcttgcccgcctgagcgggcatttcctcgaccgcttacgcggtatggagacgctgcgcatcttcgggcgcggtgaagcagaaacggaaagcattcgtgtcgcttcacaagattttcgccagcgcacaatggaagtcctgcgtctcgcctttttatcctccggggtactggagttcttcacgtcgctgtccattgcgctggtcgcggtttatttcggtttctcctacctcggcgaacttaatttcggccattacgggacaggcgtcacgcttgccgctggcttcctggcgctgattctggcgccggagtttttccagccactgcgcgatctgggcaccttttaccatgccaaagcgcaggcggtaggtgcggctgacagcctgaaaacctttatggaaacacctctcgctcacccggaacgcggtgatgtcgaactttccgggaaagaaccggtaacccttgaagcgcaggatctgataattacctcgccggaaggtaaaacgcttgcaggaccgctgaatttcacactggccgcaggtcagcgcgccgtactggttggtcgcagcggttcaggaaagagttcactgttaaacgcgctgtctggctttctctcttatcagggctccctgtgcattaacggcgttgaacttcgtgatttatccccggaatcctggcgaaaacatctctcctgggtggggcaaaacccacaattaccggctggcacgctccgtgaaaacgtcctgcttgcccgcccggatgccagtgaacaagcgttacaggcggctctcgacagcgcctgggtcagtgagtttttacctctgttgccgcaaggcgtagacacgccgactggcgatcacgctggtcgcctttccgtcggtcaggcgcagcgggttgcggttgcccgcgccctgctgaatccctgcaaattgttgttgctggatgaacccgccgccagtctggatgcccacagcgagcagcgtgtaatgcaggcgctgaatgccgcatcaaaacgccagaccacgctgatggtaacgcatcagttagaagatcttgccgactgggacgtgatctgggttatgcaggacgggcaaatcatcgagcaaggtgattatgcccaactcagcagcgccaacggcgcgtttgcgacactattggctcatcgtcaggaggacatttaa

SEQ ID NO: 74172 - DNA, 969 bp, Citrobacter koseri
atgggcacgaccaaacacagtaagctgcttatcctgggttctggaccggcgggatacaccgctgcggtctacgctgcgcgcgcaaacctgcaaccggttctgattaccggtatggagaaaggcggtcaactgaccaccacgacggaagtggaaaactggcctggcgatccgaacgatctgaccggcccgctgttgatggagcgcatgcacgaacatgcgacaaaatttgatactgaaatcatcttcgatcacatcaatagcgtggatctgcaaaaccgtcctttccgtctgaccggcgacagcggcgaatacacctgcgatgcgctgatcatcgcaaccggcgcttccgcacgctacctcggcctgccgtctgaagaagcatttaaaggccgtggcgtatctgcctgcgccacctgcgacggtttcttctaccgcaaccagaaggtcgcggtcatcggcggcggcaacacggcggttgaagaagcgttatacctggcgaacatcgccgctgaagtgcatttgattcaccgtcgcgacggcttccgcgccgaaaaaattctgatcaagcgcctgatggataaagtggaaaacggcaacatcgtgctgcatacccaccgcactctggaagaggtgaccggcgatcagatgggcgttaccggtttgcgtctgcgtgatacgcaaaacccggacaacatcgaatcccttgacgttgcaggcctgtttgtcgccataggccacagcccgaacactgcgatttttgaaggtcagctcgaactggaaaacggctatatcaaagtccagtccggcatccacggtaacgccacgcagaccagcgttcccggcgtgttcgccgcaggcgacgtgatggaccatatttatcgtcaggcaatcacctcagcgggcacaggttgcatggcggcgctggacgctgaacgctaccttgacggtctggctgacgcgtgcaaatag

SEQ ID NO: 74173 - DNA, 495 bp, Citrobacter koseri
atggtagatagcaagaagcgccctggcaaagatctcgaccgtatcgatcgtaacattcttaatgagttgcaaaaggatgggcgtatttctaacgtcgagctttctaaacgagtgggactttcaccgacgccttgccttgagcgtgtccgtcggctggaaagacagggttttattcagggctatacggcgctgttaaacccgcattatctggatgcatcacttctggtttttgttgagattactctgaatcgtggcgctccagatgtgtttgaacaatttaacgccgcagtacaaaaacttgaagaaattcaagagtgtcatttagtttccggtgatttcgactacctgttgaaaacacgcgtgccggatatgtcagcgtaccgtaagctgctgggtgaaaccctgctgcgtctgcctggcgtgaatgacacacgtacttacgtggtaatggaagaagtcaaacagagcaatcgtctggtaattaagacgcgctaa

SEQ ID NO: 74174 - DNA, 3891 bp, Citrobacter koseri
ttgagccaggaatacactgaagacaaagaagtcacattgaaaaagttaagcagcgggcgccgacttctggaagcgttgctgatccttattgccctttttgccgtctggttgatggcagccttacttagctttaacccttcagatcccagttggtcgcaaaccgcatggcatgagcctatccataatttgggcggcgcgccgggcgcgtggctggctgacacgctgttctttatctttggcgtgatggcctacaccatcccggtgattatcgttggcggctgctggtttgcctggcggcaccagagcaacgacgattacatcgactattttgccgtgtcgctgcgcattatcggcgtcctggcgttgattcttacctcctgcggattagccgcaattaatgctgatgatatctggtacttcgcgtccggcggcgtcattggcagcctgttaagcaccacgcttcagcctctgctgcacagcagcgggggaacgattacgctgctgtgcgtctgggcagccggtctgacgctcttcaccggctggtcctgggtgagcattgcagaaaaactgggtggctggctgctgaatattctcaccttcgccagcaaccgtactcgccgcgatgacacctgggtcgatgacgacgagtatgaagatgatgacgaatacgaagaagatgaagcggtgggcgcacagcgcgaatcccgacgtgcgcgcatccttcgtggcgccctggcgcgccgtaagcggctggcagagaagttcagcaatccgcgtgggcgacacacggatgcggcgcttttctccggcaagcgtatggatgatgaagacgatatcgaatacagcgcgcgtggcgtggccgccgatcctgatgatgtgctgttctccggccatcgtgcgacgcagccggaatatgaggaatacgatcctctgctgaatgggcattcggtcacggagcctgttgcctccgctgctgcggcgacaacggcaacgcaagcctgggcggcgcctgttgatccggttatgtctgcaccgtcggtgccaggtgctgaaaccgcgcctgtgcaaccggtggtggaatggcagcctgttccggggccgcaaaccggcgaaccggtcattgcgcccgcgccggaaagttatccgccgcaaccacaatatgcgcagccgcaagcgccacatcatgaaccgtggcagcagcctgcgccgaccgagccgcaaccgcagtattacgctgaacacgcgtatgaacagcctgtgccgcaggtgcaggaacctgcggcggaacaaccctggcaccctgagccggtttatccgcaagagcctgtttatcaacacgagccgactttcgagccgcaaccggcttacccgcaggaaccggttcaggatacgtattaccagcagcagcctgctgttgagccgccgtctgcggtggagcctgagcctgtagcagaagaaattaaacccgcccgtccgccgctctactactttgaagaagtggaagagaaacgcgcgcgtgagcgtgagcaactggctgcatggtatcagccgattcctgagccagcgaaagcgccggagccggttaaaccatcggcaccgacagcagcttctgtgccgcctgttgaatccgttgccacggttgcgccgttggcggcaggcgtcaaagatgcaacgctggccgcaggcgcggcgtcggcatccgctgcacctgcgtttagcccggtaagcggtggtgcgccacgcccacaggttaaagaggggattggcccgcaactgcctcgccctaaccgcgttcgcgttccgacccgccgtgagctggcctcgtatggcataaaattaccgtctcagcgtatcgcggaagagaaagcgcgtgcggcggggcgtcatcagtatgatgccgaaacgcagtataccgatgatgaaattgatgagatgcagcaggatgagctggcacgtcagttcgcccagtctcagcagcatcgttatggttccgaatatcaacatgacgctcctcaggcagaagatgaggatgcagcagaagctgaactggctcgccagtttgcctcttcacagcagcagcgctatgccggggaacagcctgcgggagcccatccgttctcgctggatgattttgaattctcgccgatgaaagcgctggtggatgaaggcccgcatgagccgttgtttactcccggcgtgatgcctgagcagcctgttgcgccacagcagcagtatcagcagccgcaacagccggttgcgccacagcaacagtatcagcagccgcaacagcccgtcgcgccacagcagcagtatcaacaaccgcaacaaccggccgcgccacagccgcaggaaagcctgatccatccgttgttgatgcgtaatggcgacagtcgtccgttgcagaaacctaccacgccgttgccgtcgctggatctgctgacgccgccgccgagcgcagtggaaccggtcgatactttcgcgctggaacaaatggcgcgcctggtcgaagcgcgtctggcggatttccgcattaaagctgacgtggtgaactattccccagggcctgttattacccgttttgagctgaatctggcgccgggcgtgaaagccgcgcgtatttctaacctgtcacgcgatctcgcgcgttcactgtcaaccgttgcggtacgcgtggtagaagtgatccctggtaagccttacgtgggcctcgaactgccgaacaaaaaacgtcagaccgtctacctgcgtgaagtgctggataacgctaaattccgcgagaatccgtcgccgctcaccgtggtgctgggtaaagatatcgctggcgatccggttgtggccgatctggcgaaaatgcctcacctgctggttgcggggacgacgggttccggtaaatcggttggggtcaatgccatgatcctcagcatgctgtataaagcgcagccggaagacgtgcgtttcatcatgattgacccgaaaatgctggaactttcggtctatgaaggcattccacatctgctgaccgaagtggtcaccgatatgaaagacgctgccaacgcactgcgctggagcgttaatgaaatggaacgccgctataagctgatgtcggcgcttggcgtgcgtaatctggcgggctataacgagaaaattgccgaagcggcacggatggggcgtccgattccagacccgtactggaagccgggcgacagcatggatgcccagcatccggtgctggaaaaactgccgtatatcgtggttctggtcgatgaattcgccgatctgatgatgaccgtcggtaagaaagttgaagagctgattgcgcgtctggcgcagaaagcgcgtgccgctggtattcacctggtgctggcgactcagcgcccgtcggttgacgttattaccggtctgattaaggccaacattccgacgcgtatcgcctttaccgtatccagtaagatcgactcacgcacgatcctcgatcagggcggcgcggaatccctgttggggatgggggatatgctttattccggcccgaactcaaccatgccggtacgtgttcatggcgcgtttgtccgcgaccaggaagtgcatgcggtggtgcaggactggaaagcgcgtggtcgcccgcaatacattgacggcatcacctcggatagcgaaagcgaagggggcggcggcggctttgacggcggcgaggagctggacccgttattcgatcaggcggtgagctttgtgaccgaaaaacgcaaagcgtccatttctggcgttcagcgccagttccgtatcggttacaaccgtgcggcgcgcattgtcgagcagatggaagcccagggcattgtcagcgaacaaggccataacgggaatcgcgaggtgctggcgccaccgccgttcgaatga

SEQ ID NO: 74175 - DNA, 612 bp, Citrobacter koseri
atgaaaaaaatcgcaatcacctgcgcattactctccggctttgtggtgagcagcgtatgggcggatgccgccagcgatctgaaaagccgtctggataaagtcagcagcttccatgccagctttacacaaaaagtgactgacggcagcggtgccgccgttcaggaaggccagggcgacttatgggttaagcgtcctaatctgtttaactggcatatgacgcagcccgacgagagcattctggtctctgacgggaaaacgctatggttctttaacccgtttgttgagcaggcaacggcgacctggttaaaagatgcgacgggcaatacgccgtttatgctgatagcccgcaaccagtccagcgactggcagcagtacaacatcaaacaaaatggcgatgactttgtgctgacgccaaaaagcagcagcggtaacctgaaacagttcaccattaatgtgggtcgtgacgggactattcatcagttcagcgcagtggaacaagacgatcagcgcagcagctatcagctgaaatctcagcagaatagcgctgtcgatgcatcaaaatttacctttactccgccgcaaggtgtaacggtagacgaccaacgtaagtag

SEQ ID NO: 74176 - DNA, 1344 bp, Citrobacter koseri
gtgagcaatctgtcgctcgatttttctgataatacctttcagccactggccgcgcgtatgcggccagaagatttagcgcagtatattggtcagcagcatctgctggctgcgggtaagcctttgcctcgtgcaattgaggccgggcacctgcactcgatgattttgtgggggccgcccggtacgggcaaaaccacgctggccgaagtgattgcccgctatgccaatgctgacgtcgaacgcatttccgccgtgacttctggcgtaaaagagatccgtgaagccattgaacgcgcccgccagaaccgtaatgccgggcgccgcactattctgtttgtcgatgaagtccatcgcttcaacaagagccagcaggatgcgtttctgccgcatatcgaagacggcacgattacgtttattggcgcgacgaccgaaaacccgtccttcgagctgaactcggctttgctgtcacgcgcccgcgtgtatctcctcaaatccttaacgactgaagatattgagcaggtgctgaatcaggcgatggatgacaaagcgcgtggttatggcggccaggatatcgttttgccggacgagacgcgccgggcgatcgccgaactggtgaacggagatgcgcgtcgggcgttaaatacgctggaaatgatggcagacatggcggaagtggatgacagcggtaagcgagtattattacccgcattactgaccgaaatcgccggggagcgcagcgcgcgctttgataataaaggcgaccgcttttacgatctcatctccgcattgcataaatcggtgcgtggtagcgccccggacgcggcgctttactggtatgcccggatcattaccgctggcggcgacccgctgtatgtcgcccgacgttgcctggcgattgcttctgaagacgtcggcaatgccgatcctcgcgcaatgcaggtggcgatttctgcgtgggattgctttacccgtgttggccctgcggaaggggaacgggcgatagcccaggcgattgtttatctggcctgtgcgccgaaaagtaacgcggtttataccgcgttcaaagcggcgctggctgatgcccgtgaacgcccggattatgatgtgcctgtgcatctgcgcaatgcgccgacgaaactgatgaaagaaatgggctatggccaggaataccgctacgcgcatgatgagccaaacgcctacgccgcaggcgaggtttatttcccgccggaaatagcgcaaacacgctattatcatcccacaaacaggggtcttgaaggcaagattggcgaaaagctcgcctggctggctgaacaggatcaaaatagccccataaaacgctaccgttag

SEQ ID NO: 74177 - DNA, 1293 bp, Citrobacter koseri
atgctcgatcccaatctgctgcgtaatgagccagacgcagtcgctgaaaaactggcacgccggggctttaagctggatgtagataagctgcgcgctcttgaagagcgtcgtaaagttttgcaggtcaacacggaaaacctgcaagcagagcgtaactctcgatcgaaatccatcggccaggcgaaagcgcgcggggaagatatcgagcctttacgtctggaagtgaacaagctgggcgaagagctggatgcggcaaaagccgagctggagagcttacaggctgaaattcgcgatatcgcgctgaccattcctaacttaccggctgatgatgtaccggtaggtaaagatgaaaacgacaacgttgaagtcagccgttggggaaccccgcgtgagtttgatttcgacgtccgcgatcatgtgacgctgggtgaaatgcacgccggtctcgacttcgcggctgcggttaaactgaccggttctcgttttgtggtaatgaaagggcagattgctcgtatgcaccgcgcgctgtcgcagttcatgctggatctgcacactgaacagcatggttacagtgaaaactacgtgccgtatctggtgaaccacgacacgctgtacggtacagggcagttgccgaaatttgcgggcgatctgttccatactcgcccgctggaagaagaggctgacagcagcaactatgcgctgatcccgacggcggaagtgccgctgactaacctggtgcgtgatgaaatcatcgacgaagatgcgctgccgatcaaaatgactgcgcatacgccatgcttccgttctgaagcgggttcttacggtcgtgacacgcgcggtctgatccgtatgcaccagttcgataaagttgagatggtgcagattgtgcgtccagaagagtcaatggatgcgctggaagagatgaccggccatgctgagaaagtgcttcagttgctgggtctgccgtaccgtaaaatcgttctgtgtactggtgacatgggctttggcgcatgtaaaacctacgatctcgaagtatggatcccggcgcagaacacttaccgtgaaatctcttcctgctcgaacgtatgggatttccaggcgcgtcgtatgcaggcacgctgccgcagtaagtccgacaagaaaacccgtctggttcatactctgaacggttccggtctggcggttgggcgtactttagttgccgtgatggaaaactaccagcaggctgatggccgcatcgaagttccagaagtattacgtccgtatatgaacgggctggaatatatcggctaa

SEQ ID NO: 74178 - DNA, 2445 bp, Citrobacter koseri
atgaaaacgaatatccccgatgctgtactggcagctgaggtaactcgtcgaggcctggtaaaaacgacagcaataggcgggctggcaatcgccagtagcgcattgactctgccatttacccggatcgccaatgcggctgacgctatcagccccagcgcatccagcgaaaaaattatctggagcgcttgcaccgttaactgcggaagccgctgcccgctgcgcatgcatgtggtggacggtgaaatcaaatatgttgaaacggacaatacgggcgatgataactatgacggtctgcatcagattcgcgcctgtctgcgcgggcgttctatgcgccgccgggtttataaccccgatcgtctgaaatatccaatgaagcgcgttggcaagcgtggtgaaggtaagtttgagcgcatcagctgggacgaagcctatgacattatcaccaccaatatgcagcgtcttatcaaagactacggcaacgaatccatctatttaaactatggtacgggtacgcttggcggcacgatgacgcgctcctggccgccaggaaaaacactggttgcccggctgatgaactgctgcggcggttacctcaaccactacggcgattactcatccgcgcaaattgccgccgggttaaattacacctacggcggctgggcggacggcaatagtccttccgacattgaaaatagtaagctggttgtgctgtttggtaacaatccgggggaaacccgtatgagcggcggcggggtaacctattacctcgaacaggcacggcaaaaatcaaacgcgcggatgattattgtcgatccgcgttataccgataccggcgcgggtcgtgaggatgagtggattccgattcgcccgggtacggatgcggcgctggtaaatgcgctggcatacgtcatgatcaccgaagatatggtcgatcagccgttcctcgacaaatactgcgtgggttatgacgaaaaaaccttacccgccagcgcgccgaaaaatggtcactacaaagcctatattctgggacagggtagagacggtattgcgaagacgccggagtgggcgtcgcagatcaccggtatcccggcggcgcgcattgtaaaactggcgcgtgaaatcggtagcgccaaacccgcttacatcagccagggctgggggccgcagcgtcatgccaacggcgaaatcgttactcgcgcaatctctatgctggcgatcctgaccggcaacgtcggcattaatggcggcaacagcggtgcgcgtgagggatcttacgatttgccgtttgagcgtatgccaacgctggaaaacccggtcgagaccagcatttcgatgttcttatggaccgatgccattgagcgcgggccggaaatgacggcgctgcgtgacggggttcgcggcaaagataaactcgacgttcccatcaaaatgatctggaactatgccggtaactgcctgattaaccagcattccgaaattaaccgcacgcatgaaattttgcaggatgataagaagtgcgaaatgatcgtcgttatcgactgtcatatgacctcttcagcgaaatatgccgatattctgctgccggactgcaccgcttctgagcagatggacttcgcgctggatgcctcctgcgggaacatgtcctacgttattttcaccgaccaggccattaaaccgcgctttgagtgcaagactatctatcagatgaccagcgagctggcgaagcgtctcggcgtggagcagcagtttaccgaagggcgtacgcaagaagagtggatgcgtcatctgtacgaacagtcgcgtcaggcgattcccgaactgccgacatttgaagcattccgcaagcagggcatctttaagcagcgcgaccctgaaggtcatcacgttgcctataaagcgttccgtgacgatccgcaggctaacccgctgacaacgccgtcgggcaaaatcgagatctattcgcaggcgctggcagagattgcggcaacctgggaactgccggaaggcgatgtgatcgatccgttgccgatctatacgccgggcttcgaaaactacagcgatccgttgaccaaagactatccgttgcaattaacgggcttccactacaaatctcgcgtgcactctacctatggcaacgtggacgttctgaaagcttcctgccgccaggagatgtggattaacccgatggatgcgcaaaaacgcggcatcagcaacggcgacaaagtgcgtatcttcaacggtcgcggcgagttgcatattgaggcgaaagtgacgccgcgcatgatgccgggcgtcgttgcgttgggcgaaggcgcctggtatgacccggatgcaaaacgcgtggatcaggggggatgtattaacgtcctgacgacccagcgtccttctcctctcgctaaggggaatccgtcccatacgaacctcgttcaggttgagaaggtataa

SEQ ID NO: 74179 - DNA, 546 bp, Citrobacter koseri
atgagtgccaatgaaaacaacctcatttggatagatcttgagatgaccggcctggatcccgagcgcgatcgcattattgagatcgcgacgctggtgaccgatgccaacctgaatatcctggcggaagggccgacgattgcggtgcatcagtctgctgaacagctggcgttaatggatgactggaacgtgcgtacccataccggaagtggtctggtggatcgggtaaaagccagctcgtttgacgatcgcgccgcagaactggcgaccattgaatttttaaaagagtgggttccggcaggtaaatcaccgatttgtggcaacagcatcggccaggatcgccgttttctgtttaagtacatgcctgaactggaagcctatttccactatcgctatctggatgtgagtacgctgaaagagctggcgcgtcgctggaagccggaaatccttgccggttttaccaagcaggggacgcaccaggcgatggatgatattcgcgagtcggtggcggagctggcttattaccgcgagaattttattaagctgtaa

SEQ ID NO: 74180 - DNA, 1053 bp, Citrobacter koseri
ttgagtaaaaataaactctccaaaggccaacagcgccgcgtgaaagccaatcaccagcgtcgtctaaaaacgtccacggagaaggcagacttcgatgacaacctgttcggcgagaccgctgaaggtatcgtcattagccgctttggcatgcatgccgacgtagaatccgccaatggcgagattcaccgctgcaacatccgtcgcacgatccgttcgctggtcaccggcgatcgcgtcgtctggcgtccgggtaaagcggcggctgaaggcgtcaacgtcaaagggatcgtcgaagccgtacacgaacgcacctccgtgctaacgcgcccggatttctacgacggcgtgaagcctattgccgccaatatcaaccaaatcgtcattgtctccgccattttgccggagctgtcgctcaatattatcgaccgctacctggtggcctgcgaaacgttgcaggttgaaccgattatcgtgctcaataaaatcgatctgctggatgacgaagggatggacttcgttaacgagcagatggatatctatcgcgacatcggctatcgcgtgttgatggtatccagccatacgcaagatggcctcaaaccattagaagaggcgctaaccggccgcatcagcatctttgccgggcagtctggcgttggaaaatcgagcctgttgaacgcccttctgggcctacaggaagcgatcctcaccaatgatgtgtcggataactccggtctggggcagcacaccacgaccgccgcgcgcctgtatcacttcccgcacggcggcgatgtgattgactcccccggggtacgcgaatttggcctctggcatctcgaaccggaacaaatcacccacggatttgtcgaatttcatgactacctgggccattgcaaatatcgcgactgcaagcatgataccgacccaggttgcgccatccgtgaagcggtagaagacggtaaaattgcagaaacccgtttcgaaaattatcaccgcattctggaaagcatggcacaggtaaaaacacgtaaaaacttttctgatatggacgactga

SEQ ID NO: 74181 - DNA, 969 bp, Citrobacter koseri
ttgttaaactcatttaaactttcgctacaatacattctgccgaaactatggctcactcgcctggcgggctggggcgcaagaaaacgagcgggctggctgaccaaactggttatcgatctgttcgtgaaatactacaaggtcgatatgaaagaggcgcagaagccggataccgccagctatcgcacctttaacgatttctttgttcgtccgctgcgtgacgacgtccgtccggtgaataccgatccaaacgtactggtaatgccggctgacggcgtgatcagccagtcaggtaaaatcgaagaagataaaatcctgcaagcgaaaggtcacaactacagcctggaagcgctgctggcaggtaactacctgatggcggacctgttccgcaacggttcgtttgtcaccacctacctctctccgcgcgactaccaccgcgtacacatgccgtgcaacggtatcctgcgcgagatgatctacgtaccgggcgatctgttctcggtgaatcacctgaccgcgcagaacgtaccaaacctgtttgcccgtaacgaacgcgtgatctgcctgtttgacacggagtttggcccaatggcgcaaattctggtcggggcaaccattgtcggcagcatcgaaaccgtctgggcgggaaccattacgccgccgcgtgaaggcgtgatcaaacgctggacatggccggaaggggaaagcgaagggtctgtggcgctgttgaaaggtcaggagatgggccgtttcaaactgggttcaaccgtgatcaacctgtttgcgccgggtaaagtcacgctggctgaacagctgcaaagcctgtcagtgaccaaaatcggtcagccgctggccgtttctaccgaactcttcgtgacccctgaagcggaacccgcgccgctgccggaagaagagatcaacgccgaacacgacgccagtccgctggttgacgacaagaaagacgaaagttaa

SEQ ID NO: 74182 - DNA, 3327 bp, Citrobacter koseri
gtgcgcctgattatcacttttctgatggcctggtgcctcagcctgggggcgtacgctgcgacggcccccgacgccaaactgattgcccaggaactggagcaggctaaagtggcaaaacccgctcagccagaggccgtagaggccctccagtctgcgctgaacgcgcttgaggaacgaaaaggttctcttgagcgcgccgaacaatatcagcaggttatcgacaatttccctaagctgtccgcgacgctacgcgcacagctcaataacttgcgcgatgaaccgcgcagcgtgccgccaggcatgtccaccgatgcgctaagccaggagatcctccaggtcagcagccagttgctggataaaagccgtcaggcccagcaggagcgagagcgcgcccgtgaaatcgccgattcgttaagccagcttccacaacagcaaacggatgcccgtcgccagttaaatgagattgagcggcgcattggcaccgccagcggcaactccccgctcaaccaggcgcaaaatctgagtatgcaggccgaatccgccagactcaaagcgcaggttgatgaactggaactggcgcagctttcggcgaataaccgtcaggaactggcgcgtatgcgctccgaactggcggaaaaacagagccaacagctggatgcctggttgcaggcattacgcaatcaattaaacagccagcgccaacgagaagcagagcgagcgctggagagcaccgaactgctggcggaaaacagcgctgacctgccgccgggcattatcgaacagttcaaggtgaaccgcgagctgtcgcaggcgcttaaccagcaggcgcaacgcatggatctggtggcctcacagcaacgccaggccaccagccagacgctacaggttcgtcaggccctgaacaccctgcgggaacagtcgcagtggttaggcgtatcgaatatgctgggggaagccctgcgcgcacaggtatcgcgtctcccggaaatgcccaagccgcagcagttagataccgaaatggcgcaactgcgcgtacaccgtatgcgctacgaagacctgctcaacaaacaaccgcaactacgtcagattcgccaggacgacggtcaaacgctgacctctgagcagagccgcattcttgacgcccaactgcgtacccaacgcgagctgctgaattcactgttgcagggcggtgatacgttgatccttgagctcaccaagctgaaagtgtccaatagtcaactggaagacgcgctgaaagaggtcaacgaagccactcaccgttacctgttctggacgtctgacgtgagtccgatgtcgctctcgtggcctatcagcctcgttcaggatctgcgtcgactgatctcactggatacgttcaatcagctcggcaaagccagcatcatgatgctcaccagcaaggagacgctgctgccgctgtttggcgcgctggtgctggttggttttagtctctattcgcgcaaacatttcacccgttttctggagcgttcatcctcccgcgtcgggaaagtcacacaggatcacttctggctgacgctgcgcaccgtgttctggtcgattctggtcgcctccccgctgcccgtactgtgggccacgctgggctatgggttgcaggaggcatggccttatcctctggccgtcgccatcggcgacggagtgacagcaacggttccgctgctgtgggtcgtcatgatttgcgccacctttgcccgccctaacggtctgttcgtggcgcattttggctggccccgaaaccgtgtcgcgcgcgccatgcgctattacctgatgagcatcgggctgattgtcccgctcattatggcgctgattatgtttgataatcttaacgatcgggagttctccgcgtcgctggggcgtctctgtttcatcctgatctgcggcgcgctcgcgattgtcacgctgagcctgaagcgcgccggtatcccgctgtacctcgataaagagggcagcggcgacaatatggtcaacagtatgctctggaacctgctgatgggcgcgccgctcattgcgatccttgcggccgctgtcggctatctggccaccgcgcaggcgctgctggcgcgactggagacctccgttgccatctggttcctgctgctggttatctatcacgtcattcgccgctggatgctgattcagcgtcgccgtctggcgttcgatcgcgctaagcatcgccgggccgaaatgctggcgcaacgtgcgcgcggcgaagaagaacccgcccactccaccagcctcgaaggggccgtcgaagtggatgaaagcgaagtggatctcgacgccatcagcgcccagtcgctgcgcctggtacgttctatcctgatgcttatcgccctgctgtcggtcattgtgctgtggtcggaaatccattccgcctttggcttcctggagaatatctcgctgtgggatgtcacctccacggtgcaaggggttgaaagtctggagccgattacgctgggcgcggtgttgattgcgatcctggtgtttatcatcaccacgcaactggtgcgtaacctgcccgccctgctggagctggcgctcttgcagcatctggatctgacgcccggcaccggctacgccatcaccaccatcaccaagtatctgttgatgctgattggcgggctggtcggtttctcgatgattggcattgaatggtcgaagttacaatggctggtcgccgcgctcggtgtcggtctgggctttggtttacaggagatcttcgccaactttatttccggcttaatcatcctgttcgaaaagccgattcgtattggcgatacggtgaccattcgcgaccttaccggcagcgtgaccaaaatcaacacccgcgccaccaccatcagcgactgggaccgtaaagagattatcgtgccgaacaaagcgttcatcaccgagcagtttatcaactggtcgctgtcggattcggtaacgcgtgtggtgctgaccatcccggcgccgtcagacgctaacagcgaagaggtgacgcaaattctgctgactgcggcgcaccgctgttcactggtgatcgacaacccggcgccggaagtattcctggttgacctgcaacaggggattcagatcttcgaactgcgtatctatgccgcagagatggggcaccgtatgccgttgcgccacgaaatccaccagttgattctggcgggcttccatgagcacggtattgatatgccattcccgccgttccagatgcgcctggaaagcctgaatggcaggcagactggaagaacgctgacatccgccgccaggaaaagtcgcccggtgggaagtttgtaa

SEQ ID NO: 74183 - DNA, 1593 bp, Citrobacter koseri
gtgttgatttttattgctgacctctgcaagggggcagtgcaaatcggtgagcgccgtttagccaacgtgcccagagtaagggatggtttcatgaaccagacaataaagaagatgagcctggctggcctcatcctgatgatatttacgtccgtttttggttttgccaatagcccgtcggcgttttatttaatggggtatagcgcgatcccgtggtatatcttttctgcattattattctttattccatttgccttaatgatggctgaaatgggttctgcttatcgaaaagaagaaggcggaatctattcgtggatgaataatagcgttggcccgcgttatgcgtttatcggcacttttatgtggttctcctcctatgttatctggatggtgagcactgcggcgaaagtctgggtgcctttctctacgttcttgtttggtgcagatatgacgcagcactggcggatcgccgggcttgaaccgacgcaggttgttggtctgctcgccgtcggctggatgattctggtgacctgtatcgcatcaaagggaattaataaaattgcgcgtattacggcagtaggggggattgccgtgatgtgtcttaatttggttttgttgttagtgagtgtcgctattttgttattaaatggtgggcattttgcggaaaatattcattttgtctcctcgcccaatcccggatatcagtccggcctggccatgctctcatttgttgttttcgctatttttgcctacggcggaattgaagcggtaggcggcctggtggataaaacagaaaagccggaaaagaactttgcgaaaggaattgtttttgcggcaattgttatttccgttggttattcgctggcgatatttttatggggcgttagcaccaactggcaacaggtattaagtaatggctccgttaacctaggaaatatcacctatattctgatgaaaagcctggggatgacgttgggtaacgcgctgcatctgtcgccggaagcggcaatggcgaccggcgtctggtttgcgcgtatcactggcctctccatgttccttgcctataccggcgcgttctttacgctgagctactcgccattgaaggccattatccagggaacgccaaaagcgctgtggcctgcgccgatgacgacgctgaacgcggcaggtatgccagccaccgcaatgtggatgcagtgtctgctggtgagtctgtttattctgctggtctcttttggcggtgataccgcgtcggcgttctacaacaaactgacgctgatggcgaacgtgtcgatgacgttgccgtacctgttcctcgcgctggccttcccgttctttaagtctcgcgaaggcctggaacggccatttgtgatcttcaaaacccatgtttctacgatgctggcaacgggcgtggtcgtgctggtggtgacgtttgcgaatgtgtttaccatcattcagccggtgattgaagccggggactggaatagcgcgctgtggatgaccggcggcccgatattcttctcgctgttagcgatggcgatttatcagaactacagccgccggatggcaaaccagccccagtgggcggtggagtaa

SEQ ID NO: 74184 - DNA, 978 bp, Citrobacter koseri
atgagcgaaacggcaacctggcagccgagcgcgtccattcctaacctgttaaaacgtgcggcaattatgacggagatccgtcgtttctttgccgatcgtggagtgctggaggttgagacgccctgcatgagccaggcgacggtaacggacattcatctgttcccgttcgaaacgcgtttcgtcggcccaggccactctcagggcatgaacctttatctgatgaccagcccggaataccacatgaaacgcctgttggtggcgggatgtggcccggttttccagctgtgccgtagctttcgcaacgaagagatggggcgtcatcacaacccggaattcaccatgctggagtggtatcgtccccactacgacatgtaccgtttgatgaacgaagtggacgacctgctgcaacaggtgctggaatgtcaacctgcggagagtctttcttaccagcaggtgtttcagcgccatctggagattgatccgctgtctgcggataaaactcaactgcgtgaagcggcggcgaagctggatttaagcaatatcgcggataccgaagaagatcgcgatacgctgctgcaactgctgtttactatgggcgtggaaccgcacattggcaaagagaagccgacgtttgtgtaccattttccggcaagccaggcatcgctggcgcaaatcagcactgaagaccatcgggtggctgaacgcttcgaggtttacttcaaaggtattgagctggcgaatggtttccacgaactgacggatgcgcgcgagcagcagcaacgcttcgagcaggataaccgtaagcgcgccgcgcgaggcttaccgcagcagcctatcgataacaatctgctggaggcgctgaaggtggggatgcctgactgttccggcgtggcgctgggcgtggatcgtctggtgatgctggcgctgggggcggaaagcctcgctgaggttatcgcttttaccgttgatcgggcataa

SEQ ID NO: 74185 - DNA, 1827 bp, Citrobacter koseri
atggtgtacggggacgaaataacaacaatctggaggaatgtcgtgcaaacctttcaagccgatcttgccattataggcgccggtggcgcgggattacgtgctgcaatagctgccgcgcaggcgaatcctaacgctaaaatcgcactgatctcaaaagtgtacccgatgcgcagccacaccgttgctgccgaagggggttcagccgctgtcgcccaggatcatgacagctttgactaccattttcacgatacggtagcgggcggagactggctgtgtgaacaggatgtcgtggattactttgtccaccattgtccaactgaaatgacgcaacttgagcaatggggttgcccgtggagccgtcgcccggacggcagcgtcaacgtacgtcgtttcggcggtatgaaaattgagcgtacctggtttgccgcggataaaaccggcttccatatgctgcataccctgttccagacctctttgcagttcccacaaatccaacgctttgatgaacacttcgtcctggatatcctggtcgatgacggtcatgcccgtggcctcgtggccatgaacatgatggaaggcacgcttgtgcagatccgcgccaacgcggtggtgatggctaccggcggcgcaggccgcgtgtatcgctacaacaccaacggcggcatcgtaaccggcgacggtatgggcatggcgctgggccacggcgtaccgctgcgtgatatggaattcgttcagtatcacccgaccggtctgccgggttccggtatcctgatgaccgaaggctgccgtggtgaaggcggtattctggtcaacaaaaatggctaccgctatttgcaggattacggcatgggcccggaaacgccgcttggcgagccgaaaaacaaatacatggaactggggccgcgagacaaagtgtctcaggcgttctggcacgaatggcgcaaaggcaacaccatttccacaccgcgtggcgatgtggtttacctcgacctgcgtcatctgggcgagaaaaaactgctcgaacgtttaccgttcatctgcgaactggcgaaagcctacgtgggtgtcgatccggttaaagagccgattccggttcgtccgaccgcgcactacaccatgggcggcatcgaaaccgatcagaattgcgaaacccgcattaaaggtctgtttgccgttggcgagtgctcctctgtgggtctgcacggcgctaaccgtctgggttctaactctctggcggaactggtggtctttggccgtctggcgggcgaacaagcaatggaacgcgcctcaaccgcaggcacggctaacgacgccgcgcttgacgcgcaggttgcgggcgttgaacaacgtctgaaagacctcgttaaccaggaaggcaacgagaactgggcgaaaatccgcgatgaaatgggcctgtcgatggaagaaggttgcggtatctaccgtacgccggaactcatgcagaaaaccgtggataagctggcggagttgcaggaacgcttcaagcgtgttcgtatcaccgatacctccagcgtattcaacaccgacctgctgtacaccatcgagctgggtcatggtctgaacgtagcggaatgtatggcgcactccgcgctggcacgtaaagaatcacgcggcgctcaccaacgtctggacgaaggctgcaccgagcgtgacgacgtcaacttcctcaaacataccctcgccttccgcgatgctgatggcacaactcgcctggaatacagcgacgtgaaaatcaccactctgccaccggcaaaacgtgtgtatggcgctgaagcggaagccgccgataagaaggagaaggcgtaa

SEQ ID NO: 74186 - DNA, 735 bp, Citrobacter koseri
atgtctgagatgaaaaacctgaaaattgaggtggtgcgctataacccggaaaccgacaccgcgccgcacagtgctttctacgaagtgccttacgatgaagcgacatcgctgctggatgcgttaggctacatcaaagataacctggcgccagacctgagctaccgctggtcctgccgtatggcgatctgcggctcttgcggcatgatggttaacaacgtgccaaaactggcgtgcaaaaccttcctgcgtgattacaccaagggtatgaaggttgaagccctggggaacttcccgatcgaacgcgatctggtcgtcgatatgacgcactttatcgagagcctggaagcgatcaaaccgtacatcatcggcaacccgcgtacgccggatcaggggccaaatacccagaccccggcgcagatggcgaagtatcaccagttctccggttgcatcaactgtggtctgtgctacgccgcgtgcccgcaattcggcctgaaccctgagttcatcggcccggcggcgatcacgctggcgcatcgttataacgaagacagccgcgaccacggtaagaaggagcgtatggcgcagttaaacggtcagaacggcgtatggacctgtaccttcgtgggctactgctccgaagtctgtccgaaacacgtcgatccggctgcggccattcagcagggtaaagtggaaagttcgaaagactttcttatcgccaccctgaaaccacgctaa

SEQ ID NO: 74187 - DNA, 396 bp, Citrobacter koseri
atgacgactaaacgcaaagcctatgtgcggccaatgacgtccacctggtggaaaaaactgccgttttatcgcttttacatgctgcgcgaaggcacggcggttccggcagtctggttcagcattgaactgattttcggcctgtttgccctcaaacatggcgcggaatcctggatgggcttcgttggcttcctgcaaaacccggtagtggtgatcttaaacctgatcgccctggcggcagccttgctgcacaccaaaacctggttcgagctggcgccaaaagccgccaacatcattgttaaagacgaaaaaatggggccagagccgatcattaaaggtctctgggttgttactgcggttgtcaccgtagtcatactgtatgttgccctgtactggtaa

SEQ ID NO: 74188 - DNA, 360 bp, Citrobacter koseri
atgattaatccaaatccaaaacgctctgacgaacccgtattctggggcctgttcggtgcaggtggtatgtggggcgcgattattgcgccggtaatggttctgttggtgggtattctgctgccgctgggacttttcccgggcgatgcgctgagctatgaacgcgtactggcgttcgcccagagcttcattggccgcgcgttcctgttcctgatgatcgtcctgccgctgtggtgcggtttacaccgtatgcaccatgcgatgcatgacctgaaaatccatgtgccaagcggcaaatgggtattctacggtctggcggcgattctgaccgttgttacggcaatcggtatcctcacaatctaa

SEQ ID NO: 74189 - DNA, 534 bp, Citrobacter koseri
atgcgcctgctgcctgtcgttgccgccgttaccgctgcgtttctggtcgtcgcgtgtagcacgcctgtcccgcccaagggcgttaccgttgtcactgactttgatgccagacgctacatgggcacctggtatgaaatcgcgcgtttcgatcaccgcttcgaaagcggtcttgaaaaagtgacgacaacctacagtctgcgggacgacggtggcctgaacgtcctcaacaaaggctacaacccggacaggggcatgtggcagaaaacagaagggaaagcctggtttacgggcgaccccagccgcgccgcgctgaaggtatcgttcttcggccccttctacggcgggtataacgtcattgcgatcgacagagagtaccgccatgcgctggtgtgcggcccggatcgcgactacctgtggatactctcacgcacgccgacgctctccgaagagatgaagcagcagatgctggccgtcgcgacccgggaagggtttgatgtcagtaaattaatctgggtaaaacaacccggcgcttaa

SEQ ID NO: 74190 - DNA, 318 bp, Citrobacter koseri
atgtcctggataattttgttcattgcgggtctgcttgaagtcgtttgggcggttggcctgaaatatacccacggattcagtcgcctgacgcccagcgtcattactattgcggcgatgattgtcagtatggcgctgttgtcatgggcgatgaaaaccttaccggttggcacggcatacgcggtctggacgggcatcggcgcggtaggggctgccatcaccggcattttgctgcttggcgaatccgccagtcctgcgcgtctggcgagccttgcgctgatcgtagcggggattattgggctgaagctcagcgctcactaa

SEQ ID NO: 74191 - DNA, 600 bp, Citrobacter koseri
atgttaaaaattttagtgattgaccgctgccatttcacccgcacggggatagaggcctggcttaatcattctggcttatttgattcttcgttcctggtatcagggttgaataacctgctactggcaaaagagcatatttcccagtggaaacctcatctggttatcgctgacttatatagttttttcaactacagccactcttttaagccagcagcgccgctcctgatggcctgcggagccacgcctttaattttgctgcaatcaggcggcgtacagtaccaggccgatagcgacccgctgtatcaggttcatgccgtagtgtcgaaacaggccacgctgcatgagctatcgcggaatattcaggacgtgctgcttgcccagtccgttactgacacgccaaaaaccgccacgccgctgcttacgccgcaggaggaaaaggtgctgacaatgtggatggaaggtgcgggaaacaacgcaatcgcggctgcgctcggtattcacggcaaaacggtctacacctacaaacgcaatatccgcatgaaattgcatatggataatcgctactcgccgtttttatccttaccggagcaaatcaattaa

SEQ ID NO: 74192 - DNA, 147 bp, Citrobacter koseri
atggttaagaaaacaattgcagcgatcttttctgttttggtgctttcttccgtgctaactgcgtgtaatacaacacgcggcgttgggcaggatatctctgaaggcggcagcgccatttcaggcgccgcgaccagagcccagcaataa

SEQ ID NO: 74193 - DNA, 135 bp, Citrobacter koseri
atgatgaaacgtcttatcagtcttgtagcactcatccttttcaccggcgcgttgctgacgggttgtaataccgcgcgtggctttggtgaagacatcaaacatctcggcaattctatctctcacgctgccagctaa

SEQ ID NO: 74194 - DNA, 567 bp, Citrobacter koseri
atggcaacgtactatagcaacgattttcgtgctggtcttaaaatcatgttggacggcgaaccttatgcggttgaagccagtgaattcgttaaaccgggtaaagggcaggcattcgcacgcgtaaaactgcgccgcctgctgaccggcactcgtgtagagaaaaccttcaaatccaccgactctgctgaaggtgctgatgttgtcgatatgaacctgacttacctgtacaacgacggtgagttctggcacttcatgaacaacgaaacgttcgaacaactgtctgctgacgccaaagcgatcggcgacagcgcgaaatggctgctggatcaggctgagtgcatcgtgaccctgtggaacggccagccgatcaccgtgaccccgccgaactttgttgagctggaaatcgtagataccgatccaggcctgaaaggcgataccgcaggtactggcggcaaaccggctacgctgtctactggcgcagtggttaaagttccgctgttcgtccagattggcgaagtgatcaaagtggatacgcgctctggcgaatacgtatcccgcgttaaataa

SEQ ID NO: 74195 - DNA, 1029 bp, Citrobacter koseri
atggcgcatattgtaaccctaaataccccatccagagaagattggttagcgcaacttgccgatgttgtgaccaatcccgatgaactactgcatcttttgaatatagacgcagatgaaaaactgttggccggacgcgacgccaaacgcctgttcgccctgcgcgtaccgcgatctttcatcgcgcgtatggagaaaggcaatcccaacgatccgcttctgcgtcaagtacttacctcgcaggacgaattcgtaaccgcccccggtttttccaccgacccgctggaagagcagcacagcgtcgtgcccggattactgcacaaataccgcaaccgtgcgttgctgctggtaaaaggcggatgcgcggtaaattgccgctactgcttccgtcgccacttcccgtatgcggataatcagggcaacaaacgcaactggcaggtcgcgctggactacatcgccgcacaccctgagctggatgagatcatcttctccggcggcgatcctttgatggcgaaagatcacgaactggactggttgcttacgcaactggaaacgatcccgcacatcaaacggctgcgtatccacagtcgtttgccgatcgtgatccccgcgcgcattacggatgggctggcagcccgctttacgcgctcttctctgcaaattctgctggtgaaccacatcaaccacgccaacgaaattgacgacacgttccgtcaggccatgacgacgctgcgcaacgcgggcgttaccctgctcaaccagagcgtactgctacgcggggtgaacgataacgcgcaaacgctggcaaacctcagcaatgcgctgtttgacgccggcgtcatgccctactacctgcatgtgctggataaagttcagggcgcggcgcatttcatggtgagcgacgatgaagcgcggcaaattatgcgtgaactgctgacgcgggtatccggttatatggtacccagactggcacgtgaaattggcggtgagccgagcaaaacaccattagatttgcagttacgccagcaataa

SEQ ID NO: 74196 - DNA, 864 bp, Citrobacter koseri
atggcgatgagtatcaaaggcgttaatacgggcgttattcgcaaagcgaatgagtttattgcgctggcattaaaaataaaagaaccgaggaataaagagtcgttgttttttctgacggcgctggaattaagagatctgctgatcgctctggaaagccggctgcaccagaagcatcacctgtcccccaacgctcgccaacaatatgaaaaagcacgggatagagtcagtaaaaaaatgcttgagagtattccggccattcaggaagaggaactcaaaaacgcagatattaatcgccgggtgaatacattaacgctggtagacgaccagagcgaaaacgtcatgctttcttttacgctgcatgacggtaaaacatgcgagctgatgattaatgaattacagattgacgttctggtgcgcgcaattattcgtgctatagataatgccggtatgcgtgagctggtgctgcgtattacatcactactggattttctgccattatatgatgctgactgtctggataacggtaatctggaatatgacgcctacgcgcaacctgaatggaagcacaatctcttcagccattatctggcggtgctctatcgttataccgatgagacaggtaaaacacattttagcggcgccgtggtgaaaaaccgcaccccttctggcagcaaagaggcagaggccatttcacgccgactgcttgatttcagcccacggctgaagaagctggccgggaaaccgtgccaggtgtttgtcagaacgctaaccgctgataagacgcacaaactcactcaggagcagtgcctgcgcgcgttgcatcatttacgcgttcagtcggttgagaaagcgaaaaacgcctga

SEQ ID NO: 74197 - DNA, 387 bp, Citrobacter koseri
gtggcgtccagctcattgattatggggaataacatgcacgtaaaatatttagcagggatcgtcggtgctgcgctgctgatggcgggttgtagctccagcaaccaactgaccgctgccgggcaaagtgtgcgttttgtggaagacaagcctggcgcagagtgccagttgatcggcactgcgaccggtaagcaaagcaactggctttctggtcagcacggtgaagagggcggctctatgcgtggtgcagcgaacgacctgcgtaaccaggctgcggcaatgggcggaaatgtgatttatggcgtcagcagcccaacgcagggaatgttgtccagctttgtcccgaccgccagtgaaatgaacggtcaggtttataagtgccctaactga

SEQ ID NO: 74198 - DNA, 1647 bp, Citrobacter koseri
atggcagctaaagacgtaaaattcggtaacgacgctcgtgtgaaaatgctgcgcggcgtaaacgtactggcagacgcagtgaaagtgaccctcggtccgaaaggccgtaacgtggttctggataaatctttcggtgcgccgaccatcactaaagatggtgtttccgtagcgcgtgaaatcgagctggaagacaagttcgaaaacatgggcgcgcagatggtgaaagaagttgcctctaaagcgaacgacgcggcaggcgacggcaccaccaccgcgaccgtactggctcagtccatcatcactgaaggtctgaaagccgttgctgcgggcatgaacccgatggatctgaaacgtggtatcgacaaagcggttgctgctgcggttgaagaactgaaaaccctgtccgtaccgtgctctgattctaaagccattgctcaggttggtactatctccgctaactccgacgaaaccgtaggtaaactgatcgctgaagcgatggacaaagtcggtaaagaaggcgtgatcaccgttgaagacggtactggtttgcaggatgagctggacgtggttgaaggtatgcagttcgaccgtggctacctgtctccttacttcatcaacaagccggaaactggcgcagtagaactggaaagcccgttcatcctgctggctgataagaaaatctctaacatccgcgaaatgctgccggttctggaagccgttgcgaaagcaggcaaaccgctgctgatcatcgctgaagatgtggaaggcgaagcgctggctacgctggtggttaacaccatgcgcggcatcgtgaaagtggcggcggttaaagcgccgggcttcggtgaccgtcgtaaagcaatgctgcaagatatcgcaaccctgaccggtggtaccgtcatctctgaagagatcggtatggagctggaaaaatctaccctggaagacctgggtcaggcaaaacgcgttgtgatcaacaaagacaccaccaccatcattgatggcgtgggtgaagagtctgcgatccagggccgtgtcactcagatccgtcagcagatcgaagaagccacttccgattacgaccgtgaaaaactgcaagagcgcgtagcgaaactggcaggcggtgttgcggttatcaaagttggcgctgcgaccgaagttgaaatgaaagagaaaaaagcacgcgttgaagatgccctgcacgcgacccgtgctgcggttgaagaaggcgtggttgccggtggtggcgttgcgctgattcgcgtcgcgtctaaaattgcggaactcaaaggccagaacgaagaccagaacgtgggtatcaaagttgcgctgcgcgcaatggaatccccgctgcgtcagatcgtgctgaactgcggcgaagaaccgtctgttgtggctaacaccgttaaaagcggcgacggcaactacggttacaacgcagcaaccgaagaatacggcaacatgatcgatatgggtatcctggacccgaccaaagtaacccgttctgctttgcagtacgcggcatctgtggctggtctgatgatcactaccgagtgcatggtaactgacctgccgaaaggcgatgctcctgacttaggcgcagcaggcggcatgggcggtatgggtggaatgggcggcatgatgtaa

SEQ ID NO: 74199 - DNA, 294 bp, Citrobacter koseri
atgagtattcgtccgttacatgatcgtgtgatcgtcaaacgtaaagaagttgaatccaaatctgctggcggcattgttctgaccggttccgcagcgggtaaatcaacgcgtggcgaaatcatcgctgtcggtaagggtcgcatcctggataacggtactgtgcagccgctggacgttaaggttggcgacatcgttattttcaacgatggctatggtgtgaaatctgagaagatcgacaatgaagaagtgttgatcatgtctgaaagcgacattctggcaattgttgaagcgtaa

SEQ ID NO: 74200 - DNA, 1251 bp, Citrobacter koseri
atgagtggactaaaacaagagctgggactggctcagggcgtgggcctgttgtcgacatcactgttaggaaccggcgtctttgccgtcccggcgctggccgcgctggtggcgggcaataacagcctgtgggcctggcctgcgctcatcgttttagtctttcctgtggcgattgtttttgccatcctgggacgtcatttccccagtgcgggcggcgtggcgcattttgtcgggatggcgtttggttcgcgaatggcgcgcgtcaccggatggctgttcctgtcggtcatccccgtcggcctgccagcggcgctgcatatcgccgccgggttcggtcaggcaatgtttggctggcacggctggcagcttttactggcggaattcggcacgctggcgctggtgtggttcattggctctcgcggcgccagttccagcgccaacctgcaaacgatcattgccgggctgattgtggcgctgattgtcgccatctggtgggcgggcgatctcaagccgaacaaaattccattccctgcccctgcggatattgagcttcccgccctgttcgccgcgctgtcggttatgttctggtgctttgtcggccttgaagcgttcgcccatctggcatcggaatttaaaaaccctgaacgcgatttcccgcgcgcgctgatgatcggcctgctgctggccggctccgtttattgggcgtgtacggtggcggttctgcattttgacgcctacggcgcgcaaatggcggcggcagcgtcgctccctgacatcgtcgtgcgattgtttggcgtacaggcgctgtgggtcgcctgcattattggttatctggcctgcttcgccagcctgaatatctatatccagagtttcgcccgccttgtctggtcacaggcgcaggacaggccagaccattacctggcgcgcctttctgcccgccgcgttccccgcaatgcgctgaacgccgtactgggctgttgcgtactcagcacattgtgcatttacatccttgagatcaatctcgacgcgctgatcgtctatgccaacggcattttcattatgatctacttgctgtgtatgctggccgggtgtcggttgctggcaggacgctatcgcgcgctggcggtgactggcgctctgctgtgtctgttattgctggcgatggtgggatggaagtgtctgtacgcgctgattatgctgacggcgctgtggctgtttttaccccgcaggttggctaagcgtcagcatttgtag

SEQ ID NO: 74201 - DNA, 477 bp, Citrobacter koseri
ttgcgctggataccgtttattgccatctttctctatgtttacattgagatttctatttttatccaggttgcccatgtgctgggcgtcctgatgacgctgatcctggtgattttcacctcggtcattggtatgtcgctggtacgaaaccagggtttcaagaactttttgttgatgcagcagaaaatggcggctggcgagagtccggcggcggagatgatcaagagcgtgtcgctgatcattgcgggcctgctgctggtgttgcccggcttcttcaccgacttcctggggctgcttcttttattgccgcccgtgcagaaacacctgaccatgaagttgctgccgcatttgcgtttttcccgtatgcctggcggcggttttagcgccggaacgggcggcggcgagacgtttgacggtgagtttcagcgtaaagatgacgagcgtgaccgtttagatcataaagacgaccgcaaggattaa

SEQ ID NO: 74202 - DNA, 1530 bp, Citrobacter koseri
atgcaggggataatcgtcggtcaggaaacattcgaaaccacatatatcctgtgtgtttatgtaattattggcagcttgaaaaagaaggttcacatgttaaacaacattcgtatcgaagaagatttgttgggtaccagggaagttccagcggatgcctactatggtgttcacactctgagagcgattgaaaacttctacattagcaataacaaaatcagcgatatccctgaatttgtacgcggtatggtaatggtaaaaaaggcagcggccctggccaacaaagagctgcaaaccatccctaaaagtgtggccaacgccatcattgccgcatgtgatgaagtcctgaataacggcaaatgcatggaccagttcccggtagacgtttaccagggcggtgcaggtacttccgtcaacatgaacaccaacgaagtgctggccaatatcgggctggagctgatgggtcatcagaaaggtgaatatcagtacctgaacccgaacgaccatgtgaataaatgtcagtccaccaacgacgcctatccgaccggtttccgtgttgccgtttacgcgtctatcgtcaaactcattgatgcaatcaatcagttgcgtgaaggcttcgagcgtaaagccgttgagttccaggacatcctgaaaatgggtcgtacccagttgcaggatgctgtaccgatgaccctcggccaggaattccgcgctttcagcgtactgctgaaagaagaagtgaaaagcattgaacgtactgctgagctgttgctggaagttaacctcggcgcgacggcaatcggtactggcctgaacaccccgaaagaatactctccgctggcggtgcagaaactggctgaagtcactggctttgcctgcgtaccggcagaagacctgattgaagcaacgtccgactgcggcgcttatgtcatggtacacagcgcgctgaaacgcctggctgtgaagatgtccaaaatctgtaacgacctgcgtttgctctcctcaggcccacgcgcgggtctgaacgagatcaacctgccggaactacaggcgggctcttctatcatgccagcgaaagtaaacccggtagtaccagaagttgttaaccaggtatgcttcaaagtcatcggtaacgacaccaccgtaacgatggcagccgaagcaggccagttgcagctgaacgtaatggagccggttatcggccaggcgatgttcgaatctatccacattctgagcaatgcctgctacaacctgctggaaaaatgcattaacggcattaccgcaaacaaagaagtgtgcgaaggatacgtttataactccatcggcatcgtcacctacctcaacccgttcatcggccaccacaacggcgacatcgttggtaagatttgcgccgagaccggtaagagcgtccgtgaagtggtgctggagcgcggcctgttgactgaagcagagctggacgatattttctccgcacagaacctgatgcacccggcttacaaagcaaaacgttatactgatgaaagcgaacagtaa

SEQ ID NO: 74203 - DNA, 1302 bp, Citrobacter koseri
atgatagttttagaacttatcatcgttttgctggcaatctttttgggtgccagacttgggggcatcggtattggatttgcaggtgggcttggcgttctggttcttgcagccatcggcgttaaaccagggaatatcccgttcgatgttatttccatcatcatggcggttatcgctgccatctccgcaatgcaggttgcgggcggtctggactatctggttaaccagacggaaaaactgctgcgcaaaaacccgaaatacatcacgatccttgcaccgatcgtcacttatttcctgactatctttgccggtactggcaacatctctctggcaaccctgccggttatcgctgaagtggcgaaggagcaaggcatcaaaccttgccgcccgctctccacggcggtggtttccgcacagattgcgatcaccgcatcgcctatctctgcggcggttgtgtacatgtcttccgtcatggaaggtcatggcatcagctatattcacctgttgtccgtggtgattccgtccactctgctggcggtactggtgatgtccttcctggtcacaatgctgtttaactctaaactttctgacgacccggtttaccgcaaacgtctggaagaagggctgatcgagctgcgcggcgaaaagcaaattgaaatcaaaccgatggcaaaaacctcggtctggctgttcctgctgggcgttgtctgcgtcgtggtttatgccatcgtcaacagtccaagcctcggcctggtcgcaacaccgctgatgaacaccaccaacgcgattctgatcatcatgctgagcgtcgcgacgctgacgaccatcgtctgccgtgtcgaaacggactccatcctgaactccagtacctttaaagcgggcatgagcgcctgtatctgtattctgggcgtagcatggttgggcgatactttcgtttctcacaacatcgactggatcaaagacactgcgggtagcgtgattcaaggccatccgtggctgctggccgtcatcttcttctttgcttccgctctgctgtactctcaggcagccacagcgaaagcgttgatgccaatggcgctggcgctgaacgtctctccgctgaccgctgtcgcgtctttcgctgcggtttccggcctgttcattctgccgacctacccaacgctggtcgctgcggttcagatggatgacaccggtacaacccgtatcggtaaattcgtctttaaccacccgttctttatcccaggtacgctgggtgttgcccttgccgtttgcttcggcttcctgctgggcagcgtcatgctgtaa

SEQ ID NO: 74204 - DNA, 348 bp, Citrobacter koseri
atgcttgatgataatagtcaggatatctccatccccgaggccgtcgtggtgctctgtaccgcgccggatgaagcgacagcccaggatctggccgctaaggtgctggcggaaaaactggccgcctgcgccacgttactgccgggcgcgacatccttgtattactgggagggcaaactggagcaggaatacgaagtgcagatgattttaaaaaccaccgtttcgcaccaacaagcgcttcttgaatgcctgaagtctcatcacccgtatcaaacgcctgaacttctggttttacccgtcactcacggagacactgattacctctcatggctcaacgcatccttacgctga

SEQ ID NO: 74205 - DNA, 1710 bp, Citrobacter koseri
atggctcaacgcatccttacgctgatcctgctgctgtgtagcacatccgccttcgccggattatttgacgcaccaggccgctcgcagtttgtccctgctgaccaggctttttcctttgattttcagcagaatcaacatgacctgaacctctcctggcaggtgaaagacggctactatctttaccgcaaacagataagcatcaccccctctcaggctgaaattgccgaagtccggctcccggcgggcgtctggcatgaagatgagttttatggcaaaagcgaaatctaccgcaagcgcttaaacattccgctcatcgttaaccaggccgcatccggcgcgacgttaaccgtgacgtatcagggctgtgctgacgcaggcttctgctatccgccggaaaccaagaccgtgccgttaagcgaagtaagcgccagcacggtggctaaatccacgccgtcgccggtcgcggcgcaaacggaagagacgccgcaacctgccgcccggctgcctttctccgcgctgtgggcattgctgattggtatcgggatcgcctttacgccctgcgtcctgccgatgtatccgctgatttccggcattgtactcggcggtaaacaacgcctctcaaccggacgcgcgctgctgctgacctttatctacgtacagggtatggcgctcacctacaccgcgctggggctggttgtggccgctgccgggctacagttccaggcggcgctccagcacccttatgtgctaatcggccttgcgctggtcttcacgctgctggcgctgtcaatgttcggactgttcacgctacagctgccttcttcactgcaaactcgcctcacgttgatgagtaaccgtcagcagggcggttctcctggcggcgtatttgtcatgggcgcgattgccgggcttatctgctcgccatgcaccaccgcgccgctgagcgccattttgctgtacatcgcccagagcgggaacatgtggcttggcggtggaacgctgtatctctacgcgctgggcatggggctgccgctgattctgatcaccgtgtttggcaaccgtctgctaccgaaaagcggcccgtggatggaacacgtcaaaaccgcttttggctttgtgatcctcgcgctgccggtctttttgctggagcgggtaatcggcgacgagtgggggctgcgtctgtggtcgctgctgggcgtcgccttcttcggctgggcgtttattaccagcctgcacgccagacgcagcgggatgcgcattgtgcaaatcatcctgctggcggcggcgctggtcagcgtacgcccgttacaggactgggcgtttggcgcaacaaccgcccagacgcaggcgcacctgaacttcaagccgattacgacagtcgatgcgttaaatcaggcgctggcagaggcaaaaggaaagccgataatgctggatctctacgccgactggtgcgtcgcctgtaaagagtttgagaagtacaccttcagcgatccgcaggttcagcagacgctgggcgacaccgtgctgctacaggctaatgtcaccgccaacaatgcgcaggatgtcgccttgctcaggcacctgaatgtgctgggtttaccgacaatcctgttttttgatgcgcaaggccatgagcacccgaatgcgcgagtgacgggctttatggatgcgacgacctttagcgcacatttgcgcgatcgccaaccgtga

SEQ ID NO: 74206 - DNA, 576 bp, Citrobacter koseri
gtgcaacgtgaagatgtcctgggagaagccctgaaattacttgaggttcaagggatagcaaacaccacgcttgaaatggtggcagaacgcattgattatccgcttgatgagttacagcgcttctggcccgataaagaggctattctgtacgacgccctgcgttatctgagtcaacaggtagacatctggcgtcgccagcttttgcttgatgaaacccttaccgcagaacaaaaactgctggcgcgctataacgcgctttcggagtgcgtgagcaacaaccgctatcctggttgtctgtttattgctgcctgtacgttttatcccgatcctgcccaccctattcaccaactggccgatcagcaaaaacgggcggcgcatgacttcacccacgaactgctgacaacgctcgaaattgacgacccagcgatggtggcgaaacagatggaactggtgctggaaggttgcctcagccgaatgctggtcaatcgcagccaggctgatgtggataccgcccaccgtctggcggaggatatactgcgctttgcccgctgccgtcagggcggcgcgttgacgtaa

SEQ ID NO: 74207 - DNA, 387 bp, Citrobacter koseri
atgaagtatccaggcgtagatgcctggcaaatgggtgacagcccggaactggctagcgagcttgcggacctgatcaaaaaagggatcaaaacggcctcttgcggatcttttgcctcttaccagcaggaggaatctgccccgaggattgggagttatagcattatccttgatggccagaatgttccggtctgcgtgatcagactggtttcaatgcgactggtgcgtttttgtgatgtgactgaggcgttcgcccgtaaagaaggtgaaggcgatttaagccttgaatactggcagaaagagcatcagcggtttttcacccgcgaaggtcatttttctgaagatatggagttgatcgcagaagagtttgaagtggttgaaatgctgtaa

SEQ ID NO: 74208 - DNA, 603 bp, Citrobacter koseri
atgaaaaataataatggactagagaaacgcaggtttatgacacaaaatgaaatcaatttaattcttaatgctgttagtacaggaacctatgcagtgcgtaatcgctgtctggttttgctgtgttttattcatgggttaagggcaagcgaaatatgtcgtctgcgtatctcagatattgaccttaaggataaatgtatacatatttaccgattaaaaaaaggattctcaactacccatcccttactggaagaggaaattcgttcgataaagtcctggctgaaaattcgccttacaagccaacattcagaaactgaatggttatttttatcacgtaaaggcaatcccctttcaagacagcaattttatcagataatcgccagagccgggaagaaagcaaaacttgcaatttgtgcccacccgcatatgcttcgccattcctgtgggtttgctctggcaaatatggggatagatacccgcctgattcaggattaccttggccatcgcaatattcgtcatactgtctggtatactgccagtaacgctggtcgtttttatggcatctggaataaaacaaaaaacagagatgtctgtagcagactgtaa

SEQ ID NO: 74209 - DNA, 639 bp, Citrobacter koseri
atgaaccgacgccgttttcttactgccagagaagttcaggctatgatgaaagccgtacgtcatggccagacaggagagcgagattattgccttatcctgctggcctttcgtcatggaatgcgtataagtgaactactgaacctgcattaccgggattttgatctttatgaaggtcggatcaatatccgccgactgaaaaatggtttttctactattcatcccctcatgccggatgagtgtgaagccattgaatgctggagccgggttcgtgcgagctggaaaggagcgcagaaaataaacgcggtgtttatttcccgcaaaggctcacaactttcccgccagcaggcataccgtataatacgttctgctggtcaaaaggccggaaccagcaccaccacacatccgcatatgctgcgacatgcatgtggttatgaacttgctgaaagaggtacagatacacgtctaatccaggattaccttggtcaccgaaatattcgccacaccgtacgttatacagccagtaatgccgcccggtttgcaggattatgggaaagggtaaatccgctagaggaaaagctactaaaacagaagatcaaaaatgatgaactatataattcattgataactaaggaaaaataa

SEQ ID NO: 74210 - DNA, 549 bp, Citrobacter koseri
atgaaaatcaaaacactggcaatcgttgttctgtcagcactgtccctgagctccacagcagccctggccgacaccaccacggtaaacggcggcaccgtgcattttaaaggggaaatcgttaacgccgcttgtgcagttgatgccggttctatcgatcagacagttcagttaggccaggttcgctccgccaaactcgctgctgaaggcaacaccagctccgctgtgggtttcaacattcaactggatgattgcgacacgaccgttgcgacccaggcttccgttgcgttcacaggtactgctgttgatggcgccaaccctaccgttctggcgctacagggttccgcatcaggcggcgcgactaacgtcggcgtacagatcctcgacaaaactggcaccgctctggagctggatggcgcaaccttcagcagcgctaccacgctgaatgacggtactaacatcattcctttccaggctcgttactacgcaactggcgcagcaactgccggtactgcgaacgcagacgcaaccttcaaagtgcaataccagtaa

SEQ ID NO: 74211 - DNA, 540 bp, Citrobacter koseri
atgcaaggagtgagatcaggtctgctgatatttctgtttccgtcgctggcactgactggcaatcactggaacgtgacgttgcccgggggaaacatgcgtttccagggggtcattattgccgaatcctgccgcgttgaagcaggagatcaacagatgacggtcaatatggggcagatcagcagtaatcggtttcattcgtcaggggaagatgccaaccccgtgccattcgatattcatctacaggattgcagcactgccgtgagtcagcgcgtaggcgtgtcatttcgcggagttgccgacggcaaaaacccggaggtgctttcagttggcgaagggccggggatagcaaccggcgtaggcatcgctttatttgataaagacaatcaattgattccactcaacagcccgccgggcgcctggacgcggctgtatagcggccccaccacgcttcatttcgtggcgaagtatcgggcgaccgggaagcaggtcaccgggggagccgccaatgctcaaatctggttctctctgacctatcagtaa

SEQ ID NO: 74212 - DNA, 726 bp, Citrobacter koseri
gtgagtacgaaaggggaaaatgtgaaaaaaacactggagatgacacgcggcttactggcgggctttttgatgctcgccgcaagcggtttttccgccagcgctgaagcaggcgtggcgctgggcgcaacccgggttatctatccggccggacaaaaacaggttcagctggcggtgaccaataacgacaataacagtacctatctgattcagtcatgggttgaaaacgccgatggcggcaaagatggtcgttttgtcatcacccctccgctgtttgcgatgcaaggtaaaaaagagaataccttgcgcattattgatgccaccaacaaccagttaccgcaggaccgggaaagcctgttctgggtaaacgtaaaagccattccttcaatggataaatcaaagctcagcgataacaccttacaactggcgattatcagccgcatcaaactctactaccgcccaacgaaactggctctgccaccggatcaggcggcggaaaaactgacctttaaccgtgacggttcatcgctgacgctcaacaacccgacgccgtattacctgacggtgaccgaactcaatgccggcacgcgcgtgctggaaaatgcgctggtgccgccaatgggtaaaacctcggtcaagttgccacctgatgccggtagcaacattacctaccggacgattaatgactatggcgcactgaccccgcaaatgaagggcgttctgcgttaa

SEQ ID NO: 74213 - DNA, 2625 bp, Citrobacter koseri
atgtcacatctcaaatacggactggaccgtttgggttcccaacgcgcccggcgcaaagcattctctatttttgtccttgcgcagataccattggcgctttgcctcgcgggtttcgcgcgggcagatctctattttaacccccgtttcctggccgacgatccctcggccgttgcggatctctctggatttgaaaacgggcaagaggtgccgcctggcacctatcgcgtggatatctatctgaacgatggctttataactacccgcgacgtcacgtttaacgctggcgcaaacggtcatcgactggaaccgtgcctgacccgcagccagctcgctggcatgggggtcagcacgtcggccatcaccggtatggatacgctggtgtccgacgcctgcgtaccgttgacggaaatggtcaaagatgccaccacccgcttcgatgtcagccaacagcgcctgtacctgagtgtcccgcaagctttcatgggcaatcgcgcgcgcggttatattccaccggaactctgggatgacgggattaacgccggtttgctgaactataactttaccggcaacaacgtacataacgatgccagcgacagcagcaattacgcgtatttaaacctgcaaagcggcctcaaccttggcgcctggcgtctgcgtgataacaccatctggagctacagcagtggcggtagcgcgtccagtaatgagaataagtggcagcatgtgaacagctggctggagcgcgatattacccccctgcgcgcccgcctgacgcttggcgacagctacaccaacggcgatatcttcgacgggattaacttccgtggcgcccagttagcctctgatgacaatatgctgccggatagccagaaaggctttgcgccggtcatccacggcattgcgcgcggcacggcgcaggtctcgatcaaacaaaacggctatgaaatctaccagagcacggtgccgccgggccccttcacaattaacgatctctacgccgcaggcaacggcggcgatctccaggtcaccatcaaagaggccgatggcaccagccaggtcttcagcgtgccgtggtctacggtgccaatgttacagcgtgaagggcacacccgttatgcagtgaccgctggtgaataccgcagcggcaacgaccagcaggaaaaaccaaagttcttccagagcaccctcctgcacgggctcccggcaggctggacgctgtatggcggcacccaactggccgacaactatcgcgccttcaatttaggggtcggtaagaacatgggcgagttcggcgcggtttcgctggatgcaactcaggccaacgccaccctgcctgacgacagctctcaccaggggcaatcgatacgcttcctttataacaagtcgctctatgagaccggcaccaacgtccaactggtgggataccgttattccacccagggctattacagctttgccgacaccacttaccgcaggatgagtggctatgacgttgaaacccaggatggcgtgattcaggtcaaacccaaattcaccgactactacaaccttgcttataacaagcggggcaaggttcagatgagcgtaacgcagcagttggggcgcactgccacactgtacgtgaatggcagccgtcaaacttactggtcaaccaacaaggccgacgaacagctacagctggggttaaatgccgccgttgacgatatcaactggacgctgagctacagcctgaccaaaaacgcctggcaacagggccgcgaccagatgttagcgttcaacgtcaatattccgttcagccactggctgcgttccgacagcaaatccgtctggcggcacgcaagcgccagctacagcatgtcgcacgacctggatggccggatgactaacctggccggtctttacggcacgctgctggaagacaataacctgagctacagcatgcaaaccggttatgccagcggtggcgaaggcaacaatggcggaaccggctacgcggcgatgaactatcgcggcggctacggcaacgctaacgtgggctacagccacagcgatggatttaaacagctgtactacgggatgagcggcggtgtactcgcccatgccaacggcatcaccttaagccagccattaaatgacacggtagtgctgattaaagcacctggcgccggagacgtgaaagtcgagaaccagaccggcgtacgtaccgactggcgcggttatgccgtcatgccgtacgccactgagtacagggaaaaccgcgtcgcgctggataccaacaccctggcggataacgtcgatctcgatgatgcggtggtcagcgtcgtgccgacccacggcgccatcgtccgcgccgaatttaaagcccacgttggggtaaaaatcctgatgacgctgacgcacaacggcaaacccgtgccattcggcgctatggtcacttccggcgataaccagagcggcagcatcgtggcagataacggccaggtctacctgagcggcatgccgctggcgggaagcgttcaggtgaaatggggcgaaggcccgggggccaactgcatggcccggtatcgcctgccggaagagagccagaaacatgtgctgagccagctctttgcagagtgccgttaa

SEQ ID NO: 74214 - DNA, 531 bp, Citrobacter koseri
atgatgaaaaaaccactgtatttcctcggcgctgtgctgacgctggcctgcgtcaatgtcttcgccgccgacagcacgattacgattagcggctacgtccgcgacaatgcctgcgctgtcgcgggagagtcaaaagattttaccgttgacctgatgaataacgctgccaaacagtttaatgcggtgggggcgacaaccccgctcgtcccattccgtattgtcctctctccctgcggtaactcggttacggcagtcaaagtcggctttaccggcacggaggatggcagcaacaccagtctattgaagatcgatagcggtgcctcggcagccgcaggcatgggcgtgcagatcctcaataaccaacagacgatgctgccactcaacgccgcgtcatcatccatcgcgtggaccacgctcacgcctgggcagaccaacatcctcaacttttatgcacgcctgatggctacgcagattccggtcaccgccgggcacgtcaatgccacagcaacattcacgcttgaatttcagtaa

SEQ ID NO: 74215 - DNA, 504 bp, Citrobacter koseri
atgaaacgcaactatgtagggtggcttctggcaagcgtactgacagcggcttcttcagggcttcaggccgctgatatcacgattaccgtcaacgggaaggtggtggcgaagccgtgcacggtgtctaccaccaatgccgccgttgacctcggcgacctgtataccttcagcctggtaaccgcaggttcggcttccgcctggcacagtaccgcgctggaactcactaactgtccgatcggcacctcccgggtcatcgcaacctttagcggaaccgcagacagcaccggttattacaaaaaccaggggaccgccggcaatattcagctcgaattgcaggatgacgcaggcaccacgttaaacaatggcgccacgaaatccgttcaggtggatgactcaacgcagtccacccgctttccgttacaggtcagagcgttaacggtcaacggcggtgccacccagggaactattcaggcggtgattagcgtcacctatacctacgcctga

SEQ ID NO: 74216 - DNA, 903 bp, Citrobacter koseri
atgaaaaaaatcatcgcgctattcaccacgctgctgctgatgggttggtcgctggatgctgcggcattcacctgtaaagtcaatgataccgggcagaccatgacctcagggtcagcgaatgtctatgtaaacctgacgccatctgttggagtgggtcaaaacctggtcgtagatttatcctcttcagtttcctgtaaaaacgactcctccggcggctctatcattgactacatcaatttaaccagcggttccgccttcggtggcgcgcttgcggcgtttacggggagcgtttactgggcggggaatacgtatcctttgccgatgaacggtaattcatccgtctataccatcactcatacggattatcgcggattgccgctgcgcatgtatctgaccgcgaccggagcagcgggaggcgtcgtcatcaactctggcgaactcatcgcgcaattgaatatgcataaagtggccagcgacggaaacccgaataatttcatctggaatatttacgccaacaataatgttgttgtccctactgggggatgcgacgtatcagcgcgtgatgtcaccgtgacgcttccagactatcccggctcaatggccgtgccggtcactgtccactgtgcgcaaaaccagaacctcggctattacctttcaggtacgaccgtcgatgccgccaactctatcttcagcaacaccgcgtcctcctcagcggcgcagggtatcggcgttcagatgacccgatacggtagtgttgttcccgctaacaacaccgtagcactgggcacggtcggcacatcgccggtaaatcttggcttaaccgcgacctacgcgcgcaccagcggccaggtcacggcgggcaacgtccagtcgatcatcggggtgacatttgtttaccagtaa

SEQ ID NO: 74217 - DNA, 1434 bp, Citrobacter koseri
gtggactatatcctgtctccctgttcaatggcggcggaaggactcgccagaatgatgacctgcggtcaacggcgaccggtgctgctgcaacaccagacgcaggagcgcctttcgctacagctaacatccgaggtcggaaggattgtcgtttttctccctgacgatccttactggctgctgtttattcttaaggaagccgccttcctgcttgctgaggcagaaacaccgctgcccatgctgatccttagccgtagtccatccgcctggctatggcaaacgctgctctaccatgttcctgataaacggcaacttaccgccgtccgggcggtcgcctccgaccttcctggggaacaactggcagcgctgctacagggtgacttcctgcaatacccgaaactccagcaattgtcctttttagacgcgcagatacagggcaaaccggcagcggggttaagtaaaacggaattgagcgccaccctctctcttctgtacgggtacagcatcaacacacaggcgaagatccgcggtgtgagccagaaaacactttataatcaaagaacgtcaggactaaaaaagatggtggcgtctcacccgcatctgattacccgctttcctggaagccagagcaagactcacaacaagcagctcatcgccgcgctatctccctttgagcgcgaatttatccatgccattcatagtcaacaggtattcccggtatttcaacccataaccgacggccacctgcggttgcagggggttgaaatcctttcccgctggagaagaggcgacaacgtattgcttcccggcgaatttctgccgcagatccacgccgaatacgcctggcttctgctcacggcctttgtgctacaaatagcaatccagaacattaaccaacaccagggtaagttctggttctcaataaatattccaccctgcatcgccaaccacgaaaacctgctgcggatgatggaaacggcgcgccagcagctacagcagccgcaatggtcgggtagattagtgctggaatttgcagaaacggtcgatctgcatcagcaaggaagaacagcagaaaatatggacaaaatccaacggcaaggctttcgcatcttcctcgatgactgcttttcacacagcagcgtaatgtttcccgtcaggacaatccgctttagcggctacaagctggatatgagtatcgtgaatgattttcaacgcgatccacatgcactggcgctgataaagagtctgctctattactgccagttgacgcagagccgctgtattgccgaaggcgtcgatagtctggagaaattcaatcagttgaaagcgctgggagttgaccgctttcagggctatcttttctcgccgcccatcactcacgatcgtctgccggagataatccagcaatttttaccgaaacatcccgcacctcgctga

SEQ ID NO: 74218 - DNA, 1899 bp, Citrobacter koseri
atgatgtggaaaacaactcaagcccgagtgacactcctgcttataagtttttttgttatattactgttggttacgtttgttgttatcaaacaatttgtctctccgcagattattgcaacggaaaccagaaatataagagccacggtcgagctgcaaagtgacgcgataaaagagcaaatgaaccgcgttaaagcgcagcagcgcacgatcaccgaactggtttccgggcttcagagcgatcaaattgacgcgctcttgccgctgtttgtgaaccagtatggcgatctgaacgtttttggcggcggcatctggccattacccgggctgcgcgagccgggccgcgacaaattcagcactttttatgcgcgcgatgccggtggcgtgctccagcttaatacggtctggaaccagccggagtcagaaaaatactgggaacagccgtggtataaagacggtatggctgcgccaaaaggtgagtgtgcatgggccaaagcctaccaggattcggccagcccgcagccgagaaccaactgcgcgatgacaatctggaaagagggaaaggcctggggtgtcgccactatcgatgtgacgttgggcttttttaaccaactggcaaaagagatggggaaggcggtcgagggaaccgtattaattgttgagtctgatggcaaaattgttgggaacggcgcgccgactcaaggcaataccgcattgatgaatgtgcgcgatttgaatattccgtcagctttaccgctgctcaatctgctgagccaggggcaaaaagcggaatatgagggcggctatgacggcgaagacggcgcccattcgctgtttgttttgtcgatagaaggcagcccgtggtatctggtgattgatacgcccagcagcaacctggtgcgccagtctaatgcgatactgacaacactcacgctcgtacagacggtgatcggccttatcattgttcttgtcctgatgctgattgtgcgcaacattttcaggaatgtgacgctgctgaacaggaacatagaggcgctatccggcggcggcgccgatctcacgcaacggcttgtggaaagcaaaagcccggaatttaatgccatcatcaataactttaataaattcatcgcgttccttcaggatttgatgcagcaggttgggcacagctcctcggcaatttcttccgcttcgcggcagatcgccggaggcaacctggatctctcctcccgtacggaagaacagtccgcttccattgttgaaacggcggcgtcgatggagcaactcaccagcaccgtacggcaaaatgcggagaatgcgttgcaggcgaacaggctggcgacacaggcttccgacgcggcgaaggcgggagcttcagtggtcaatgacgtggttgccacaatgagcaacatcaatgattcatcctcaaaagtggtggaaatcatcagcgtaattgatggcatcgcgttccagaccaatattctggcgctgaacgcggcggttgaagcggcgcgggccggtgagaatggccgtggttttgccgtcgttgccggtgaggtgcgttctcttgcgcagcgaagcgcccagtccgcgcaggaaattaagaagctcattgaagaatcggtcagcagtattgagcaaggtagcggtctggttcgccaggcgggtacgacaatggacggcttaatggagaaggttgaagacgtgagcgttttaatctctgagatcagttcctcaagcgatgagcaaagtcgcggaattgagcagattaatatcgcaattactcagcttgatagcgcgacccagcagaatgcggcgctggtagaagaggttgccgcagcggcccagtcaatggaatcgcaaaccgagatgcttgaaaaagtggtcggcagcttcaaactctga

SEQ ID NO: 74219 - DNA, 1695 bp, Citrobacter koseri
atggacagcaacgtgacacacgatgttttatacgtcccgtttacggggaaactgttactggaatcgccgttattgaataaggggagcagttttactcagcaagagcggaatgattttaatcttaatggattgctgccctgcgctatcgaaaatattgatgagcaagcggaacgcgcttaccaacaatatctggaggcggagtctgataacgcgcggcatatttatttgcgtaatatccaggatacgaatgagacgctattttattacctgctgaaaaaacatctcccggaaatgctgccgattgtttataccccggttgttggcgcggcctgtgaaaagttttccgggatttatcgtcgcgccagaggggtctttatttcgtggcccgatcgcgaacgaattgacgatattctgcatgatatcccgagacacgatatcaaagtgattgtggtgacggacggggaacgcattctgggactgggcgatcagggcgttgggggaatggggataccgattggcaaactgtcgctgtataccgtttgcggcggggtaaatccggcgcatacgttgcccgttatgctggatgtcgggacaaacaatccgcgattattagacgatccccgctatatgggctggcggcatccgcgcatcaccggtgaagactactttgcgtttatcggtatgttcatcgctgcggtgaaacgtcgctggccggatgtattgctgcaatttgaggactttgcccagcatactgcggttcctttgctgcatcgttatcgtgatgagctgtgctgttttaatgatgatattcagggaacggcgtcggtcgcgctggcgacaattttagcggcctgccgcgccagccagcgtgattttaatcagcagacgatggtcatcgttggcgcaggggcggcgggttgcggcattgcccgccatatcatcgcctgccgggtggccgaaggtatggacgccgcagaggccagcaaaacgattttcatggtggatcgcgacggcctggtgatgaccaccgcctcgtcgctggctgattttcaggttccgctggcgcagcctcctgaaatgctatctggatgggcatacgctggcgcgacgccgtccttgctggaggtcattcataacgcgaaacctggcgtgatgttgggcgtttcagggcagtcggggctgttcactgaagaggtggtgcgtacgatgtatcgccactgcgaacgcccgattattatgccgttgtctaacccgacctccagaatggaggcccggccgcaggaccttgtccgctggactgatggacaggcgattatcgcaacgggaagcccttgtgagccggtagattttgccggacgtacgataccggtatcgcagtgtaataacgtgtatatctttcctgccattggtcttggcgcgattgccagcggcgccaggaggatcacggaaacgatgctgatggcggcgagccgcgcgcttgccgacgcctcgccttcggtgcgtcatcatggcggaggattgctgccggaaatcaacatgatatgcgacgtaacccgccgtattgcctttgaagtggggaaggcggcgcagctgtctggcgtagcggatgcgctggatgatgctgtgctaacacagcgcattacggcgcatttttggctaccgcactatcgtccttataaacgccgtgctatctag

SEQ ID NO: 74220 - DNA, 1368 bp, Citrobacter koseri
atgactgcatttattatagcaatagtgataacagtaattgccgcgtggttaattgtgaaaaattaccagccgcaaactgtgttattattcgcggggctggcgttattaacagttaccgttctgttttacccagagaatagtattctttatggtaaagcaaaatctaccgggtcaacctggctggatatcttcagttttgcaaaagagtctttgaccacgcaaatcgcgggtatcggcttaattattatggctgcggggggattcgccagttatatggatcacatcaaagcctcgaatgcgatggtgaatatgtgtattcgtcccttgcaggtcattaaagcgccttatcttattcttgcgctgggctacatttgcgcgcagcttctgcatgtggcgatctccagcgctgccgggctggcgatgttattactggtgacgttctttcccgttctggtgcggctgggcgtcagtaaagcgtccgctgccgcgatgatcggcctgtgcgcgtttatggatcttggcccggcggttggaacggcgaatcttgcggccaaacatgccggaatggaaagcgcgatttactttgcgcactatcagatgccggtggcggttgtggttatgctggccgtcgcggtggtgattttctttaccgccaaatatttcgataaaaaagatgggtttgttccggggacggaagaggttgccgaagcggaagaggaaggacgcaaagtgcccgccatttatgcgctgctgcctgtattgcccgtcattctggttctggttttcagcccgctggcgatcgcatccatcaaaattgacgttgtgacggcgatgatcctcggggcggtggtcgcttttttcttcgagctgttcaccacgcgtgatttccgcgcctgttgcaaagggttgcaggtatttttcaaaggaatgggaagcatgtttaccagtatcgtttctttactggtctgtgcggatatctatgcccaggggctacagaaaatcggcgcagtggactatctccttcagtctgtacaaagcgctggtctgggctttaccagtatgacgctggtgatgacggcgctggtaggcgttactgcggtattaaccggttctggcgtggcggcattcttctccttttccgggctggcgccctctatcgcggcgaagtttggtgaaagcgcggtcaatatgattctgcctatgcaactgatggcgggaatggggcgctctatttctccggttgcaggcatcattatcgccgtgagcaaagcgggcgaatgctcaccgtttatgatcgtcagaagaacgctgctcccggcgctggcggggattgccgcgatgttgattgccaactatgtgctgatttaa

SEQ ID NO: 74221 - DNA, 960 bp, Citrobacter koseri
atgattgacggcagaggtatcttttcatataacaatctcaatataaaacgtcaccgggtactgcacatgtacagaaaaaacacattaagtctggatgagtataattcactcacccaaaatattggtgacctgaccgagtctgaatgtcggcttaatgactatattaataaacacttcagcgaattaccttatcatgggattgtcgatctttcccagaatgccgccgtgagcaaagcaaccatcgggcgctttctgaataaagttggttttactggctatgcggctttcagaagagcgctggataccacgctgtcaaaaaacaaaatcgccgcgccttttgagaaaaacagtcgccagcgacctaaaaacaccaccaaaacagaacagattgttgagacctttaataataaagtcacttcattatttaatggttttaaacagactatcagcatcgatagcctgaataaattcatcgaactggtactcaacagccaacgccatatttatgtggtcggcccttcctcctcccatgcgatggcgctgcatttttgtacgttgttaaagtactttcgcagcaacatcactcttctgcctaccgacatcagcgagttgcccaagtgcctgataaacatcgaaccagatgatgttctgatcgtattctcctactatcgctttaaccgggtcgcactcaatatcgcgaaatggttcagaaagaaaaatgcgaccgtcgtgctgatcaccaattctgatgccaatccttacggtaaattctgcgatcttcagtttgtactgccaagcgacgtggagtccatttttcaaagccgaattctcggtttcttttttatcgaactgattctgcatctggcttatgagaagagtgacaatgaaggcaactttgcccaactggaagagttgtttctcttctttgagacattttccgcttcttcacataatacctga

SEQ ID NO: 74222 - DNA, 1371 bp, Citrobacter koseri
atgtacggtaagcaaacaacagtatttgattctgacctctattcatcgctttttaccgagagtcggatgcgggaaatctggtctgacgacaatctgcttcgctgctggttgacgtttgaagcaacggtagcgcgcgtgcaaagcgagctgggcattattcctgaacaggcggcgattgaaatcgagcaggcatgtcagaacatcgagataaactggcctgccttagcccagggaacgcaaacggtgggcatggcgattaagcccttgatcgaccagatttcggctgctggctctccgttggttagccgctatctccactggggatgcaccacccaggatctgctggactccggcgtggcgatgcgattacagcagacgctgcaacgggtatatcagcaattgattgaggtaggggaagagatgaagggcatgtccttaaagcatgcccgcaccgttatggttgcgcgcaccaattcggttgatgcctccgccacgacctgggggctgcatgtctccggctatctggcggaggtgaatcggcatctgaaccggctgcaacagctctatccccgggcgattacgggtctgtttggcggcgcggtggggaatcttgcctccgtcggttctcagggaatggcgacgcgtgagcggttgatgcgggcgctggggctaaacgttccctgtggtataaacaatgccagccaggatgcaattgttgaagtggttcaatgctttgcgctgattcacggtacgctctgccgcctggcgaatgacgtggaaactctgggacgcacccccatcgcggaagtgcttgaaggcgagggcggcggaggctccagcaccatgccgcacaaggctaatccgcgcgccagcaatatgattcagacgctggcgaggatgggctggatgtacgcctccggcgcgcctgcgatgttggatcagcaggatgtgcgcgcggcatcgatgagagtattgaactggacgattctacccgaggcgtcgaacgccttatcggtcagtcttagccgggccaaaaagctgctttcccaccttattgtgaatgaagaccgaatgcgcgctaattttgactgctcgaaatctttcattatgtcggaatcgattacgatgagtctggcgaacaaaatagggcgagaacccgcttataatttagttaaagcgctgctcagtcaggcgaatggtgagcaaagtcttatcgacattgtccacgccagcccggaaattcgggtgtcgttatccgcagaagaaattgccgatgcctgcgagccgttgtcttatattggttgcaacgatgcgctgattgccgagaccctcgcgcggtttgatgaaatgaaagtcattgatattgcgtag

SEQ ID NO: 74223 - DNA, 1038 bp, Citrobacter koseri
atgaaaataaaaatgatttcactcattctactgacggggatgacaacatcctcatatgcgatgagtatctataataaagatggaaatacgctggatatttatggccgtgtagaaggtaaaattgccagcggagaaaactcttatgccggaagcgaaacgcgaacgaatctgggtggccgtctggggatttacctcacccgggatttggattttatccccgagacaaagatcgtaggccgtctggaatggcaggtgcgaaccgaaaaaaacgacagcaataccggagatagcgatttaaaagcgcgctactcctatattggtttgtccaataaaacctggggcgaactgattgtcggcaggaccaaaaacccgttgtatcaggtcatgaaaatgactgataaatataaaaactttacgccgaatatttacagctacggcatcaccaccattgatgactcctaccagttcaaccgccaggacggcaccgtacaatggaatgctaaatttgcaggcaatgagatacagctggcgtgggtcgcgggcaatggcagcagtaatgaagccctggattatggcgcaatggccagttacagaaacacgctcagactgggggatttcagactcacaccggcgattgccgccagccgttataaacgccaggatggcgtaaaaaccactgatggccggaatcaaaacgaccagatcatggcaggcttgcagctcagctataagaacgttgaagccgccgtcaccgcattacgcacatccattgcgcgcgataataaaagcgacaatgactttaaaggcatggattcattactgtcctggaaatacggtaaatttaaattccttaccggttacagtttcctggatgagaaagataaatccgtctatgaaaaagaggactggcgtgtcgaaacacaaataacattagccgatgatacctggttatcatttacttacgataaagccttcgccaataaaaaccaaaaagtcaatgatgacgcgctcatcgttggactccgctatgacttctga

SEQ ID NO: 74224 - DNA, 777 bp, Citrobacter koseri
atgaaaagaataatgcagttatcccttgcatcaacttttttatttggcagtttatgtgtgcatgctgatgcgctattagcgccctcaccctatgcaaaaatagagggggataataaaattgtcgcgctgtatggcaactcttttacgttctataacaacaatattaatacccggttgcgggatctgacgcgctctttactgccgaaccacgcgaaagggtataaatatcgggggatcaccatctcaagcggtcatttaggctggcaaattcataatctcgcctatcagaatacattgcaaaaatgggacgttgtcatcttgcaaggcaactctacggagacgatctcacagaaagagagcacccggcagaatttcatcgaatccgcgacaaaaatggcggatatggcgcatcaggcaggttcaaaagtcgtgtacttcatgacctgggcaaagcgggatcaaccagaggatatacagaaacttgctgacgcctatgtttccattgcgcagaaaactggcggctatgtcgcgccggtcggcctggcttttgaaaaagcgcgtaaagcacacccggaaattaatctttattaccacgatggcgtacacccttccatcgcaggaacctatttagccgcctgtgtgttctttgccacgctgtataaccagtcgccagtgggcggagcgctgcccgtagacacggatatgaccccagccaccgcaaaagcattgcagcagattgcgtgggaaaccgtcagcgagtttcagaaatcatcatag

SEQ ID NO: 74225 - DNA, 2208 bp, Citrobacter koseri
atgaaaagcagcgcaaaaaataattattctctgcaaaaatccttgctggcattcgcgattggtgccgccgctcacggtgtttacgcagcagaagacactaccgggaaagaagatacgatggtcgttgaggccaaatccgcaaacagtggttttaaagccggtggcgacgcgcaggtgcccgcgttcctggaggggcaggttgcccacggaggacgactgggggttctgggcgaacaaaaagcgatggatgtgccgtttaacgttatcggttacacctcaaaactggtggaagaccagcaggcgaagaccatcggcgaggtgctgaaaaacgacgccgcagtacagcccgtacagggatacgggaacttctcagaaaactatcgtattcgcggctttgagctggcgggggatgacgtgacctggggcggtctggctggcgtgctgccgcgtcaggtcgtggatgcttcgctgtttgagcgcgtggaagtgtttaaaggcgccagctctttcgtgaacggcgcagcaagttccggcgtgggcggtatggtcaacatggagccgaaacatgctgatgacctgccgctgacgcgcctgggggtggattacacctcttcgactcaggtaggcaccacgctggatgccggtcgtcgttttggcgataacaatcagtttggcgcgcgagtaaacattctgcatcgtgaaggcgaaaccgccgttgataacgagaaaaagcgcacgacgctggccgccctcgggctggattatcgcggcgataaactgcgctcctcgctggatgtcgccgcccagaaaaagacgttccacggtgggacgatgggaattaacttaagcggcgtcgatttcgtgccggatgtaccgaacaacacggataactacagccagaagtggggctacagtgatatcactaaccagttcggtatggcgcgcgctgaatacgacatcctgaataactggacggtctacggcggcgccggggcgcaacatgcgcatgaaaccgggatttataccgcgccaaaattactggacagatcgggtgatgctgtcgtcaatgtgctgtataccaaccgtattattgacgcgttcagcagtatggcaggtattcgcggcgaatttgatacctggtcggtcagccataaggtgaacctgggctattcggcggtgatcaaacgcgataaaacggcatggcgtatgaactgggccaaccctggctccatgaccaatatctatgacaaccatgacgtgccgatgccgcagtgggatctcgccggcggcaactatcacgatccgctgacaacctcccgaaaccgtactcagggttatctcctcagtgatacgctgggattctttgatgaccaggtgctgctgaccgtcgccgcgcgtaatcagaaagtggtggtgcgtaactacagcaatgcgaccggtgaagaagacactgcttctcgctatacggaaagtcgatggatgccgacctacggtatcgtatataagccgtgggacacggtgtcactgtatgccaaccacaccgaggcattacagccgggtgaaaacattaccgatcaggagtcgccggattacggtaaaagcatcggtattctgcactctaagcaaaatgaagtgggcgtgaaaattgatttcggcaccgtcggcggtagcctggcgctgtttgagattaagaaaccgtccgtgattaagaacgagacgacgcaggaatattcgaccgatggcgagcagcgtaaccggggtgtggaggttaacctgtttggtgagccggtttacggtctgcgtctgaacagcagtgcgacctggttacagccgaaactgaccaaaacgcaggatggcgtcaatcaggggaatgatgcttccggtactccacgtttcaccgccgttctcggtgctgaatatgatatccggcaggttgatgggctgaccgctaccgcgcgactgaatcacaccggctcgcagtatgacggcgccgctaatgagaagaagctggacagttacaccacgcttaacctcggcgttcgttaccggatgcgcgtaaaccaggagcagaatgagatggtatggcgtttaggggtggataacgtcaccaacgagcaatactggtctggcgtatccgactacgatggcgtgtatgtgttccgtggcgaaccgcgtaccctgaagctgtctgttaattacgacttctga

SEQ ID NO: 74226 - DNA, 1053 bp, Citrobacter koseri
atggcaaacattcgagatgtcgcaaagcatgcgggcgtttccgtcagcacggtgtccaatgtgcttaacggccgcgccgatcaaatgcgcccggaaacgctggcgcgcattcagcaaagcatgcaaacgctcaactatttccccaaccgggtcgcccagcaactcaaaacggggcaggcaaaaatgatcgggttactggtgccatccatcgtgaaccccagctttgcggcactggcgcgtgaagtggatctggccgccaaaaaacacctctaccgcgtgctgatcggcaacacctatcgccaaatcgaagaagaagaagcgtttctggaagatatgtttgctcatggcgttcgcgggattattgtggccgcctgtgatatcgaaaagccgcatttcgcccgcgcggcggcgcagggcatgataatggtgaactacgatggccgtatgcccgcaagcgttgactctggcggtttcgcgctggacagcgtgtcgatggataacgttgaggcgggccgaatggcggcagagcatcttatcgcgcgcgggtgtcgccgcctcgcgtttgcgaccgtcgcagggatgacccccagccgcgcgcataaaatagagggctttctcagcgcggtacgccagcacaacatgtatcgtgaagggatgatcatcgaaggaaaagcgatggccgcctacggagataccgaaatgaccgaactgggccgttctctggcgcaaaccctctgccaacaatcccttcgtcctgacggcatcgtcgccattaacgatgcgcttggcattggtttgatgagtggtttgcacgaagcccgcatccgcgtgccggaagagatctctctcgtcggtatcgacaatatttcactctctggcctggtttaccccggcctgacctctattatgccgccgctcacggagatggcggacgtgatggttgagcgcctgatcgcccgaatagagactccggcaatccctcccgacgaatttttgtttcccccttccctggtatgccgacaatcggtgcgggaagcggaaaatatacgatga

SEQ ID NO: 74227 - DNA, 420 bp, Citrobacter koseri
atgataaagtcagatattattcatcctgatttattacaggcattggcgcagtgcggtcataaagccaatattctgattgcggatgcgaattactctttcctgaccaactcgtcaccgcaggcacgtattatctggcttaacttttctcccggcttaattggcagcgtgatgattctggagaaaattcttggctatattaacgtagagaaagcgacgttaatgacgagcccggctgaatttgataacacgattgagcgtgaataccgtggtctgctttcagaaatgacggaactttctcatgttgagcgaaatgcgttttacgcgctggcaaaatcatcggatacgctgctggtgattgcgtcaggcgaaacccgccgttttgccaatattctcctcaccgtcggcccgacattactctga

SEQ ID NO: 74228 - DNA, 765 bp, Citrobacter koseri
atgggatcattagtgggtaaaaaagtttttattaccggtgcggaacagggtattggtaaagaaacggccagaaaattaattgaggccggatgtgatatctatattcattatttcagtggcgaagaaggcccacgagaattaatggccattgcggagcaaaagggaggccgggcggcttgcggttatgctgatttaacgaatgaggaagatgccgcgcggtgcgttgcacagggcgcggcgtttcttggcggcattgatattctggtgaataacgtcggtggaattatcgcccgaaaatggctcggcgagatcgaaccacagttctggcgtaccgttattgacgtgaatatgaccacgatgctcaatgtcacccagcaggcgttaccctggctgaaagcctcgccagatggggcgagcattgtgaatctggcgtcattagccggtcgttccggcggccatgcgggctctctggtttattccaccacgaaaggcgccgtcttgacctggacgcgctcacttgccgccgaactgggcgaatctggcattcgggtgaacgccgtggccccaggattgattctgggcacccgttttcataatcagcatacgacgcaggcgtctgccgaccagacgattcaggctattcctttggggcgcgccggtacgcctgaagatgtcgcccgggtgatctgtttcctcgcctctgaatatgatggtttcgtctctggcgcgacgattgatattaatggcggtatttatcgggcgtaa

SEQ ID NO: 74229 - DNA, 1875 bp, Citrobacter koseri
atggcagatatctctatgaaagcaaaggatgaaaatgctttgctgatgctgttaggccgactgagcagaggcttaacgaccttaacatcctgggccggggcactggtgctgtttatcaacgtactggtggtattcgcatccgttatctggcgctacgcattgcattcaccgattcactgggcggaagaggtggcgcgtgcgctgatgattgccctcgtcttttttggcgtggccacgtccacaggcagaggcgggcatattggcgtcgatctgttcctgcgttttttgcccgagcaggtgcgcccttatgttatccatgccagtcgttgggtgctgtttctggtgtcggtggggctggtgatttccagctatgacctggtgcaggccgcgcgggtacaaacgaccgagaccggcctgccgcagacgatttacgttatcccggtgttgatcggttccgtggtaatgatggtggccgcgctggaacatgcgctgcatgaacgcgcgcgggttgttctgctcagcggcggcggaatcctggtgctggcggcgctggggtatctgaaactctcgctgatggccgatccggccagcgcggcggcgggactgatgctgatctgttttgcgctgggtatcctggccggtgtgcctatcgcgtttacgctgggcatgtccgcaatggtgttctttatttgcgatccgtcgttaccgtttgtctttttctctcagcaggttgccgccggggtggatcacttcgttctgctggcgattccgttctttttacttgccggggcggcaatggaaatcaacgggatgtcaacgcgtctggttgagctgattgtgcgcgggatggggcgctttcgcggcgggttaaacatgacgaccgtgctgtcgatggccttcttctccgggatttccggttccaaactggcggatgtcgccgcggtgggcggtgtcttgatgcctgcggtgcgtcgcgctaagcaggacagcgaagaggccgcaggggtgttcgccgcatcggcggtgatggcggagaccattcctccgtgcgtaaacctgatcgtcatggggtttgtggcgaatatctccatcggcgcgctgtttatcgccggcctggttcccgccgtctgcctgctgatactgctgatgatcgcggccaaccgttttggcggaaaaattaacgtcagcgaggcttacccggttttacgcccgcgtgcgcaactctaccttggcgccgccgtggggctggtcatgatctttatgattggccgtggggtgatgatggggattgccacctcgacagaaatctctgcctttgcggtgatttacgccatcgttgtcggtcgcctggcgtttcgcgagctgacgctgaaagcgacggtgaaaatgtttattgatatcgcggccatgtccggcgtactgctgttcatcgtcgcctgtgcgaccagcctttcttatgcgctgacaatacagatgattccgcagcaaattgctgaactgctggtggggattggaatggagcagggcgcctggctgttcctgctgttgaccattgtgattctgattatctttggagcggttctggaaggtgcgccagcgttgatcattttcgcccctatcctggtgccaatcgccattcagcttggatttaacccgctgcatttcggtattgtcatgattctggcgatgggctttggcttattttcaccgccgattggattagggctgtataccacctgcgccatctgcggcgtggagatgaaacatgttattcggccaatggcgaaatatctggcggttgttttcgtcggcatcatcattgtggcgatggcgccgccattaaccacctggttgcctggactggcaggctactga

SEQ ID NO: 74230 - DNA, 1044 bp, Citrobacter koseri
atgatggaaataaaacagcttcgttcgaccagacgttttttagctttagcttgcttaagtaccgcgctgatagcgggcagtgtggtgacttcttttgctcaggcagcgcttaattttcgcgtttactcctcgctgcccggggatgattcctccgcgcactatatctggtttacccgttttcaggagaacctgaacaaaaacgaaaaattgaaagggcaaattaagctcaactatttcgccaacgggatgttaggaaaagaggccgatgccacgcagcaggtacgcattggcgcaatcaatatgatgatctccggcacctcgatttgggccacgctggtgcctgaaatcggcgttctggatctgggttatctgtttaaagattacgaccaggttggcaaaacgctggacggaaaagcgggcgagcagctttctgcgttaatgctgaataaagccaacgttatggtgctgggttatggctataacttaggcgcgcgtaatgtgtataccaaaaaggccattgaaaaacctgaagatttaaagaatctgaaaatccgcgttctgccagtgcctaactttatcgccacgctgaatcatatgggcgcggtggcgattccgatgccgggcggcgaggtctattccagtctgcaaatgggcgttatcgacggcgttgaacatgatgcgccgaccatctactccagcaaatattatgaaattatcaagaatggcaccctgacccgccatagctttaacccgctgatgattgccatgaataagaagagcttcgagcaaattccagaagcgctgcgggccgatgtccttgcggcggcgcaggaagccacagagtacgagcgccagcaggcaagccagaaagagcaggaagcgattaaaaacctggaagccaaaggggtgacattccgcgagaccgatcgcgcgtactttgcgcagcaggtgcagccggtctggaaggcattcctcgatcaatatcctgatatgaaaccgattgttgatgagattaccgccgcggcgccaggcgataagtcgtaa

SEQ ID NO: 74231 - DNA, 1464 bp, Citrobacter koseri
atgcaaaataagctattacacgcgaatgccaccgttccgaactgggatcgcaacgcgctggttccgcgaattgttcacctgggattcggcgcgtttcatcgtgcgcatcaggccgtttatgcggatattctggctgcggaacacggcagcgactggggctacaccgaagttaacctgattggcggcgagcagcagatcgccgatctgaaaaatcaggatcgcctctatacggtggcggaaatgtcggccgatgcctggaccgcccgcgtggttggcgtagtgaagaacgcgctgcatgcgcaggtggatggcctggaaacggtgctggctgccatgtgcgagccgcaggttgccattgtatcgttgacgatcacggaaaaaggctactgccactctccggctaccggccagttgatgctcgatcacccggctatcgttgccgatctgcaaaaccctcagcagccaaaatcagcgccgggcgttattgtcgccgcgctggcgcgccgcagagcggcgggtctcccggcgtttaccgtgatgtcctgcgacaatatgccggaaaacggtcatgttatgcgcaacgtaatatgcgcctatgcgcaagccgttgatgccgggctggctgcctggattgcgcagaacgtgacgttcccctccacgatggtggatcgtatcgtcccggcgatgacggcggaaacgctggataagattgaacagcttaccggcgtgcgcgacccggcaggcgtggcctgcgagccattccgccagtgggttatcgaggataactttgtcgcaggccgcccggaatgggaaaaggccggagccgaactggtggctgacgtgctgccgtttgaagagatgaagctgcgtatgcttaatggcagccactctttcctcgcttatctgggttatctttccggctatcagcacattaatgagtgcatggaagatgagcacttccgacgcgccgcgagggcgctgatgctggaagagcaggcgccgacgctgaacgtgacgggggtggatctcacccgctatgccgatatgctgattgcgcgctacagcaacacgggactgcgtcaccgtacctggcagattgcgatggacggcagccagaaactgccgcagcgcatgctggattccgttcgctggcacctggttcaccaccatcgtttcgatctgctggcgctgggcgttgcgggctggatgcgttacgtcggcggggtggacgaacagggaaaccgtattgacgtcagcgatccgctgttgccggtcttgcagaatgcggtgatgcagagcgcggaaggcgaggcgcgggtaaaagcgctgctgggcgtggaggccattttcgggaacgaattaccgcatgagccgctgtttgtggcgcaggtaacgcaggcttacctgtcgctgctggaaaacggcgcgaaagcgacggttgcccgctatatctctgaacggtaa

SEQ ID NO: 74232 - DNA, 1545 bp, Citrobacter koseri
atgacccgtaagaacagaaaagtcaccattcccgtcagtatcggctacggcctgacggatatcatggggggcggcgcatttaccgttatcggtgcctggctgcttttcttctataccacctttgttggtctgtcgccgattgaagcggcatctattgtggcgatcgcgcgtattgtcgatgcgatcgtgagcctgtttatgggcagcttcacggaccatttctataagcattatttgggcaagaaatttggccgccgccggttcttcctgctcattggcgcgccactcatgctggtttacatcctgttatggatgaacggcatgaacttctggttctatctcgctgtgtacctggcctttgagattatcgccgctatggtactgatcccgtgggaaacgctgccgtctgagatgaccaaagacttcaatgaccgtaccaaactgtcaacgtgccgcatgttcctgtcggcatccgggacgttccttgccacctttattccgggcctgctgatcggctggctgggtgaaaacaacgcggatgcgtatctgatcaacggcgttgtatttgccgtgctgtttacggtctgtgtgtttatctcctggaaagtgacctgggaacgtgaactgacgccggaaatgctggcggaaatggaaaaagagcgtcagccgatgaccgctggcgaaaaactggcggcgtttggcaacctgttcaaagagtatgcctcaacgttaaaagtgcgcgcgtttcgtaaacatctggcgatctatctcttctcctttaccgccaaggatgtctacaacaccgtattcgtctttttctgcgtctactgcctgaatgtttcatcctcgctggcgggaacattgctatcgatgagtatcgtcggcttgccggtcacgctggcggcgggcgtggcgattattaaatatggcccttctcgcctctatgtcttctcctacagcctgatgatgctgtgcctgggcgggttcttcctggtttaccagttcccgaccgacaacaaaatcgtattgttggtgattctcgccggggtttaccaggtcgggcgctgcattctggagttcacgccgtggaacgtgttcccattcatcccggacattgacgaaatgatcacccgtcagcgccgtgaaggactgtttgccgccgtcatgacgttctcccgtaagacaacggtagctattgcgacctttgccgtgggcctgcttctgcaaagcggcggcttcgtgaaaggcagccagacgcagccgcaggaagcgatcacgaccattgccatgctgctgttcgttggtacggccgggcttctgatcattgcactgtggcaagcgctgaccttccatctgaataagcgcacgcacaaaattttcgtggacgaaattgaacgtctcaaagcggacggtcttaaacaggatgtgacgccggaagcccgccatattgtggaagacctgacgggctacagctatgactcgctctggtgtcaaagcgcgcctgaacgggtaaagcccgctgaacccacctccatactgagctga

SEQ ID NO: 74233 - DNA, 1410 bp, Citrobacter koseri
atgtccatgataaataaaagttttatgataaataacgaaccgggtcagcggttgtattctgagctggctaagacgttacctattattgactatcactgccatcttgaagcgaaagcgatttgggaaaacaaaccttttgccgatattacccagctttggctggaaggggaccattataaatggcgggcgatgcgcgccaatggcatacccgagcggaaaattaccggcgatgcctcttcagaggaaaaatttgaagcgtgggcgcaaaccgttgaggccagttttggtaatccgctgtatcactggactcatcttgaactgaaatattatttcgcgattgaggaaacgctaaacagtaagaactggcgcacgattatggcgcagtgtaatgaacaattacgtcgcgatgattttttaccgcaggcgttaattacccgttcaaatgttgaagcgctttgcacaaccgatgggccgcttgacgatctggaatatcatcagcgactggcggaaaagcgtgatttttcaacgctcgtgctgccgaccttccgtcccgatgaactgtttgaaacgcatcccgatcgtttcctgacgtttgtttcccgcctgtcgcagaaaaccggaaaaaccattaccactctgaatgagtttctcgcggcgcttgaagcgcgcgtcgattttttccacagcacgggttgccgggtgtcggatcatgggccgctggccgttcgttttcgcccgcttgatgctgccgggcaggccgcgctgttcctgcgccgactggcaggtgatgcgctgactgaagatgaacttcaggcctgggatagccttatttttgtcgccttagccaaaatgtacaaacagcgcgactgggcaatgcagattcactttggcgcgattcgcaacaacaacacgccaatgttcgaaaaaatcggcattaactgtggctttgattccattggcgatcagacgcaccttgcggaaagcctgaatggtctgctgaacgcaatggcggaaaacaacggtctgccgaaaacgatcctctataacctcaacgccagctataacgatgtggttgcctccaccatcgctaatttccagagcggtgaagatggtgtgaaatccccgctgcaatttggctccggctggtggtttaacgatacgcgacgcggcatggtgaatcagctcaatgcgcttgccgatcagggattactctctaactttattggtatgctgacggattcccgtagctttgtctcctatacccgacacgattatttccgccgaatcctctgtgatttgattggcgggtgggtcgaaagaggggaagtgccggaggacgatgcgatcctcaataacatgattcgtggcatctgcgtggataacgcccgccgctatttccgttttcgataa

SEQ ID NO: 74234 - DNA, 1065 bp, Citrobacter koseri
atgcagatgacaatgcgctggtttgggccacaggaagacaaaatcccgttggaatacattcgccaggtgccgggtgtagaaggcgtcgtcggggcgctctatgatgtcgcccctggagaagtgtggccggttgaaaaaattaaggcgctggttgagcaggcgcacgctgcgggcctgaagatggaagtcatcgaaagcgtcaatatccacgatgacatcaaaatcggcaccccggaacgcgatcgctatattgagaattacaagcagacgatccgcaacctggcgggctttggcataaaggtcatctgttataacttcatgccggtcttcgactggatgaaaacggacatgaactacgtcctgccggatggttctctgacgatggcctttgaaaaacatggcattgataagacgctggaagaggtcgtaaaagaggttctggataactccaacggtttcgcattaccgggatgggaacctgagcgcctggctaaagtgcaggaattattcgcgcgctacagtggagtggatgacgacaagctgcgggaaaacctgttttatttcctccgggagattattcccgtgtgcgaagaagtgggcgtgaaaatggccattcacccggacgatccgccgtattctattttcggccttccgcgcgtggtcaaaaaccacgccgacctggcgatgatttgcgatgccgttgactctccggcgaatggcatcaccctctgtaccggttcgatcgctgaagatccagaaaataacgtctatgaaatcctggctgaattcacgcgtcgcaagcgcctccattttgcgcacgtacgcaacattaagctgatcaaagataaagacttctacgagtcggcccacccttcgcagtacggttcgctggacatgtaccgcgtaatgcaggcgctccacgataacggctttgatggctacatccgcccggatcacggtcgctttatctggggagaaacgggacgcccaggctatggtctttacgaccgcgcgctcggcgtcacttacctgtcaggtctctgggaagcgctggagaaaaaataa

SEQ ID NO: 74235 - DNA, 255 bp, Citrobacter koseri
atgcaaaaattgatcttgatgataatcattcttgttatcatgtttattatcattttcataacggatgcgcccgctatgcataacactatggctgcaataataaaaaacaacgctccgctttctccttcaggcaccaaacgccagatagacagcaaagtattgctcggcgaagaaggctgggtactgattgagcataagggtgaacattatctgctccgccagacgcaatccgggaaactgatcctgactaaataa

SEQ ID NO: 74236 - DNA, 1983 bp, Citrobacter koseri
atgttacgcctgcaatctgcctctttgcgcccatctctgctggcgctggcaatcgttagcaccctgccaggagcggcttacgcgaccacagacgatatcaccgtcactgcgactggtaatgcgcgcagcacctttgaagcccccatgatggtgagcgttatcgatacgtccgatcccgaaaaccagaccgccagctcggcagccgatctgctgcgtcctgttccagggatcaccctgagcggaagcgggcgaaccaacggccaggatatcagtatgcgtggctatgaccgtcgcggcgtactgattctggtggacggcgttcgtcagggaaccgataccgggcacctcaacagcaccttcctcgatccggcgttgatcaaacgtattgagatcgttcgcggcccttccgcactgctgtacggcagcggcgcgctgggcggcgtgatctcttatgaaaccgccgatgcgaaagatctgcttcaggaaggccagaacagcggtttccgcgtctttggcactggcggcaccggcgatcacagtctgggaatgggcgccagcgcctttggccgaaccgataaccttgatggactggtggcgtggtccagccgcgatcgtggcgacctgcgccagggcgacggctccacggcgccaaatgatgaatcgatcaataacatgctggcaaaaggcacctggtatattaacgatgcgcaggcgctgagtgggtcattacgttactacaacaacgacgcgcaagagccgaagaacccgcaaacgattgatgcctccaccagcaacccccttgtggatcgctcgaccatccagcgcgacatgcagctctcttacaggatcgcgccgcagggcaacgactggctgaatgcagatgccaaagtgtactggtctgaagcgcgcatcaacgcccagaacgtcgataacacgggcgaatttcgcaaacaaaccaccaaaggcggaaaagttgaaaaccgcacgcgtctcttcagcgacgctttcgcctctcacctgctgacgtatggcggagagtattaccgccaggagcaaaaacccggcggcgtgacaaccggcttcccggaagcaaaaatcgacttcagctccggctggttgcaggatgaaatcacccttcgcgacctgcccgtcaccctgctgggcggcacgcgttacgacaactaccgcggcagcagcgacggctatgacgatgttgatgccgataaatggtcatcccgcgccgggttaaccgtcagcccgacggactggctgatgctgtttggctcttacgcccaggcattccgcgcgccgacaatgggtgaaatgtataacgacgcaaaacacttctccattggcagcttctacactaactactgggtgccaaaccctaacctgcgcccggaaaccaacgaaacgcaggagtacggttttggtctgcgtttcgacaatctgatgctgtccaacgatgcgctggagttcaaagccagctactttgataccaaagcaaaagattacatctccacgaccgtcgatttcgccgccgcgaccaccatgtcttacaacgtcccgaacgccaaaatctggggctgggatgtgatgacgaaatataccgctgatctgttcagcctcgacgtggcctacaaccgcacccgtgggaaagacaaggatactggagagtatatctccagcattaacccggataccgtcaccagcaagctgaatattcccgtcgcgcagagcggcttctccgttggctgggtaggaacgtttgccgatcgctcaacgcatatcagcagcgaatacagcaaacagccgggttatgccgtcaacgacttttacgttagctaccagggacagcaggcgctgaaaggcatgaccaccacgctggtgttgggtaacgccttcgataaagagtactggtcgccgcagggcatcccgcaggacgggcgcaacggcaagattttcgtgagctatcaatggtaa

SEQ ID NO: 74237 - DNA, 1029 bp, Citrobacter koseri
atgaaccactacacacgctggcttgagctaaaagaacaacatcctggtaagtacgcgcgtgacatcgctggtttactggggatcagcgaggcggagctgacgtttgcccgcgtcggtcatgacgcatggcggctgcgcggcgacacgcgtgaaattttcgcggcgctggaatccgttggcgaaacaaaatgcatctgccgcaacgagtatgcggtacacgagcaggtcggcgcattcaccaatcaacacctgagcggtcacgccgggctggtactgaacccacgcgcgctcgatctgcgcttatttttaaatcaatgggccagcgtgttccacattaaggaagcgaccgcccgcggcgagcgccagagcattcagttctttgatcatcagggcgatgcgctcctgaaggtgtatgccacagacaacaccgacaccgccgcctgggacgagcttctgcaacattttatcgtgaccgagaatgcgccgctggcgctgaaagcggctgaaacccctgttaacgaaacggctgccgatgccgtgaccgtcgacagagagtggcgcgcgatgaccgacgttcaccagttcttcacgctgctcaagcgccacaacctgacccgccagcaggcttttgaacgggtcgctgacgatctggcctgcaaggtgccgaacggcgcgctggcgcagctcctcgacgccgcccttaaagacggcaatgaaatcatggtgttcgtcggcaacagaggctgcgtgcaaattttcaccggcgtggtcgaaaaagtcgtgccgatgaaaggctggctgaatattttcaacccgacgtttacgctgcacctgctggaagagacgattgccgagacctggataacccgcaaacctaccgcggacggccacgtcaccagtctggaactctttgcacatgacggcacgcaaatcgctcagctttacggtcagcgtacggaaggcgaaccagaacagacgcagtggcgcaaacagattgaggcgctgatgccaaaagggctggcggcatga

SEQ ID NO: 74238 - DNA, 822 bp, Citrobacter koseri
atgaaaaaactgcttgccctgattgccgccctgccgctgacggttcttgccgcgaaacaggataagatcgtcgcgctcggcggagatgtcaccgagatcgtgtacgcactcggcgcacagtcttcgctggtcgcccgcgacagcaccagccagtggccgccggaggccactgccctgccggatgtggggtatctgcgccagctaaatgccgaaggtatcctcgccacgcgtcccgatcttgtgctggcaagcagccaggctcagccctcgctggtactcaaacaggtcgagcaaagtcatgttcgggtcattaccgtaccgagccgcaacgacctgcgcgtcatcgacgagaaagtgcaggtcatcgccaacgccaccgaccgggtggctgaaggcgaggcgctgcgccagacgctgaataaagagatctccgcgctgccgaccacgccgctcaataagcgggtgctgtttattcttaaccacggcggaatgagcgcgatggccgccggacagcaaacgggagcggatgccgccattcgcgcggcagggctacaaaatgcgatgcagggcgtctcccgctatcagccgctctcacaggaaggcgtgatcgccagccagcccgatctggtggtgattccccatgagggattaacggcgatgggcggcgaagagaatctctggaagttacctggactggcgcagacccctgccgggcgcaataagcaggtgttcgcggtcgatgatatggcgctgctcggttttagcgtgcgtacgcctcaggcgattcagcagctacgcgcgaaagcggagtcattgccctga

SEQ ID NO: 74239 - DNA, 993 bp, Citrobacter koseri
atgccacggcggatcacgttttctctgtatacgctggcgctgatgctggcagtggtgacggtcgtggcaagcggttttggcgcattacgcctgccgctcagcctgctctggcatgacggcgacgacgcgttacgccagatctggttcaacattcgtctgccccgggttctgctcgcgctggtgattggcggctcgctggcgctgtccgggtgcgtgatgcaggggctctttcgcaaccccctcgccgatccgggactgctcggcatcagcagcggcgcggcgttagccgttgcgctgtgggtcgtccttccgctcacgctgcctcccctgattatgctgtatgcgccgatgctggcggcattcattggcgcgctcatcgcaacggtcgttattttcctgctcagccgacagcgggacagttcgctctcccggctgctgctggtcggcatcgccattaatgcgctatgcggcgcggcggtgggcgtgttgtcgtggatcagcaatgacacgcagctacgccagctctcgctatggggaatgggcagccttggccaggcgcagtggtcaacgctgctggcggtcgcctctttgatgatcccaacggtatttctcatctggcgtcttgctggcgcgcttaacctgctgcaactgggagaggaagaggcgcattacctgggcgtcgatgtccgggttgttcagcgaatcctgctgatctgtagcgcattgctggtggcggcggctgtcgccgtcagcggcgtgatcggttttatcggtctggtcgtgccgcatctgatacggatgtggttaggggcagaccatcgtgcggtgatccccggctccgtgctggcgggcgcctttctgctgctgattgccgataccatcgcccgaacgctggttgccccggctgaaatgccggtcgggctgctgaccagtattctgggcgcgccgtggttcctgtggcttattttccgccggggaggtcagtatggctga

SEQ ID NO: 74240 - DNA, 780 bp, Citrobacter koseri
atggctgaacgttttctcgctgacagcgtcagctacgccgctgcgggcagaacaattattcgcgatatctcgctctccctgacccagggagaactgctggcattaattggccccaacggtgccgggaaatcgacgctgttaaggctgctcaccggttatctcactccggcagacgggcgttgcctgctggctggcaaaccgcttgagcaatggcctgcgcagacgctgtcccgctaccgcgcggtcatgcttcagcaaacgcgaatggggttcgactggcccgttgaggccgtaatcggcatggggcgaatgccctggacgcagcagcccgaagcggcggtgattcatcaggtgatgcagcttacggaatgtttgccgctggcgggaagacgctacgcttccttgtccggcggcgaacagcagcgcgtacagctggcgcgcgcgctggcgcagctatggtgcgacggctccccacgcggctggctttttcttgatgagcccacctccgcgctggatctgttccatcagcagcatttactgcggttgctgaaaacgctgatccgtaagggccatctgcatgtttgcatcgtgctgcacgatctcaacctggcggccctgtgggcggatcgaatcgtgttgctgcatggcggcaacatcgttgccgaaggcgcacccgccgaggttctgcaagccggtacgctaacccgctggtacggcgcggaagtccacgtcggaacacacccgacaagcggcgggccgcagatcttcctcgcgccttaa

SEQ ID NO: 74241 - DNA, 954 bp, Citrobacter koseri
atgatcgcaccaaaacagcttccctccctgcgtttaccgctggcaggactcctgatgttgacgctgctgtgggcaggtttcatcgtgcacagccattgggaagcgtttatccagtggtgtctcgccgcccagatcaccctgcaccgctatctggtcatgtatttgctgcaactcaataaccaccagtacaccagcgggctatggctgctgaccggcgcgttcttctacggcgtactgcatgcgattgggccggggcatgggaaatttatcgtcaccacatggctgagtacgacgaaagagagcctgcttgccgcgcgggtcgtgccctttattggcagcctgatgcagggcgtcagcgccatactgttcgtgtttattctggcggtcggcttcaacctggccgccggcgatctcagcaccagccgctggtacgtcgagaaaatcagcgccgtcctgattggcgcgttcgggctatttatcatctaccaggcgctaaaaaccctgcgtccaaagcccattttctcgcgtttctcccagccgcacagccacgacgaacactgtggctgcgggcatcacggcgtgggcgcagaactcaccgacggcaactggaaaacacgcctcggcgtgattctggcgacaggcgcccgcccctgtagcggggcaatcatgattttactgttctccaacgcgctcggcattgtcagttgggggattgccgccgtcatgaccatgtccttcggcacggcgctgtcgattatggggctgtcgctggcggtacgttacgcacgcaaccagacccaggcgctgtttgccgggaaccatgcccccctgcgctggctggggccggttatccgtatcatcggcgggctggcgctggtgctgtttgccctcattctgtttctgacggtgatccccatcagtgcgaacggtgattatattgcggcggggtgttaa

SEQ ID NO: 74242 - DNA, 1632 bp, Citrobacter koseri
atgaaacattctctgcaacgccgcgctggacgaaaacgccagatgaaactcggcacgaccgtgatattgatggtcagcgccgtgttgttctccgtgctgctcgtcgtccatctgatttatttctcacagatcagccacatgacgcgcgacgcgctggcagacaaagcgctggcggtcgcccgtacgctggcggactccccggaaattcgccagcgtatgaagcaaaagccgacagagagcggcattcaggcgatcgccgaggcggttcgcaaacgcaacgatatgttatttatcgtgattaccgatatgaagagcattcgctattcgcacccggaagcgcagcgaatcggccagccgtttaaaggcgacgacatcctgctggcgctacaggggcatgaaaacgtcgccatcaatcgcggttttcttgccaaagcgctgcgggttttcacgcccatttatgacgacaatcatcagcagatcggcgtcgtggcgattggccttgagctcagcagagtaacggagcagatcaacaacagccgctggagcatcatctggtcgattctgttcggcgcgctggtggggctgctgggcacttacgtgctggtgaaggtgctcaaacgcatcctgttcggcctggagccgtatgaaatttccacgctgtttgagcagcgccaggcgatgctgcaatccatcaaagagggggtggtcgccgttgacgacggcggcgaggtgacgttaatcaaccaggcggcgcaggaacttctcgattaccgcaaatcgcaggatgacgcgcacttatcctcgcttagccacgcctggtcgcaggtagtgaatctgaacgacgtgctccgcgacggtacgccgcgccgggatgaagagattaccgttaaagatcgtctgctgcttatcaacaccgttccggtacgcagcaatggaaaaatcatcggcgcgatctccacgttcagggacaaaacagaagtccgccagctcatgcagcgtctggacggaatggtcaactacgcggatgcactccgtgaacgatcccacgaatttatgaacaaattacatgtcattctgggattattgcatctgaagagttataagcagcttgaagattatattattaagacggctaataactatcaggaagagatcggctcactgttggggaaaataaagtcgcccgttatcgcaggctttttgctcagtaagattaatcgcacctccgatttagggcacagcctggtgattagcaatgaaagtcgattaccggacagccgtaatgaagatcaaatcaccgtattgattaccattctgggcaatttaattgaaaacgcgctggaggcgctaggtcaacaacccggcggtgaaatcagcgtatccttgcattatcggcatggctggctgcattgtgaagtcaacgatgacggaccgggaattgaccccgaacgcatagagcaaatttttgacaaaggcgtctcgtcaaaaggaacggagcgtggcgtcggtctggcgatagtaaaacagcaagttgagagtatcggcggcaatattaccgtcgaatcggaacccgggatcttcacacaattttttgttcaaataccctgggacggggagaggaccagcatatga

SEQ ID NO: 74243 - DNA, 720 bp, Citrobacter koseri
atgatcaatgttttaattgtcgatgacgatgcgatggtagcagagttaaaccgccgctatgttgcgcagatcgctggctttcattgctgcggcaccgcgtctacgctggagaaagcaaaagcgtttatcttcgatggcgaaaaccatattgatctgattttactggatatttacatgcagaaggagaacgggctggacctgctgcccgtcctgcacagcgccggatgcaaatgtgacgtcatcgttatctcttccgccgccgacgccaccaccatcaaagattcgctccattacggcgtggtcgattatttgatcaaaccgtttcaggcttcccgctttgaagaggcgctgaccggctggctgcaaaagaaaacggcgatggagaagcaccagtattatgaacaatcagagctggatcggctgattcacggcagtgcatccaatgagccggatacccgacgcctgcctaaagggctgacgccgcaaacgctgcgcaccctgtgtcagtggatcgatgcgcaccaggaccaggaattttcaactgacgagctggcgaatgaggtcaatatttcccgcgtttcctgccgtaaatatcttatctggctggtcaattgccatattctgtttaccagcatccattatggcgtgaccggcagaccggtttaccgttatcgtattcaggccgaacattattctttacttaagcaatattgccagtag

SEQ ID NO: 74244 - DNA, 1341 bp, Citrobacter koseri
atgttatttagtatacaacttatcataatattagtgtgtttgttttatggcgccagaaaaggcggtatcgcgctgggtttattaggcggtatcggtctggtcattctggtctttgttttccacctccagccgggtaaaccgcccgtcgacgtgatgctggtgatcatcgccgtggtcgccgcctccgccacgctacaggcctccggcggcctggatgtgatgttgcagattgccgagaagctgctgcgtcgcaaccccaaatacgtctccatcgtcgccccgtttgtaacctgcacgctgaccatcctgtgcggtacgggccatgtggtgtacaccattctgcccatcatctacgacgtcgcgattaagaacaatattcgcccggaacgtcctatggcagccagttctatcggcgcgcagatggggatcatcgccagcccggtttctgtggcggtcgtttcgctggtcgcgatgctgggtaacttcacctttaacggtaagcatctggagttccttgacctgctctccatcaccattccatcgaccctgctgggtatcctggctatcggtattttcagctggttccgtggtaaagatctggataaagacgaagagttccagaagttcatctccgtcccggaaaactaccactacgtgtatggcgacaccgccacgctgctggataaaaaactgccgaaaagcaactggctggccatgtggatcttcctgtcggccatcgccgttgtcgctctgttaggcgccttctctgaactgcgtccggtcttcggcggcaaaccgctgtcgatggtactggtcattcagatgttcatgctgctgaccggcgcgctgattattatcctgacaaaaaccaatcctgcttctatctcaaaaaatgaagtcttccgttcaggtatgatcgcgattgtggcggtgtacggtattgcctggatggcggaaaccatgttcggcgcgcacatgactgaaatcgaaagcgtgctgggcgaaatggtgaaagagtatccgtgggcctatgcgattgttctgctgctggtctccaagtttgtaaactcccaggcggcggcgctggcggcgatcgttccgttagcactggctatcggcgtagacccggcttacatcgtggcgtcagcaccagcgtgctatggctactacattctgccgacctacccgagcgatctggccgcgattcagttcgaccgttccggcaccacccacattggtcgcttcgtcattaaccacagctttattctgcccggtttgattggcgtaagcgtctcctgtgtatttggctggatcttcgccgccatgtacgggttcctgtaa

SEQ ID NO: 74245 - DNA, 1647 bp, Citrobacter koseri
atgtcgaataaagaatttatatatcaggcgcctttcccgatgggggaagacaaaacggagtattatctcctgacctccgatcacgttagcgttggcgaatttgaaggagagtcgatactgaaggttgagccacaggccctgacgctcctggcccagcaagccttccacgatgcctcctttatgctccgcccggagcaccagcaacaagtcgcctccattctccatgaccccgaagccagcgaaaacgataagtacgtcgcgctgcaatttttacgcaactccgaaattgccgctaaaggcgttctgccgacctgccaggataccggcacggcgattatcgtcggtaaaaagggccagcgcgtctggacgggcggcggcgatgaagccgcgctctccaaaggcgtgttcaacacctatatcgaagacaacctgcgctattcgcagaacgccgcgctggatatgtacaaagaggtcaacaccggcaccaacctgcccgcgcaaatcgacctctacacggttgatggcgatgaatacaagttcctctgcgtggcaaaaggcggcggctcggcgaacaaaacctatctgtatcaggaaaccaaagcgctgctgacgcccggcaagctgaaaaacttcctcgttgagaaaatgcgcactctgggcaccgcagcctgcccgccataccacatcgcgtttgtgattggcgggacatcggcggaaagcacgctgaaaaccgtgaagctggccagtacgcattattacgacggtctgccgactgaaggtaacgaacacggccaggccttccgcgatattcaactggaacaggaactgctggaagaggcgcagaagctcggcctcggcgcacagtttggcggtaaatacttcgcgcacgatatccgggtaatccgcctgccgcgtcacggcgcgtcctgcccggtcggcatgggcgtctcctgctcggctgaccgcaacatcaaagccaaaatcaaccgtgaagggatctggatcgaaaaactggaacacaatcccgcgcagtacatcccggaagccctgcgtcaggccggtgaaggcgaagtagtgaaagttgacctcaaccggccgatgaaagagatcctcgcccagctttcacagtacccggtatcaacccgcctgtcgctgagcggcaccatcatcgtcggtcgcgatatcgcccatgcgaagctgaaagagcgcatcgaatccggcgaaggtctgccgcagtacattaaagatcaccccatctactacgcaggcccggcgaaaacgccagcaggctacccgtccggctccctggggccaaccaccgcaggacgcatggactcctacgttgacctgctgcaatctcacggcggcagcatgatcatgctggcgaaaggcaaccgtagccagcaggtcaccgaggcctgccacaaatacggcggcttctatctgggcagcattggcggcccggctgcggtgctggcgcaacagagtatcaagcatctggagtgcgtggagtacccggaactggggatggaagcgatctggaaaatcgaagtggaagacttcccggcgtttatcctggtggatgacaaaggcaacgatttcttccagcagattgtcagcaaacagtgcgcaaactgcgcgaaataa

SEQ ID NO: 74246 - DNA, 1644 bp, Citrobacter koseri
atgctgaagcgcgttttaaaaagaccgaccctcggacacattacctggctgttactcctttcattctacatcgccgtctgtctgaacatcgctttctacaagcaggtgatgcaagccctgccgctggattcaatgcacaacgtgctggtgtttttatccatgccgcttgtcgcgtttagcgtcatcaatatcgtactgacgctggcgtcgttcctgtggcttaaccgcccgctggcctgcctctttattctgacgggcgccgccgcgcaatacttcatcatgacctatggcatcgtcatggaccgctccatgatcgccaacatgatggataccacaccggcagaaacgttcgcgctggtcacgccgcaaatggcgcttacgctgggattaagcggccttctggcggcggtaatcgcctgtagcatcaaaatcaaaccgacctctctgacattacgcagcggcgcgtatcgcgccctcaacgtgctggcttcgcttctgctgatcgtgctggtcgccgcctgcttctacaaagattacgcctcgctttttcgcaataacaaagagctgatcaagtctctcagcccgtcgaatagcctggtcgccagttggtcgtggtattcacatgagcaactcgccaacctgcctttggtacgcattggcgaagatgcgcatcgcaatcccgcgatgctgaaagaaaaacgacataatctgaccatcctgatcgtcggcgaaacctcgcgtggggataacttctcgctgtctggctattcacggcaaaccaacccgcgtctggcgcaggataatgtggtctacttcccgcacaccacctcctgcggcaccgcaacggcgatctcggttccctgtatgttttccggtatgccgcgtaaacactacaacgaagggctggcgcaccatcaggaagggttgctggacatcattcagcgagccggagttagcgtgctgtggaacgataacgacggcggctgtaaaggcgcctgcgatcgcgtgccgcatcaggatatgaccgcgctgaaattgccgggtcagtgcattaacggcgaatgttacgacgaagtgctctttcacgggctggaggaatacatcgataaactccagggcgacggcgtcattgtgctgcacaccatcggcagccacggcccgacctattatcaccgttatccgccgcagtttgcgcaatttaccccgacctgcgacaccaatgaaattcagacctgttcgcagcaacagttagtgaatacttacgataataccgtactgtacgtggactatattgttgataaggcaatcaatatattaaaagcgcatcaggataaattcaccaccagcctggtctatctttccgaccacggtgaatctttaggagaaaatggcgtctatttgcatgggctgccatacgccattgcgccggatacgcaaaagcatatcccgatgctcctctggctctcggaggattatcagaaacgttaccggacagacctgacatgtttgcaaaagcgggcagcccaggaggatttctcgcaggacaaccttttctcaaccatgctcggattaacgggcgtacagaccaggaactaccaggccgcagacgatattctgcaaccttgcaggaggctaactgaatga

SEQ ID NO: 74247 - DNA, 669 bp, Citrobacter koseri
atgaaaattctgattgttgaagacgatacgctgttattacaggggctgatacttgctgcacaaacggagggttacgcctgcgacggcgtttctaccgcccgggcggcggaacactgtctggagacagggcattacagcctggtcgtgctggatcttgggttgcctgatgaggacggtctgcactttctgacgcgaataagacagaaaaaatacacccttccggtattgatcctcaccgcccgcgacacgctcaacgaccgcatcaccgggctggatgtcggggcggatgattatctggtgaagccgtttgcgctggaggagttacatgcgcgtattcgcgcgctgctgcgccgtcatcacaatcagggtgaaagcgaattgaccgtcggcaatctgatgctgaatctggggcgtcgtcaggtgtggctggccgggcaagagcttatcttaacgcccaaagagtatgcgctgctgtcgcggctgatgctcaaagcaggcagcccggtacaccgtgaaatcttgtataacgacatctataactgggacaacgaaccgtcaaccaataccctggaagtgcatattcacaacctgcgcgacaaagtggggaaatcacgtatccgcacggtgcgcgggtttggttatatgctggttgccgttgaggaaaactaa

SEQ ID NO: 74248 - DNA, 1086 bp, Citrobacter koseri
gtgaaccttacgcgttttctgcacagaccgatgacccttcgtcagcgtctgatgctgaccattggctctatcctgctggtgctgcaactgatcagcaccttctggctatggcacgagagcaccgagcagattgagcttttcgagcaggcgctgctggaggacaggaataacgatcggcacatcaggcatgaggttcgcgaagcggtcgccagcctgatcgttccctccgtatttatggtcagcctgacgctgctgatctgctatcaggctgtccggcgcatcacccgcccacttgccgacctgcaaaaagagctggaagcccgcacggccgataacctgacgcctatcgacattcacagctcgacgattgaaattgaagccgttgtctcggcgcttaaccagctggtcactcgcctgacgacaacgctggagaatgaacgcctgttcaccgccgacgtcgcccacgagctacgcacgccgctggcgggcgtgcgtctgcatctggaactgctggcaaaagcgcacaacgttaacgtcacgccgttgattgcgcgtcttgatcaaatgatggacagcgtttcgcaactgctgcaattagcgcgcgtggggcagtcgttctcatccggtaattaccagtcggtgaaactgctggatgatgtgatcctgccctcttacgatgaactgaacaccatgctggaaacacgccagcagacgctgcaactgccggaaagcacagcagacgccaccgtgcgcggcgatgccacgctactgcgtatgctgttgcgtaatcttgtggaaaatgcgcaccgctacagtccgaaagggtcaaccatcaccattatcctcaataatgcggaaagcgacgcgatgatggccgtcgaagacgaagggccgggaattgatgaaagtaaatgcggggagttaagtgaagcgtttgtccgcatggacagccgctatggcggtatcgggctgggattgagcatcgtctcccgcatcacgcagctgcaccacgggcaattctttttgcaaaaccgtgtgggaacgacgggaacccgcgcgtgggtgctgttgaaaagagatcagtaa

SEQ ID NO: 74249 - DNA, 1503 bp, Citrobacter koseri
atgctgaaaaggaaaaaagtaaaaccgattacgcttcgcgatgtgaccattattgatgatggtaaactgcgtaaagcgattaccgcagcctcgctgggtaatgcgatggagtggtttgattttggtgtttatgggtttgtcgcctacgcgttaggtaaagtgtttttcccgggggctgaccccagcgtgcagatgattgccgcacttgccaccttctccgttcccttcctgattcgaccgcttggcggcttattcttcggtatgctcggcgataaatatggtcgccagaagattcttgccatcacgattgtgattatgtcgatcagtacattctgtatcgggttgatcccctcttatgcctctatcggcatctgggcgccgatactgttgctgctgtgtaagatggcgcagggcttctcggtcggcggcgaatataccggcgcgtcgatctttgtcgccgaatactcgccagaccgtaaacgcggctttatgggaagctggctggacttcggctccattgcgggcttcgtgctgggcgcgggcgtggtggtgctgatctccaccgttgtcggcgaggagaacttcctcgactggggctggcgtattccgttcttcatcgcactgccgctagggatcattggtctttatctgcgtcatgcgctggaagagaccccggccttccagcagcatgtggataagctggagcagggcgatcgcgaaggtttgcaggaagggccaaaagtctcctttaaagagattgcaaccaaacactggcgcagcctgctggcgtgtatcggtctggtgattgccaccaacgtgacctactacatgctgctcacctatatgccgagctacctgtcgcataacctgcactactcggaagaccacggcgtgctgattattatcgccatcatgatcgggatgctgtttgtgcagccggtgatggggctgctcagtgaccgtttcggtcgtcgtccgtttgtgattatgggcagtatcgcgctgtttgcgctggctattccggcctttattctgatcaacagtaatattatcggcctgatttttgccggtctgctgatgctggcggtgatcctgaactgctttaccggggtgatggcttcttctctgccagcgatgttcccgacgcacatccgttacagcgcgctggcggcggcgtttaatatctcggtgctgattgcaggtctgacgccgaccctggccgcctggctggtggaaagctcgcagaacctgatgatgccagcctattacctgatggcgattgcggtcgtcggttttattaccggtattaccatgaaagagaccgccaaccgtccgctgaaaggggcgacgccagcggcctcggatatccaggaagcgaaagaaatccttggcgagcactacgataatatcgagcagaaaatcgaagatatcgatcaggagattgaggagttgcaggctaaacgttcgcggttagtgcagcagcatccgcgtattgacgagtaa

SEQ ID NO: 74250 - DNA, 999 bp, Citrobacter koseri
atgaaaattaaagccacgattgaacgcatccctggcgggatgatgttgatccctctgctgctcggcgcaattttaaataccctggccccggataccggcgcctattttggttcatttacaaaaggtatgatcagcggcaccgtgccgattctggccgtctggttcttctgtattggcgcctcgattgatttgcgcgctaccgggacggtattacgtaaatcgggtacgctggttattactaaaatagccgtggcgtgggtggtcgcgatgattgccgcctcgtttatcccggataccggtattcaaaccggcttcttcgccggtttgtccgtactggcgatcgtctccgcaatggacatgaccaacggcggcctgtacgccagcctgatgaaccagtacggcaccaaagaagagtccggcgcgttcgtcctgatgtctctggaatctggcccgctgatgacaatggtgattctgggttccgcaggcctcgcctccttcgaaccgcatcactttgtcggcgccgtgctgccgttcctgattggcttcacattaggcaacctggaccacgacctgcgcgcgttcttcagcaaagctacgccggtgctgatcccgttcttcggctttgcgctgggtaacaccattaacctgagcgtgattgtcgataccggcctgctgggtatcctgctgggtgtcgcggttatcattattaccggtatcccgttgattatcgcagaccgcgtcattggcggcggtaacggcactgcgggcgtcgcggcctcctctgcggcaggcgctgcggtagcaaacccggtgatcatcgcgcagattaacccggcgtttgaacccgtcgccgcgtccgccacggcgctggttgccgccagcgtgattgtgacggcgattctggttccgattatcaccgccctgtatgcaaaacgtttcggcaacgtcccggcgccgggcaacgcggaggcaaacccaacggaatccctccatcactaa

SEQ ID NO: 74251 - DNA, 894 bp, Citrobacter koseri
atgacgaacgtgttactggaaggcccgggacggatgctggaatgcattcacccgaagtttatggtcgatctggttcagggagaagagccgaagcgacctggcggcaacctgcaacagcagcagcgttttcgcgaacgcctgacgcaagaaattctgagccagacgcagcttcgcgcctgggtcatggcgggcgtattcaatgagcatctgatgatgcgtcttaagctggtggaaaaactggcggggatgctcgatcctggccatctggcgctgacgcgcatttcccggcaattgacccttctgcaacagacggaaagccccagagggcaagctattcctggcatcacgcagcagttagcggcgctgagcgacgggtttgcccggcgcagcgaacataaagagaaggcgctgacccggcgtggattgacggtgcaggcgggcgaacacagcgagcagatttttacccgctggcgcgccggagcctatgacggctggtcattgccggggcgctgttttgtcgcgctggaggagttgcgctgggggccgtttggcgatgcctgtcggttgggcaatatggaagtggtcgcgatgctgaaagataatttgcgcgcgatggctaccgattatctggcgcacagtattcacgccgcgcccaccacgcgtcattattaccatcagtggcttcattcgcccgccgtggccggcgcgggggagcacaatgacatgttgagctggattggcgactggtgcgatcccgataaacatccggtgtgctggtcagtgacccagcgctggcagacggtagcgttggggatgccaaggctgtgttcggcacagcgcctggtggatgcgatgattgaggagatttttgcgccgtcccctctcgtgggctga

SEQ ID NO: 74252 - DNA, 2355 bp, Citrobacter koseri
atgtacacacagacaatatatgaattaagccaggaagcggaaagattgttgctgctttctctggaacatctccggttattgcaacaactgcctgtggcttcgctggatggtgccgctcaggaagggggggaagggaatgaaaatacccggcctcagcatgttagtgggcgtgacgtggagactcagcacggcacgctcaataatgagctacgtaaaataacgcgcctggagatggtgctggcgattgtcgggacgatgaaggctgggaagtcgacgacaattaacgccattgtcggaaccgaagtcctgcccaaccgtaatcggccgatgacggcgttaccgacgctgattcgccatacgccagggcagaaagagccggtgctgcatttttctcacgtcgcgccgattgatacgctcatgcaaacgctgcaacagcgtatgcatgcgtgcgatcgccagcatctgacccaggtgctggaaatcgataaagacatgaatgcgctgctccagcgaattgaaaagggcgtggcttttgagcgtcattacctgggcgcgcagcccatcttccactgtctgaaaagcctgaacgatctggtgcgcttgtcaaaagcgctgggggtcgattttccttttgcggcgtatgccgcgattgaacatattccggtgattgaggtggagtttgtgcatctggcggggctggagaactatccggggcaactgacgctactggatacgcccggccctaatgaagccgggcagccgcacctgcaaaagatgcttaatgaacagctggcgcgcgcttctgccgtactggcggtgatggattacacccaactgaaatccatttcggatgaagaggtgcgccaggccattgcggcggtggggaaatccgtgccgctgtacgcgctggtgaataagttcgatcagaaagaccgcaacagcgacgatgaagaacaggttcgcgcgctgatttccggcacgctgatgaatggcagcattacgcccgggcaaatttttccggtctcttccatgtggggatatctggcgaaccgcgcgcgtcacgaactgcgggtgcacgggcggttgccggatcatcaggagcagcgctgggtgcaggattttgccgaggccgcgctcggcaggcgctggcggagcgccgatcttgatgatatcgaacatattcgtcatgccgccgatctgctgtgggaagattcgctatttgaacagcccgtacagcgactgattcacgccgcttacgccaacgcctcactgtatgcgctccggtcggcgtcgcataagttattgaattacgcacagcgcgcgcgtgaatatctggattttcgctatcacgggctgacggtggcgcatgacgcgttgcaggtcaatatttcccgcgtcgaagaagatatgcgacagcttcaggtgagccaggatcgcgtgagcgatgaggtcggccatgaagttgaacggatgatggaggcggcaaacacgttcctgagccagcagcaggccgatattttgcaccgtatcgcgccgctttttcgcgaagagagcgtggtggcgtggctgccgcgcgatcccctttcccctgagcaggaggcggtggtcgagggcgaaacgctggtgctgcataacgaaaggcaggcgcaggtcgttttaagcaaaatgcgtgcgtcatgcgaagcggtattactggcggcgcaggagaacattagccgcgatctggcgctgcgcttcgaacagctcgaatcgacgctaagccgggtgttaaatgacgcgatgcggccaattgaagcgcgggtaaaagacgatctgagccaggcggggttccgggcgcgaatcagcttcccgacgtttcatgccagtatgtttaacttcaatactcaaccgttgtttagcgaggcggtcgctcaggagaacccgccggaaggcgccgcgcctcgcgcgggcggcgtgcgcgacacctttgcgcgctggctgaatcaaccgaactggggatggaatgattatgtggaagccagaacacgctatgtcattgatataacggcattgcataacactctgatccagcatgtcagccatttcttccaacaaattcataaagctttagatgcccaggtcgatgtttctgttacggcaggtatggcgaccttttttgccgatttttcgttgtgtctgtcgggattgcaggagagcttgcgcgagagtctggtgacgcgccagcaacatgaatcggttgtgaacagactgagccaacagttacagcacagtatctccgccacccggtggattcatgaagattcccgcctgttacgtgatgatatccagaccctttttgcagccgagcactcatga

SEQ ID NO: 74253 - DNA, 336 bp, Citrobacter koseri
atgtcattaccccattgcccacaatgcaactccgaatatacctacgaagataacggcatgttcatctgcccggaatgcgcccatgaatggaacgacgcagaaccggcgcaggacagcgacgagctgatcgtaaaagatgccaacggcaacctgctggcagacggcgacagcgtgaccgttgttaaagatctgaaagtaaaaggcagttcttccatgctgaaaattggcaccaaagtgaagaacatccgtctggttgaaggcgaccacaacattgattgcaagatcgatggctttggcccgatgaagctgaaatctgagttcgtgaaaaagaactga

SEQ ID NO: 74254 - DNA, 447 bp, Citrobacter koseri
atgccgttaagtccctacatctcttttgccggtcactgtgccgacgctatcgcgtactaccacaaaacattaggcgcggaactcctctataaaatcacctttggtgaaatgcccccgccagagcagggcagcgaagacggttgcccgtcaggcatgcaattccctgatacctccatcgcccacgccaacgtgcgcattgcaggcagcgatatcatgatgagcgacgccgtcgcgtcgggtaacgcgagttactccggctttacgctggtgctcgacacgcaggatgtcgccgaagggaaacgctggtttgataacctggccgcacagggacaaatcgaaatggactggcaggaaaccttctgggcgcacggtttcgggaaagtgaccgatcaatatggcgtaccgtggatgatcaatgtggtgaaacagccgcagccgacagagtaa

SEQ ID NO: 74255 - DNA, 789 bp, Citrobacter koseri
atgcaaacggttattcgcgtcgagaaactctccaaaacgttcaatcagcatcaggcgctgcatgcggttgatctgaacatctcttccggtgagatggtggctctgcttgggccttccggttccggcaaatccacccttttacgtcacttaagcggtttgattaccggcgataaagcaccgggctgccatgtcgagctgctgggccgcacggtacagcgtgagggcaaactggcgcgggacatccgcaaaagccgcgctcacaccggctacatcttccagcagttcaacctcgtgaaccgtctgaccgtactggagaacgtgctgattggcgcgctcggcagcacgccgttctggcgtacctgttttagctggttcacccaggcgcagaagcagcgcgcgttacaggcgctgacccgcgtcgggatggcgcacttcgcgcatcagcgcgtatcgacgctttccggcggacagcagcagcgcgttgctatcgccagggcattgatgcagcaggcgaaagtgatcctcgccgatgagccgatcgcctcgctggacccggagtcagcgcgcattgtgatggacaccctgcgcgacattaaccagaccgacggcatcaccgtggtcgtcacgctgcatcaggtggattacgccctgcgctactgcgaacgcattgtggcgctgcgtcaggggcatgtgttctatgacggcagcagccagcactttgataacgatcgttttgaccatctctaccgcagcatgaaccgcgtcgaacagaacgcacaggctgcttaa

SEQ ID NO: 74256 - DNA, 1017 bp, Citrobacter koseri
atgagctacaaagccgttgccgcgctggcgttcaccagcatgttcagcatcagcaccttgttaagcccggcacatgcggaagaacaggaaaaagcactgaactttggcattatttcgaccgaatcacagcaaaacctgaagccgcagtgggacccgttcctgaaggacatggaaaagaaactgggcgtcaaagtgaacgccttcttcgcgcctgactatgcgggcatcattcagggaatgcgcttcaacaaagtggatatcgcctggtacggcaacctctcggcgatggaagccgtggatcgcgctaacggtcaggtatttgcccagaccgtcgccgcagatggatcgccgggctactggagcgtgctgatcgtcaacaaagacagcccgatcaataacctggacgatctgatcgccaaacgtaaagatctcaccttcggcaatggcgatccgaactccacctctggcttcctcgtccccggttattacgtcttcgccaaaaacggcatctccgccagcgacttcaaacgcaccgttaacgccagccacgaaaccaacgcgctggccgtcgccaacaagcaggtggatgtcgcaaccaataacaccgaaaacctcgacaaactgaaaacctccgcgccagacaagctgaaagcactgaaggttgtctggaagtcgccgctgatcccgggcgatccgatcgtctggcgtaaaaatctctccgaaaccaccaaggacaaggtgtacgacttctttatgaattacggcaaaacagcggaagagaaaaccgtgctggaacgcctgggctgggcgccattccgcccctccagcgacctgcaactggtgccgattcgccagctggcgctgtttaaagaaatgcagggtgtaaaggacaacaaagggctgaacgagagcgaaaaaaccagcaaaacctccgcgattaaagcgcagctggacgatctcgaccgcctgaccgccgcgctgggcgcgatgaccagcgtcaccaaagcggtgcagtaa

SEQ ID NO: 74257 - DNA, 780 bp, Citrobacter koseri
atgcaaagcatcaccgtcgccccgccaaagcgtagctggttctcgctcctgagctgggccatccttctcgccgtcctggtcgtttcgtggaagggcgccgaaatggccccgctcacgctaattcaggattccggcaacatggcgaccttcgccgccgacttcttcccaccggacttcagccagtggcagcactatctgggcgaaatggccgtcaccctgcaaatcgccgtctggggcactgcgctggcggtcattctgtcgattccctgcggcctgatgtgcgccgataacctcgtgccgtggtggatttaccagccgatgcgtcgcctgatggacgcctgccgcgcgattaacgaaatggttttcgccatgctgttcgtggtcgccgttggtctcgggccgtttgccggggtcatggcgctgtttatccacaccaccggcgtgctctccaagctgctttccgaagcggtggaagccattgaacccggcccggttgaaggcattcgcgccaccggcgccaacaaaattgaagagatcctctacggcgtgctgccgcaggttatgccgctgctcatctcctactcgctgtaccgttttgagtccaacgtccgctccgccacggtggtcggcatggtgggcgcaggcggcatcggcgtcacgctgtgggaagcgattcgcggctttcagttcccgcagacctgcgccctgatggtgttaatcatcattaccgtcagcctgctggatttcctctcccagcgtttgcgtaagcactttatctga

SEQ ID NO: 74258 - DNA, 732 bp, Citrobacter koseri
atggctatgcacttgtctacacatccgaccagttacccaacgcgctatcaggagattgccgcgagacttgagcaggagcttcgccagcattaccgctgcggcgattaccttccggcggaacatcagcttgccgcccgctatgaggtgaaccgccacacgctgcgccgcgccatcgaccagctcgtggagcgcggttgggtgcagcgtcgccagggcgtcggcgtgctggtgctgatgcgcccgttcgattacccgctcaatgcccaggcgcgctttagccagaatctactggaacaaggcagtcatcccaccagcgaaaaactgctggcggtgctgcgcccggcatccagccacatcgccgatgcgctgagcgtcaaagagggcgataacgtcatccacctgcgcaccctgcgccgggtaaatggcatcgccctgtgcctgatcgaccattacttttccgacctcgccctctggccgctgttgcagggctttaaccacggttcgctgcatgactacctgcgcgagcagtgcgatctggcgctacagcgcacccagacgcgcatcagcgcccgccgtgcgcaggccaaagagagcaaggtgctggaaattcccaatatggcgccgctgctgtgcgtgcgcacgctgaaccaccgtgatggcgaggaaaacgcgacggagtactccgtcagcctgacccgcgccgacatgatcgaattcactatggagcactga

SEQ ID NO: 74259 - DNA, 453 bp, Citrobacter koseri
atgcacttcgataccgccactcgccagcgctggatgcgcgcgctggcttacagcaacgccgacgcgcttaacgtgaaaatgcaggcgctgaaactcacgccggaatatgaactgattcgcgccccggaaaccggactgatgcagattcaggcccgcatgggcggcaccggcaaccgctttttcgccggagataccacgctgacccgtgcggtggtgcgtcttaagagcggcacgctgggctacagctacctgctggggcgcaacaaacaccacgccgagcagtgcgccgtcatcgacgcgctgttgcaggagcacactcacttccagaccttaatggaaaccttaattgccccgctggaggcggaacgcgacgcacacattaccgctcgccgcgccgaagtaaacgccagccgggtcgacttctttacgctggtacgcggagataacgcatga

SEQ ID NO: 74260 - DNA, 585 bp, Citrobacter koseri
atgaccctacaaaccgcctttaccctgcccgttcaggacgcgcaacagagttttcgtcgcctgctgaaggcgatgagcgagccgggggtgattgtcgccctgcatcaactgaagcacggctggcagccgctgaatctggccaccaccagcgtattgctcactctggtcgacggcgacaccccggtatggctcgcgccgtccatcaacaacgacattgccagtcagaacctgcgctttcacaccagcgcgccgctggttgaacagccgcagcaggccgcctttgccgtcgccgatgaacgcatcagcagcgagcagctaaacgccctttccgccggaagcgccgtcgcgccggaaaccagcgccaccctgatcgtccaggtcgccagcctgagcggtggacgtatgctgcgcctgaccggggcgggtatcgccgaagaacgcatgattgccccgcagctgccggagtgcctcatccatgaactgactgagcgcccgcacccgttcccgctgggggtcgatctcatcctcacctgcggcgagcgactgctggcgattccgcgaaccacccatgtggaggtgtgctga

SEQ ID NO: 74261 - DNA, 1068 bp, Citrobacter koseri
atgtacgtagccgtcaaagggggcgaaaaggcgatagccaacgcccacgcgttgcaggaaaaccgacgccggggcgacgacactctcgccgaactgagcgtggcgcaaatcgagcaacagttgaacctggccgtggatcgcgtgatgaccgaaggaggcatcgccgaccgtgaactggccgcgctcgccttaaaacaggccagcggcgataacatcgaagccatcttcctgctgcgcgcgtaccgcaccacgctggcaaagctggcggtcagtgagccgctgaacaccgcagagatgcgtttagagcgccgtatttccgccgtctacaaggatattcccggcgggcagctgctggggccgacctacgattacacccatcgcctgctcgattttaccctgctggcgaacggcgaaacgccgccgttgcgtaccgctgacgccatgcaggacgccgcgccgcacgttttttctctgctggcgaaccaggggctggcgaagcgtgaagaagacagcggcgccgtgccggatgacatcacccgcacgccgccggtttacccttgttcgcgctcctcacgcctgcaacagctgatgcgcggcgacgaagggtatctgctggcgctggcgtattccacgcaacgcggctacggacgcaaccacccgtttgccggtgagatccgcagcggctacgtcgggctggaaacggtgccggaggagctgggatttgccgtgaacgtcggcgaactgctgatgacggaatgcgaaatggtcaacggctttgtcgcaccggaaaacgacgcgccgcactttacccgcggctacggactggtgttcggcatgagcgaacgtaaagcaatggcgatggcgctggtggaaagagccctacaggcacccgaatacgatgaaacggtcacgggcccggcgcaggacgaagagttcgtgctggcgcatgcggataacgtcgaggcggcgggttttgtttcgcacctcaaactcccccactacgtcgatttccaggctgaactggaactgctcaaacgcctgcaacaggaggccgcccgtgacgactaa

SEQ ID NO: 74262 - DNA, 849 bp, Citrobacter koseri
gtgacgactaacctctccggctacaactttgcttatctcgacgagcaaaccaaacgcatgatccgccgcgctattttaaaagcggtggcgatccccggttatcaggtgccgttcggcgggcgtgaaatgccgatgccctacggctggggaacgggcggcattcagcttaccgccagcgtgattggcgagccggacattctgaaagtgatcgaccagggggcggatgacaccaccaacgccgtgtcgatccgcaacttctttaagcgcgtaaccggcgtgaacaccaccgaacgcaccgaagacgcgacgctgatccagacccgccatcggatcccggaaacgccgctgaccgaagatcagatcattatcttccaggtgccgatccctgaaccgctgcgttttatcgaaccgcgcgaaaccgaaacccgcaccatgcacgcactggaagagtacggcgtcatgcaggtgaagctgtacgaagatatcgcccgcttcggccatatcgccaccacctacgcctacccggtgaaggtcaatgaccgctacgtcatggacccgtcgccgatcccgaaattcgacaacccgaagatgaatatgatgcccgcgctgcaactgttcggcgcggggcgcgaaaaacgcatctatgccgtgccgccctggacccgcgtggaaagcctcgatttcgacgatcacccgttcaccgtacaaacctgggatgagccctgcgccatctgcggttcaacgcacagctatctcgacgaagtggtgctggatgacagcggcaaacggatgtttgtctgctccgacaccgattattgccgccaacagagcgaggcactcagcaaatga

SEQ ID NO: 74263 - DNA, 759 bp, Citrobacter koseri
atgacgcaaccgctgctttcagtcaataatctgacccatctctacgcgccgggcaaaggcttcagcgatgtttcttttgacctgtggcctggtgaagtgctgggcattgtcggggagtccggttccggcaaaaccaccctgctgaaatccatctcctcgcgcctgacgccgcagtccggcgatattttgtaccagaaccgttcactgtacggcatgagcgaagccgaccgccgccgcctgctgcgcacagaatggggcgtggtgcatcagcatccgatggacggactgcgccgccaggtctcggcgggcggcaatatcggcgaacgcctgatggccaccggcgcgcgtcactatggtgaaattcgcgccacggcgaagcgctggctggaggaggtggaaattccggcctcgcgcatcgacgacctgccgaccaccttttccggcgggatgcagcagcgtttgcagatcgcccgcaacctggtcactcacccgaagctggtgtttatggacgaacccaccggcgggctggacgtttccgtacaggcaaagctgctggacctgctgcgcggcctggtggtggaactggatctggctgtggtgattgtcacccacgatttgggcgtggcgcgcctgttagcagaccgtctgctggtgatgaagcagggtcaggtggtggaaagtggattaaccgaccgcgtgctcgacgatccgcatcatccgtatacccagttgctggtgtcgtcggtattgcagaactga

SEQ ID NO: 74264 - DNA, 681 bp, Citrobacter koseri
atgattcgcgtagaaaacgtcagtaaaacctttgtgctgcaccagcaaaatggcgtgcgcctgccggtgctgcaaaacgcctctctggaggtacaaaacggtgaatgcgtggtgctgcacggccactccgggagcggtaaatcgacgctgttgcgctcgctatatgccaactatctgccggacgaagggcacatccacattcgtcatagcgatgagtggatcgatctggtgcaggccccggcgcgcaaggtgctggaagtgcgtcgttcgacgatcggctgggtgagccagtttctgcgcgtgatcccccggatctccgtgctggatgtggtgatgcagccgctgctggatctgggcgtcgcccgcgaaacgtgcgccgcgaaagccgcgaacctgctgacgcgcctgaacgtcccggaacggctatggcatctcgcgccctccaccttttccggcggcgagcagcagcgcgtgaatatcgcgcgcgggtttatcgtcgattacccgatcctgctgcttgatgaacccaccgcctcactggacgccaaaaacagcgccgccgtggtcgcgctgattgaagaagccaaagcgcgcggcgcggcgattgtcggcatttttcacgatcaaaccgtacgcgatcgcgtagcggatcgtttgcatctgatgggaaccacatcatga

SEQ ID NO: 74265 - DNA, 1137 bp, Citrobacter koseri
atgattatcaacaacgtaaagctggtgctggaagacgaagtggtgcagggatcgctggaaatgcaggatgggattatccgcgcctttgcggaaagtcagagccgtcaccccgaggcgctggatggcgaaggcggctggctgctgccgggtttaattgagctgcataccgataatctcgacaaattcttcaccccacgcccgaaggtggactggcccgctcattccgccatgagcagccacgacgcgctgatggtcgccagcggtatcaccaccgtgctggatgccgttgcgattggcgatgtccgcgacggcggcgatcgcctggaaaatctggaaaagatgatcaatgccgtcgaagagacgcagaaacgcggcgttaaccgcgccgaacaccgtctgcatctgcgctgtgaattgccccattacaccaccctgccgctgttcgaaaagctggtggatcgcgagccggtaacgctggtctcgctgatggatcactcgccgggtcagcgccagttcgctaaccgcgagaagtaccgtgaatactatcagggcaaatattcactcaatgatgagcagatggcccactacgaagaggaacagcttcagcttgcggcgcgctggtcgcagccgaaccgcgccgccatcgcgcagatgtgccgcgaacgtcatctcgcgctggcgagccacgatgacgcaacgcacgctcatgtactggaatcgcatcagcttggcagcgtgatcgccgaatttcccaccacgttcgaggcggcagaggcgtcacgcaagcatgggatgaacgtactgatgggcgcgcccaacatcgtgcgcggtggttcgcactccggcaacgtggcggcgcataagctggcagaactggggttgctggatatcctctcctccgactattaccccgccagcctgctcgacgcggcattccgcgtggcggacgacgaggccaacacatttacgctgccgcaggcaatgcacctggtgacccgcaacccggcgcgcgcgctgaatctcgacgatcgcggcatcatcgccgaaggcaggcgcgccgacctggtgctggcgcaccgtaaaggcgatcacattcatatcgaccacgtctggcgtcagggtaaaagggtgttctga

SEQ ID NO: 74266 - DNA, 555 bp, Citrobacter koseri
atgggaaaactgatctggctgatggggccgtccggctccggtaaggacagtttgctggcggcgctccgccagcgggaacatacgcagttgctggttgcgcaccgctatatcacgcgtgcggctaacgcgggcaacgagaaccatattgcgctgagcgagcaggagtttttcactcgggcagggcaaaatttactggcgctgagctggcacgctaatggcctgtactatggcgttggcgtggagatcgatctgtggctgcacgccggttttgacgtggtggttaacggctcacgcgcccatctgccgcaggcgcaggcccgctacggcaaagcgctgctgcccatctgcttacaggtctctcccgatattttgcgccagcgtctacaggcgcgcgggcgtgaaagcgaaaccgagattgccgctcgcctggcgcgcgcggcccgttacgccccttttaactgtcatatcctcaataatgacggaagtttgctacagtcagtcgataccttattaacgttaatgggccgccaggagaaaagccatgcctgtctgtga

SEQ ID NO: 74267 - DNA, 435 bp, Citrobacter koseri
atgcctgtctgtgaactacgccgggccacgccggacgataccgacgcggtgtatcaactgatctgcgaactgaaacaagcggagttcgatcgccaggcctttcgcgccgggtttgcctcaaatttgcaggatcgcacgatacgctaccagctggcgctgcgcgacgggcaggtagtcgggatgatcggcctgcatatgcagtaccacctgcatcacgctaactggatcggggagatccaggaactggtggtgatgccgcaggcgcgaggtctgaaagtcggcagccgcttgctggcatgggcggaagaagaagcccgccaggccggcgcggagatgacggagctgtccaccagcgtgaaacgccatgatgcgcaccggttttatctgcgcgaagggtatgcgcaaagccattttcgttttaccaaagcgctttga

SEQ ID NO: 74268 - DNA, 759 bp, Citrobacter koseri
atgagcctgacgattacgctaacaggaaccggcggcgcacagggcgtgccagcatacggctgcgattgtctcgcctgccgtcgggcacgcttacaggagcagtatcgccgccgcccctgtagcggcgtcgtcaaattcaatgacgcggtaacgctgcttgatgcgggcctgcacgatcttaccgatcgctggcccgccggatcttttcagcagtttctgctcacgcattatcatatggatcatgttcaggggctgttccccctgcgctggggcgtgggcgccgcgattccggtttatggcccgccggatgaacagggctgcgacgatctgtttaaacatcccggcatccttgatttcagccacaccgtcgaaccgtttgtggtcttcgatctccagggattacaggtaacgccgctgccgcttaaccattcaaaactgacgtttggctatctgctggaatctgcgcacagccgcgtcgcgtggctgtcggacaccgcagcgctgccggataagacagtaaaatttctgctgaataaccagccgcaaacgatcgtcatcgactgtagtcacgcgccacgcgcggaagcaccgcgtaatcactgcgatgtaaacacggttatcgcgctcaatgaggtgattcactgcccacgggtcattctcacccacatcagccactcgttcgacgtatggctgatggataaccccctgccgggcggcattgaagccggatatgacgggatggagattgtgctggagtag

SEQ ID NO: 74269 - DNA, 333 bp, Citrobacter koseri
atgaaacgctattctacgctcattgctctgggcctgttgtcgctgacgacgcttcctgcgcatgccgatattgttgatgacaccatcggtaatattcagcaggcgatcaatgacgcgtataaatctgacaacgggcgggattatgaggatgaccgccgtgatgaagagtggcagcgccagatgagcgacgatcgccgcagacaatatgacgacagacgccgtcagtttgaagatcggcgtcgccagttggacgatcgccagcgccagctcgatcaagaacgtcgtcagctggaagatgaagagcgtagaatggaagacgagtacgatcgttaa

SEQ ID NO: 74270 - DNA, 450 bp, Citrobacter koseri
atgaaaaagatagcatttggctgtgatcacgttggttttatcctgaaacaggatattttgacgcacttaacccagcgcggtattacggtgattgataagggaacctggtcgccggagcgcacggattacccgcattatgccagcgaggtggcacaagccgttgtctctggcgaggttgatggcggtattctggtgtgtggcaccggtgtggggatttcgataacggcaaacaagtttgccggagtccgcgccgtcgtttgcagcgaaccctattcggcacagctttcgcgccagcataatgataccaacgtgctggcttttggctcgcgggttgttgggctggagctggcaaaaatgatcgtggatgcctggctggatgcggggtttgaaggggggcgccatcaaaagcgcgtggaggcgattatggcgatagaacagcagggcaaatga

SEQ ID NO: 74271 - DNA, 891 bp, Citrobacter koseri
atgagtcagtcagaatttgattcagggcttccaaacggcatcgggcttgcgccttacctgcgcatgaagcaggaaggcatgacggagaacgagagccgtatcgtcgagtggttactcaagccgggtaatctcagtagcgcgccagccattaaagatgtcgcagaggcgctggcggtatctgaagccatgattgttaaggtatcgaaactgctgggattcagcgggtttcgcaacttacgcagcgcgctggaagactatttttctcagtctgagcaggtattgcctgccgaactggcctttgatgaagcgccgcaggatgtggtgaataaggtattcaacattaccttgcgcaccattatggaaggtcagtcaatcgtcaacgtggatgagattcatcgcgccgcacgcttcttttatcaggcgaagcagcgtgatttgtatggcgctggcgggtcgaatgccatctgcgcggacgtacagcataagttcttacgcatcggcgtgcgctgccagacttacccggacgcgcacatcatgatgatgtccgcatcgctattaaaagaaggcgatgtcgtgttggtggtgacccattccgggcgcaccagtgatgtaaaagccgcagttgaactggcgaaaaagaatggtgccaaaattatctgtatcacccacagctaccattcacctatcgccaaattggctgactatattatttgttcgccagcaccagaaacaccgttattagggcgtaatgcttccgcacgcatattacaactcactctactggatgcattttttgtttccgtcgcccaactgaatatcgaacaggcaaccattaatatgcaaaaaactggcgcaattgttgatttcttttcaccaggcgcgctgaaataa

SEQ ID NO: 74272 - DNA, 936 bp, Citrobacter koseri
atgaataaatatctgaaatatttcagcggtgcggctatgggcttaatgttgtccaccagcgcatttgccgccgccgaatatgccgtagtattaaaaacattatccaatccattctgggtggatatgaaaaaaggtattgaagatgaagcaaaaacgctgggcgtcagcgtcgatatttttgcctcaccttcggaaggcgactttcagtctcagttgcagctattcgaagatctcagcaataaaaattacaaaggtatcgcctttgcgccattatcctcagtaaacctggtgatgcccgtcgcccacgcgtggaagaaagggatttatctggtcaatctcgatgaaaaaatcgatatggataacctgaaaaaagcgggcggtaacgtcgaagggtttgtcactaccgataacgtcgccgtgggtgccaaaggcgcggagttcattattgagaaactgggcgccgagggcggtgaagtcgccattattgaaggtaaagccggtaacgcctccggcgaggcgcgccgcaatggcgcaaccgaggctttcaaaaaggcaagccaaatcaagttggtcgccagccaacccgcagactgggaccgaatcaaagcgttagacgttgccaccaacgtgctgcaacgcaacccgaatatcaaagcgatttattgtgctaacgacaccatggcgatgggcgtcgcccaggccgtggctaacgccgggaaaagcggaaaagtgctggtagtgggtacagacggtatcccggaagcccgcaaaatggtggaggccggacagatgacggcgaccatcgctcagaaccctgcggatatcggcgcgacagggctcaggctgatggttgatgccgcgaaatcaggcaacgtgatcccgctggataaagcgccggaatttaagctggtcgactccatcctggtcgcaaagtaa

SEQ ID NO: 74273 - DNA, 1533 bp, Citrobacter koseri
atggtcacgccatatatctcgatggcggggatcggcaaatcctttggtccggttcacgcattaaaatcggttgatttaacggtttatccttatgaaatacacgcattattaggagaaaatggcgccggtaaatcaacgttgatgaaggttctgtcgggaatacatgaaccgaccaaaggcaccattacgattaataacgttaattacgacaagctggatcataaattagcggcacaactcggcattggcattatttatcaggaactcagcgtgattgatgaattaaccgtgctggagaatttatatattggtcgtcatctgacgaaaaaagtctgtggcgtcaatatgattgactggaaagagatgcgcgtacgggccgccatgatgttgctgcgcgtcggtttaaaagtcgatttagacgaaaaggtggcgaacttatccatcagccataagcaaatgctggaaatcgccaagacgctgatgctcaacgccaaagtgatcatcatggacgaacccacctcctcgctcaccaataaagaggtggactacctgtttctgatcatgaaccagctacgcaaagagggcaccgccatcgtctacatctcgcataagctggcggaaattcgccgcatctgcgaccgctatacggtgatgaaagacggcagcagcgtttgcagcgggatggtgagcgacgtcagcaacgacgatatcgtccgcctgatggttggtcgcgaactgcaaaaccgctttaacgccatgaaagagagcaccggcaacatcgagcgcgatacggtattcgaggtgaaaaacgtcaccagccgcgacaagaaaaaggttcgcgatatctcctttagcgtcagccggggcgaaattttaggcttcgccggactggtcggctccgggcgcaccgagctgatggattgcctgttcggcgtcgataaacgcgcaagcggcgagatccgtctgaacgggaaaaccatctccccgcgctcacccctggatgcggtgaaaaaagggatggcttacatcaccgaaagccgccgggataacggcttcttccccaatttctctatcgcccagaacatggcgatcggccgcagcctgaaaagcggcggctttaagggggcgatgggcctgttccacgaaggcgacgagcagcgtaccgccgaagcgcagcgcgaactgctggcgctgaagtgtcattccgttaaccagaacatcaccgaactctccggcggaaaccagcagaaggtgctgatttccaaatggttgtgctgtagcccggaggtgatcattttcgacgagccgacccgtggtatcgacgtcggtgcgaaagccgaaatttataaagtgatgcgccagttggcggacgacggaaaagtcatcctgatggtgtcatctgaacttcctgaaattatcgccgtctgcgaccgcatcgccgtgttctgcgaaggacgactgacgcaaatcctgaccaatcgcgatgacatgagcgaagaggagattatggcatgggcattaccacaagagtaa

SEQ ID NO: 74274 - DNA, 981 bp, Citrobacter koseri
atgggcattaccacaagagtaaaaggtgacgtgaacgggaagaaaccgttcaactttgcgctgttctgggataaatacggcaccttcttcatcctggcgattatcgtcgccatcttcggttcgctgtcgtcagaatattttctgaccaccaacaacatcacccagatttttgtccagagttcggtaacggtgctgatcggcatgggtgaattttttgccatcctggtcgccggtatcgacctgtccgtcggggcgattctggcgttgtccgggatggtgacggccaaactgatgctggcaggcgtcgatccgttctttgcggcgctgattggcggcgtgctggtcggcggtgcgctgggggcgattaacggctgcctggtgaactggaccggcctgcatccgttcattatcacccttggcactaacgcgattttccgtggtatcacgctggtgatttccgacgccaactcggtatacggcttctcattcgacttcgtgaacttcttcgccgccagcgtgttaggtgttcccgtaccggtcatcttctcgctgattgtcgcggtgatcctctggttcctcactacccgcatgcggcttgggcgcaacatctacgcgctcggcggcaacaaaaactcggcgttctattccgggattgacgtgaagtttcacatcctggtggtgtttatcatctccggcatttgcgcgggactggcgggcgtggtttctactgcgcgactcggcgccgcagaacccttagccggaatggggtttgaaacctacgccatcgccagcgccatcattggcggcaccagcttcttcggcggcaaggggcgcatcttctcggtggtaattggcggcttaatcatcggcaccatcaacaacggtctgaatattttgcaggtacaaacctattaccaactggtggtgatgggcggattaattatcgcggctgtcgcccttgaccgtcttatcagtaagtaa

SEQ ID NO: 74275 - DNA, 696 bp, Citrobacter koseri
atgaaaatctctccctctttaatgtgtatggatctgctgaagtttaaagaacagatcgaatttatcgacagccatgcagactattttcatattgatattatggatggccactttgtgccgaatctgacgctgtcccccttcttcgtcagccaggtcaagaaactggcgagcaaacctcttgattgtcatctgatggtgacgcgtccgcaggattatattggtcaactggcgcgcgccggtgcggatttcatcacgctgcacccggaaaccatcaacggtcaggcgttccgtctgattgacgaaatccgccgccacggtataaaagtgggcctgattctcaacccggaaacaccggttgaggcgatgaaatactatatccataaggctgataaagtgacggtgatgaccgtcgatcccggctttgccgggcagccgttcatcccggaaatgctggataaaatcgccgagctgaaagcctggcgcgagcgtgaagggctgcattacgaaattgaagtggatggctcctgcaatcaggccacctacgaaaaattaatggcggcaggcgcggatgtctttatcgtcggcacctccgggctgtttaaccacgcggagaatatcgacgacgcatggcaagtgatgacggcgcagatcctgacggcgaaaaacgaggtactgcctcatgcaaaaacagcatag

SEQ ID NO: 74276 - DNA, 915 bp, Citrobacter koseri
atgcaaaaacagcatagcgttgtggcgggtgtggatatgggggcaacccatatccgtttttgcctgcaaacggcaagcggtgagactctgcactgtgagaaacagcgtacggcggaggtgatcgcgtccggcgtggtggccggtattgcgcagatgattagcgaacagattgcacgctacgaggcgcgctgtcgtggtctggtgatgggatttccggcgctggtcggcaaagacaaccgcaccatcatttcgacacccaatttgccgctgcaacctgaagaagtgcatgacctcgcgggaaaactggaggatgcgctgggctgcccggtcgcgttttcccgcgacgtgaacttacagctgtcgtatgacgtcgtggaaaaccatctcacacagcagcaggtgctggccgcctacctcggcacgggaatgggcttcgcggtgtggatgaacggcgcgccctggaccggggcacatggcgtggcgggcgaactggggcacattccccagggcgacatgacgcagacctgtgcctgcggcaatccaggttgcctcgaaacggtctgttccgggctggcgctgaaacgctggtacgaacaacagccacgggatttcgcgctggacgcactgtttgtccacgccggagaggcgccattcgtccaggcgctgctggaaagcgccgcccgcgcgattgccaccagcataaatctgttcgatcccgatgcggtgattttgggcggcggcgtgatggatatgcaggctttcccgcgcgaacaattaattaccctgatccaaaaatacctgcgccgaccgttgccgtatcaggccgtacgttttattgccgcctcgtcctccgcgtttaacggcgcgcagggcgcggcaacgctggcgcgctgccgttttctgtcatcgcggtga

SEQ ID NO: 74277 - DNA, 2271 bp, Citrobacter koseri
atgccgcagcacagacgtcactttttcgccagtgcgcgcgggcgactgctgttttttaatctgctggtagtggcggtgacgctgatggtgagcggcgtggcggtgctgggttttcagcatgcgagtcaaatacaggagcaggtgcagcagcaaaccgtcgatgacatgaccggcagtatgaacctggcgcgcgatacggcgaacgtggcgacggcagcggtgcggctgtcgcaggtggtcggcgcgctggagtacaagggcgaagcggagcggttgcaggagactcagcgggcgctcaggcattcactcgaacagctggcgaccgccccgctggcacagcaggaaccggggctggtggcccgcattattcaacgcagcaacgagttgcagaccagcgtggcgggcatgttgcagcgcgggcagcggcggcatctggaacgtaatacactgctgagttcgctgtatcagaatcagagttacctgcgtcatctgcaacagcttgatgcggcgcaggatgcggcgttgttcagtcaaatggatcgcctgattagcgccgccatcgaaacgccgacgccgcgcgccgtcattaaacagctggatggcgtgatgcgcgccctgcctgagcaacatgccgatccgctggtgaacgtgattctgtctgactttaaccaggagttacgcaaacttgaaccgctctcggcggcgctggagcaaagcgacctggccatcagctggtacatgttccacatcaaagcgctggtggcgattttaaacagcgacatcaatcagtatgcggcgcaggtggcgatcatctcagaacagcgggtggcgcaaagccatcaggaattgcgctccggcgcgttgtttatcatgaccttcgccctgctggcggtggtgattaccggctttgccgggtggtatatctaccgcaacctcggttctaacctgacggcgatttcgcgcgccatgacccggctggcgcacggcgaatcggatgtcagcgtccctgccttgcagcggcgggacgagctgggggagctggcgcgcgcgtttaacgtttttgcccgcaatacggcgtcgctggagcgcacctcccgcctgctgaaagaaaagacctcccagatggagatcgaccgaacggagcgtcaggggctggaagaggcgctgctgcacagccagaaactgaaagcggtagggcaactgacgggcgggctggcgcatgattttaacaatctgctggcggtgattatcggcagtctggaactggtcagccccgactcgccggatgcgccgcgcattacccgcgcgctgaaggccgccgagcgcggggcgctgctgacgcaacgcctgctggcgttctcccgtaaacagtcgctgcacccgcactcggtggaactgaaaacgctgctggaaaacctgagcgaactgatgcgtcactcgctaccggccacgctgacgctggagatagaagcccagtcgcccgcctgggccgcatggatagacgtcagtcaactggagaatgcgatcatcaacctggtgatgaacgcccgcgatgcgatggaagggcagacagggacgatcaaaatccgcacctggaatcagcgggttacgcgcagtgacggacgtcgtcaggatatggtggcgctggaggtgatcgatcacggctgcggtatgtcgcaggaggtgaaggcgcaggtgttcgagccgttcttcaccaccaaacagaccggcagcggcagcgggcttgggttatcgatggtttacggctttgtgcgccagtcaggcggccgtgtcgaaattgagagcgcgccggggcaggggacgacggtcagattgcagcttccccgcgccatcgcgcctgcggtggcaaacctggagccggttgcggtgcaaagtaccgccagcgacgagaaactggtgctggtactggaagatgaggcggatgttcgtcagacgttgtgcgagcagctacatctgctggggtatctgacgctggaggccgccaacggcgagcaggcgatgcagatgctggcgtcatccggcgagattgatgtgcttatcagcgacttaatgctgccaggcagcctgagcggcgtggaggtgatcaaccatgcccgcaagcattatccccgcctgacgctgctgcttatcagcgggcaggatttacgcccggcgcataaccccgcgctgccggatgtggcgctgctgcgtaaaccgtttacccgggcgcagctcgcgcaggcgctgcgggcggcgcatgtgcaggcctga

SEQ ID NO: 74278 - DNA, 1521 bp, Citrobacter koseri
atgagcaggacaccggttctggagatgcgcaatattgccaaagcgtttggcaaattttacgcgctgaaaggggtcgatctgacggtatatcccggtgaaatccacgcgctgatgggcgaaaacggcgccggtaaaagcaccctgatgaagattctcgccggtgcgtataccgccaccagcggcgagattctgatcgacggtcagccctttcatattcgtgggccgaaagatgccctgagcgcaggcatcactctgatttatcaggagatgcagcttgcgcctaaccttaccgtcgccgaaaatattttcctcggtagcgaactgtcgcgcggcggcatcgtgcagcgtaaagagatggtgttgcaggcgcaaaaggtcatcgaccggctcggcgcgcagtttaaagccagcgatcgggtaatgcggctgaccatcgccgaacagcagcaggtggagatcgcccgcgccctgcatcgcaacagccgtatcctggtgatggatgaacctaccgccgccctctcatctcgtgaaacccaccgtctgtttgagctgatcatgcgccttcgcgatgaagggatggcggttatctatatcagccaccgcatggcggaggtgtatgagctgtccgatcgcgtcagcgtcctgcgcgacggacagtacgtgggcagcctcacccgcgacaaactcaacgcgtccgaactggtgcgcatgatggtcgggcgtccgttaagcgacctgttcaacaaagaacgcgacatcccgctcggtaaaccgcgcctgaacgttcatcaccttaccgacggcggtaaagtgcagccgtgcagcctgctggtacgttccggcgaaatcgtcggcctggccgggctggtcggcgccgggcgttccgaactggcgcacctgattttcggcgtgcgtaaagccaccggcgggatgatcgaggtggatggcgagccggtggtgatccactccccgcgtgaggccattgagcacggtattggctacctcaccgaaaaccgcaaagaacaagggttgtttttagaactggcggcggcagagaacattacgatggcgacgctggagcgcgacgccaactgggggatgctgaaccgtaaaaaagcccaaagcatctccgatgacgccattcagttactcaacattcgcgtgccgcatgctcaggttcgcgccggaggtttgtccggcggcaatcagcaaaagctcctgatctcacgctgggtcgccatcggcccgcgcattctgattctggacgaaccgacgcgcggtgtggatgtcggcgcgaaaagcgagatctatcgcatcatgaacgaaatggcgcgtaagggcgtggcgatcctgatgatctccagtgaattaccggaaatcgtcggcatgagcgatcgcgtctacgtcatgcatgaaggcagcattgccggggaattgtacagccaggacattacacaggaaaacatcatgcggctggcgaccggcgtaaacgactcccaccttgaggcggtgaaatcatga

SEQ ID NO: 74279 - DNA, 996 bp, Citrobacter koseri
atgaataacccaaccactccccagcaggtggcgaagtccgcctccgcaaaaaagatgttgatgagcgatctgatgcaaacggtcggtattttaccgattttagtgctgatcgtggcggtatttggctttatcgcacctaactttttcactgaaagcaacctgctgaacatcacccgccaggcgtcgatcaacatcgtgctggcggcggggatgacgttcatcattctgaccggcggcatcgacctctccgtggggtcgattctcggcaccaccgccgtggcggcgatggtggtctctctgataccggagttcgccatgctgtcgattccggcggcgctgatgctcggcctggggctggggctgattaacggcgcgctggtggccttcgccgggctgccgccctttattgtcacgctcggcacctatacggcgctgcgcggcgcggcctacctgctggcggacggcaccacggtgatcaactccaacatcagcttcgagtggatcggcaataactatcttggcccgattccgtggctggtggttatcgccctcgcggtgatcgtgctgtgctggttcattctgcgccgcaccacgctgggcgtacatatttatgccgtgggcggcaacatgcaggcggcgcgtttaaccggcatcaaagtgtggctggtgctgctgtttgtgtacggcatgagcggcctgctgtcggggctgggcggagtaatgagcgcctcgcgtctctacagcgccaacggcaacttaggcatggggtatgagctggacgccatcgcagcggtgatcctcggcggcaccagttttgtcggcgggatcggcacgatcaccggcacgctggtgggcgcgctgatcatcgccaccctgaataacggcatgacgctgatgggcgtctcttacttctggcaactggtgatcaaaggggcggtgatcatcatagcggtgctgatcgacaaataccgtacccgacaccatcaaagtgcctag

SEQ ID NO: 74280 - DNA, 942 bp, Citrobacter koseri
atgcgtttgaaaccattagtgaccgcgctctgtgctggcgcgttactggccgcatcgccgtttgtacaggccaaagaactgaaatccatcggcgtgacggtgggcgatcttgccaacccgttcttcgtgcagataacaaaaggggcggagctggaagcgcgcaaactggccggtgatggcgtaaaagtgacgctggtctccagcggctacgatctgggtcagcaggtttcgcagatcgacaactttattgccgcgaaggtggatatgatcatccttaacgccgcagattcaaaagggatcggcccggcggtgaaacgggcgaaagacgccgggatcgtggtggtcgcagttgacgtggctgccgaaggcgcagacgccaccatcacctctgataacacccaggcgggcgaaatggcctgtaaatacattaccgatcgtctgaaaggcaaaggcaatgtggtgatcatcaacgggccgccggtttccgccgtgcagaaccgtgtcgagggctgccagaccgagttcaaacgccacccggatatcaaggtgctctcctggaaccagaacgccaaaggcagtcgcgaaggcgggctggaagtgatgaccgccctgctggctgcgaatccgaagatcgacggcgtatttgcgatcaacgatccgacggcgatcggcgccgatctggcggcaaaacaggcacagcgcaatgagttctttatcgtcggtgtggatggttcgcccgatggcgaagaggcgctgaagcgtgaaaattccctgtttgtggcgactcccgcacaagatccgcaggtgatggcggcaaaagcggtggagatcggctatgacattctacagggcaaaccggcgcctggtgaacctgtactgattccggtgacgatgatcgataaaaacaacatcggcagctacaagggctggacggtgaaataa

SEQ ID NO: 74281 - DNA, 681 bp, Citrobacter koseri
atgaaacgctccgaaataaacgagattctcggccacacgcggcaattcttttccatgcatgacgtccacctgccgcctttcgccagctttgccccatcgcaatggcgtcagcttgatgccgcctggagcgaaatattcgatctcaggctcggctgggatgttaccgcgttcggcgggacagattttgccgctcagggactgacgctgtttaccctgcgcaacggctcgcccaaaggtatgccttatgagaaatgctacgcggaaaaaatcatgcatgtgcgcgacgcgcaggttacgccgatgcatttccactggcgcaaacgtgaagacattatcaatcgcggcggcggtaatttaatcgttgagctatggaacgccgactcccgggaccagaccgacaataccgacgtcaccattgtgatagacggctgtcgacagacccatgcggcaggcagccaactgcgcctttcgccaggagaaagcatttgcctgacgccgggcctgtatcacagcttctgggcggaaaaagggtttggcgacgtgctggtcggcgaagtttcttccgtcaatgacgatgaccatgacaaccattttctccagccgatcgcccgctataacgacattgaagaagatgaaccggcgcaactggtgttgtgtaacgagtaccgcctgttctgctga

SEQ ID NO: 74282 - DNA, 861 bp, Citrobacter koseri
atgccgttgatttctcttgccgatggactcgaccatgcccgcaagcatcgctatgcgctgggggcgtttaacgttctggattcccattttttacgcgcgctgttcgccgccgccaggcaggaacgctcgccgtttatcattaacattgccgaagtccattttaagtatgtttcgctggactcgctggtcgaagcagtaaaattcgaagccgcccgacacgatattccggtggtgcttaacctcgaccacgggctgcattttgaatccgtggtgcgggcgttacgtctgggcttcagctcggtaatgtttgatggttccacgctggagtatgaggaaaacatccgccagacccgggaagtggtgaagatgtgccacgccgttggcgtgtcagtagaggcggaacttggcgcggttggcggcgatgagggcggcgcgctgtatggtcatgccgacgaatcgctgtttaccgatccgcagctggcgcgcgattttgttgaccgcaccggtattgatgccctggccgtcgccatcggcaacgctcacggcaaatataaaggcgagcccaaactcgatttcccgcgtctggacgctattcgccagcaaacggcgctgccgctggtgctgcacggcggttccggcatcagcgatgaagattttcgtcgcgccattacgctgggcattcacaaaatcaatttctacaccggtatgtcgcaggctgcgctggcggcggtggaatcacggatgactaaccgccaaccgctgtacgatgagttcgccgaactgctgctgggcattgaagaggcgatcaccgatacggtatcggaacagatgcgcatttttggcagcgcggggcagatctga

SEQ ID NO: 74283 - DNA, 993 bp, Citrobacter koseri
atggaacgtaaaggcattatcgcggcgggcaatatgctggtcgaccatgtgcaccaaatcgtacagtggccggagcgcggctggctggcggagatcacccatagcgaacgttcgacgggcggcgcgccgcttaatgtcctgctgacgctggcaaagatgcacaccggactgccgttgcaggctgtgggattaatcggccaggacgccgacggagactacattatggcgatgctggagcagtatcacgtcaatcgccagcatgtccagcgcaccacgtttgcccccacgtcgatgtcgcaggtgatgaccgatcccagcgggcagcgcacctttttccactcccccggcgctaaccgtctgttggatctgcccgcgttcgatgagcttgatgcctcgatgaagattttccacctgggctatctgctgctgctcgacagtctggatatgccggatgatgactacggcacccgcagcgcacggctgatggcgcagatgcatgaggagggctttgagacttcgctggatctggtgtcccgcaaaggcgatccgcgctatcagccgctggttttgcccgcgctacgccatctggattatctggtgatcaacgagctggaggccggagagttcagcggcctggagatccgccagcccaacggcgaaccgcatattccgcacatcgccgcagccgcccgcgaattgctggatgcaggcgtccgccagcgggtggtgattcattgcccggaaggcgcctggggcgaaacgccggatcaacctggcgtctggataccatcgcaaaagctggagcagagggagattgtcggtagcgttggtgcgggagatgcgttctgcgccggttttttgtatggctgccacgaagcatggccgctggccgagagcattaagctggcgcacgcctgcgcgcgggtcagcctgctgtgcgccaatgcgattgatggcgcgaaaacgcttgaggagttgcgaacgcttttgtag

SEQ ID NO: 74284 - DNA, 732 bp, Citrobacter koseri
atgaaaccagccatactggtcgtggatgatgacgcggcggtctgcgcattgttgcaggatgtcctgaacgagcacgtttttgcggtgacggtctgccataccgggcaggctgcgctggcgtgcgtcgaaacccagccggagattgcgctggtgttgctggatatgatgctgcccgacacgaacggtttgatggtgttgcagcaggtacagaagatcaggcctacgctgccggtggtgatgctcacggggctggggagcgagtcggatgtggtggtcgggctggagatgggcgctgatgattacatcagcaaaccgtttaacccgcgcgtggtggtggcgcgaatgaaagccgtactccgtcgggttggcgtgctgatcgccgaaggcggaagcgtgcagacgtccggcctctctttcaatggctggcatctggataccgcgcgctgtcagttgcacaatccgcagcagcaggcggtggatctcacccagggggaatacagtttgctgctggcgctggcgcaaaacgcccgtcgggtgctcagccgtgagcagttgctggaattaacgcacagcgacagcgttgaggtgtttgatcgcaccattgacgtgttgattatgcgtctgcgccgcaaaattgaaatcaatccgcatcagccgacgttgatcaaaaccctgcgcggcctcgggtatgtttttgccgccgatgtgcagcaccacgataaagccgcgtaa

SEQ ID NO: 74285 - DNA, 420 bp, Citrobacter koseri
atgaaaaaagtcgtcacggtttgcccgtattgcgcatcaggttgcaaaatcaacctggtggtcgataacggcaaaatcgtccgggcagaggcggcgcaggggaaaaccaatcagggtactctgtgtctgaagggctactatggctgggattttattaacgatacccagatcctgaccccgcgcctgaaaacccctatgatccgtcgccagcgtggcggcaaactggaatccgtttcctgggatgaagcgctgaactacgtcgccgatcgcctgagcgccatcaaagcgaagtatggcccggacgccatccagacgaccggttcgtctcgcggcacaggtaacgaaaccaactatgtaatgcaaaaattcgcgcgcgccgttattggtaccaataacgttgactgctgcgctcgcgtctga

SEQ ID NO: 74286 - DNA, 1680 bp, Citrobacter koseri
atgagtaatgcgattaacgaaattgataacaccgatttagtgttcatcttcggctataacccggcggattcccaccctatcgtggcgaatcatgtgattaacgctaaacgcaacggcgcgaaaattatcgtctgcgatccgcgcaaaattgaaaccgcgcgcattgccgacatccacatcgcgttgagaaacggctcgaatatcgcgctgctcaacgctatgggtcatgtcattattgaagaaaatctgtacgaccaggcgttcgtcgcctcccgtactgaaggctttgaagagtaccgtaagattgtcgaaggctacacgccggaatccgttgaggatatcaccggcgtgagcgcgcacgatattcgcaaggcggcgcgtatgtacgccgaagcgaaaagcgccgcaatcctgtggggcatgggcgtgacccagttctatcagggcgtggaaaccgtgcgttcgctgaccagtctcgccatgctgaccggcaaccttggtaagccaagcgtgggcgtgaacccggttcgcggccagaacaatgttcagggcgcatgcgacatgggcgcgctgccggatacctatccgggctatcagtacgtgaaagacccggctaaccgcgaaaaattcgccaaagcctggggcgtggaaagcctgccagcgcataccggctatcgcatcagcgaactgccacaccgtgctgcgcatggcgaagttcgcgcggcgtacattatgggtgaagatccgctgcaaaccgatgcggaactctctgcggtgcgcaaagggtttgaagacctggaactggtcatcgtgcaggacatctttatgaccaaaaccgcgtcggcggcggatgttattttaccgtctacgtcgtggggcgagcatgaaggggtgtttaccgctgctgaccgtggtttccagcgcttctttaaagccgttgaaccgaagtgggatctgaaaacggactggcaaatcatcagtgaaatcgccacccgtatgggctacccgatgcactacaacaacacccaggagatctgggatgagttgcgtcatctgtgcccggatttctatggggcgacttacgagaagatgggcgaactgggcttcattcagtggccttgccgcgacacgtcggatgccgatcaggggacgtcttatctcttcaaagagaagttcgacaccccgaacggcctggcgcagttcttcacctgcgactgggtcgcgccgatcgacaaactcaccgaagagtacccaatggtgctgtctacggtgcgtgaagtcggccactactcgtgtcgctcgatgaccgggaactgtgccgcgctggcggcgctggcggatgagccaggctatgcgcaaatcaacacggccgacgccgcgcgtctgggcattgaagatgaagcgctggtctgggttcattcacgtaaaggcaaaattatcacccgtgcgcaggtcagcgatcgtccgaacaaaggggcgatttacatgacctaccagtggtggattggcgcctgtaacgagctggtgacggagaacttaagcccgattaccaaaacgccggagtacaagtactgcgccgtgcgcgtcgagccgatcgccgatcagcgcgccgccgagcagtatgtgattgatgagtacagcaagttgaaaacccgtctgcgcgaaagcgcaatggggtaa

SEQ ID NO: 74287 - DNA, 669 bp, Citrobacter koseri
atgttcttaatgacattctttgcccatgccaccgatactgagcctggcagccagtatctgaaggcggcggagggcggagaccgacgcgcacagtattttcttgccgatacctggttcagttccggcgatctcagcaaagcggaatactgggcgcaaaaagccgcagacaacggtgatgcggatgcctgcgcattgctggcgcaaatcaaaatcaccaaccccgtcagtctggattatccgcaggctaaaacgctggccgaaaaggcggcacaagcgggcagcaaagccggagaaatcactctggcgcgcattctggtcaacacccaggcggggacgcctgactatccaaaagctatttcactgttgcaaaacgcctcagaaaacctggagagcgattctgccgccgatgcgcagatgctgctcgggctgatttatgccaacggcgtgggcattcctgccgatgacgataaggcgacctggtatttcaaacgcagttccgccatttcccgtaccggctactccgaatactgggccggaatgttgttcttaaacggcgaacagggctttattgagaagaataaacagaaggcgctgcactggttgaatctgagctgtacggaagggtttgataccggctgcgaagagtttgataagttaaccaacgggtga

SEQ ID NO: 74288 - DNA, 1314 bp, Citrobacter koseri
atgaaaaacttgaaaatcagcctggcctggcagattttgctggccatggtgctgggtattcttctgggcagttatctgcattatcacagcgacagccgcgaatggctggttgccaacctgctgtcaccggcgggtgatatctttatccatctaatcaaaatgatcgtcgttccgattgttatctccaccctgattgtcggtattgccggtgtcggcgatgcgaaacagttaggacgtatcggtgccaaaaccattatctatttcgaagtgatcacgaccgtcgccattatcctcggtattacactggcgaacgtgtttcaacccggttccgggattgatatgtcgcaactggcgaccgtggatatttcgaaataccaaagcacgacggcagaagtacaaagccatgcgcacggtttgatgggcacgattttgtcactggttccgaccaatattgtcgcgtcgatggcgaagggcgacatgctgccgattatcttcttctcggtgctgtttggcctgggtctgtcttccttgcctgcgactcaccgtgaaccgctggtcaccgtgttccgctccatctcagaaaccatgtttaaagtgacccacatggtgatgcgttacgcgccggtcggggtgtttgcgctgatcgccgtgaccgtggcgaactttggttttgcgtcgctgtggccgctggcgaaactggtgctgctggtacacttcgcgattctgttcttcgcgctggtggtgttgggcatcgtggcgcgtctgtgcggtctgagcgtctggattctgattcgtatcctgaaagatgaactgattctggcttactccactgccagctctgagagcgtgctgccgcgcattatcgaaaagatggaggcctatggcgctccggcgtcgatcaccagctttgtggtgccgaccgggtattccttcaaccttgatggctcaacgctgtaccagagtatcgcggcgatctttatcgcgcagctgtacggtatcgacctgtcgctgtggcaggaaatcatactggtgctgacgctgatggtcacctcgaaagggattgcgggcgtgccgggcgtttccttcgtggtgctgctggcgacgctgggtagcgtgggcattccgctggaagggctggcgtttatcgccggtgttgaccgtatcctcgatatggcgcgtaccgcgctgaacgtggtgggtaatgcgctggcggtgctggttatcgccaagtgggaacacaagtttgaccgtaagaaagcgctggcgtatgagcgcgaggtattgggcaaatttgataagaccgcgaatcagtaa

SEQ ID NO: 74289 - DNA, 702 bp, Citrobacter koseri
atgagtctgcatcaggtgagcgtactgctgctgcgtcacagccagcgccaggcgcagctacaacaggaattgcatcatgatttggcggagcctgtggcttcggacgcgccgtcgcgcccgctgccggtgaaagcgctgctggccgttgcgatcgtcatggcgatggcttgcgtcggcggctatctggcgtcgtcaaaatggcaggccgttcgccaggaacagcagcgtctggccgatccgctgcgggcgtttaccgatgaaccgacggcggaaaagcagttgctgacgttgcaggcggcgattcgcgcaaacccacaggacagcgcgcagtgggcgacgctgggcgagtactacctctggcgtaatgcctatgacaatgctctgctggcgtatcagcaggcgctgcgcctgcggggagagaacgcggagatctattcggcgctggcgacggtgcgctattaccagtccgggcagcatatgacgccggaaacgcgtgaaatgatcgataaagcgctggcgcttgatgcttcggaagtcaccgcgttaatgctgctggccgctgatgcgtttatgcaggctgattatgtgcaggccatcgcattatggcaaaaattactggatttgaactcgccaagggttaatcgcgtgcaactcattgacgctattaatatggcgaagttgttgcagaatcgtcagaaataa

SEQ ID NO: 74290 - DNA, 495 bp, Citrobacter koseri
atgagtaaattaatcaacgcgttgccggatggcggcgtacggggtgcgcaacacattgtaggccggataagcgcagcgccatccggcagaataggtttactcttggctatcattttgtttttcatcaccttcgcaacgcatgcccaggttgtggacacctggcgctttgaaaacgcgcaacagcaggaaaaatcactatttattgccagccagctgcgctgcccgcagtgccagaatcaaaacttgctggaatccaacgcgccggtagcggtcagtatgcgccatcaggtctataccatggtggcggaaggtaaaagcgaagaggaaatcaccgcctggatgaccgaacgctacggtgagtttgtcctctacaacccggcgctaaccgggcaaacgttgctgctgtgggcgctgcctttcctgctgttgctgctggtgggcgtggcgctgtggcgagtgatagcgcgtcagcgtaaagaggaggggagtaaatga

SEQ ID NO: 74291 - DNA, 1668 bp, Citrobacter koseri
gtgttgaccccacttgccacgctggtggggttgcgccagcgctggcagggcatcagacgtctggcgataatcggcgtcctggcgcaattcgcgctgttattactggcgttcgctattctggttttctgctttcttaccagcgatttttcggttgtctacgttgcacagcatagctacagcctgctgccgtggggattaaaactggcggcggtgtggggcggtcatgaaggatcgctgctgctgtgggtgctgttcctttccggctggagcgcgctgtttgcctggcgttgcaaaggcgagcgcgatgcgctctttccgctaacgctctgtattctgtcgatggtgaccgccctgctgctgctgtttgtcgtggtctggtcggacccgttcgtgcgtatctttccgcccgcgattgaggggcgcgatctcaatccgatgctgcaacacctggggctgattctccatccaccgctgctttatctgggctatggcggcctgatggtcgccgcgggcgttgcgctggcgtcattgctgcgcggcggctttagcgcggccactgcctgggtctgctggcgctgggcgctccccggctggtgcgcgctgacgctgggcatcattctcgggtcgtggtgggcgtactgcgaactgggctggggcggctggtggttctgggacccggtggaaaacgcttctttattaccctggctttccgccagcgcgctactgcacagcctgttcgtttcccgccagcgcggcatcttccgccactggtctttgctgctggcgattctgacgctgattttatccctgctgggcacgctgattgtgcgttccggcattctggtttctgtccatgcctttgcgctggataacgtgcgtgcggtgccgctgttcgcgctgtttaccgtgttgagcctggcgtcgctcgggttgtacgcgtggcgaggccagcaagtccgccagaatgcgcgttttggcagttggtcgcgtgagatgatgattctggccgcgctgctgctttttagcgccgtgctgctgattgtacttatcgggacgctctatccgatgatttacggcctgttcggctgggggcgactctccgtcggcgcgccctattttaatcgcgccacgctgccgtttgggctgctgatgctgttagttatcgtactggcgacaatcagaagccggaaagtgtctgtgcgccgccagcttccggcgctactggcgcacaccggcgtattggttgtcgccgccgggattattttctccagcggcagtcggcatgaaatcagccttaatctgcgccccggagagcaggtggaactggcaggctacacgtttcgttttgaacgtctcgatctggagtcgaaaggcaattacaccaccgagaaagcgcagatcgccattgagcaggataaacggcatatcgggcgcgtcacgccagagcggcgtttttacgcggcgcgccgtcagcagatgatggagccggggattcgctggaatctgctgcatgactggtatgcggtaatgggcgaaaaaaccgggcaggatcgctatgccatgcgcctgtatgtccagaccggcgtgcgctggatctggggcggagggctgttgatgattgcaggcgcggcgctcagcggctggcgtgggaggaagcgtgatgagtaa

SEQ ID NO: 74292 - DNA, 957 bp, Citrobacter koseri
atgacgcacgcttctgctttccattttgaatcgctggtgtgggactggcccatcgccatctatctgtttctgattggtatttctgccgggttagtgacgctggctattttgctgcgccgcattcacccggaagcgggcggggcggacagcacgatgctgcgtacgacgctggtggtggggccgggggcaattattcttggcctgctgatcctgatctttcacctgacgcgcccgtggaccttctggaaactgatgttccactacagcttcacgtcggtgatgtcgatgggcgtcatgctgttccagctctatatggtggtgctggttctgtggctggcgaaaatctttgaaaaagaggtgcttgccctgcaacagcgctggttgccgcgtctggggatggtgcaaaaagcgttgacgttgctgacgccgttccatcgcctgcttgagacggtaatgctggtgctggcggtactgctgggggcgtataccggcttcctgctgtcggcgctgaagtcctatccgttccttaataacccgatcctgccggtgctgttcctgttctcggggatctcttccggggcggcggtggcgctgattgcgatggccttgcgtcatcgcagcaatccgcacagcactgaagcgcattttgtgcatcgcatggaaacgccggtcgtctggctggaaatcttcctgctggcggcgttcttcgttgggctggcgttgggcgatgacggtaaaatgcgcgcgctgactgcggcgctgggcggcggattctggacatggtggttctggcttggcgtcgcggggctggggctgattgtgccaatgctgctgaagccctgggcgaatcgcggttcgacgtttcacggcgtgttggcggtatgtggcgccagcctgaccggtgtcctgctgctgcgctttttcattctttatgcgggacagctaacggtcgcgtga

SEQ ID NO: 74293 - DNA, 672 bp, Citrobacter koseri
atgagttgctctcgtcgccagtttatcacccgcgtcggcgcgctggtggcggtcagcggaacagcaggacgcgtggtggcgaaaacgttgaatatcaacggtgtgcgttacggcatggtgcatgatgagtcattatgcatcggctgtaccgcctgcatggatgcctgtcgggaagtgaaccaggtgccggagggcgtgtcgcgtctgacgattatccgcagcgagccgcaggggacgtttcctgacgtgaagtatcaattcttccgtcattcgtgccagcactgcgaccatgcgccctgcgttgacgtttgcccgaccggggcctcattccgcgatgccgccagcggtatcgtcgatgtgaacccggatctgtgcgtcggctgccagtattgcattgcggcgtgtccttatcgcgtacgctttatccatccggtcagcaagacggcggataagtgcgatttctgccggaaaaccaacctgaaagcgggtaagttgcccgcctgcgtcgagtcctgcccgacaaaggcgctgacgtttggcaacctggacgatcccaacagcgacatctctcgtctgctgcggcagaaaaccacctaccgctacaagctggcgctgggtacgaaaccgaaggtctaccgcgttccctttaaatttggggaggtgagccaatga

SEQ ID NO: 74294 - DNA, 567 bp, Citrobacter koseri
atgagcgtattacgttcgttattaactgctggggtgctggcgtcaggtctgttctggagcctgtgtgggataaccgctaccccaacgccgcaggactcagagcaacgctggacggtcacccagcagcgtaatccagatgctgcttgtctggattgccacaagccggataccgagggtatgcacggtaagcacgcttctgtcgttaacccgaacaacaagctgccggttacgtgcaccaactgtcacggtcagccatcgcctaaacaccgcgaaggggtgaaagatgtgatgcgctttaacgacccgatgtatacggtagagcagcagaacagcgtctgtatgtcctgccacctgcctgagcagctgcaaaaagcgttctggccgcatgatgtccatgtgaccaaagtggcgtgcgccagctgtcactcgttgcatccacagcaagacacgatgcagacgctcaatgagaaaggacggattaagatttgcgtcgattgccacagcgatcagcgcaccaatccgcactttaacccggcgtccgttcccttgcttaaggagcatccatga

SEQ ID NO: 74295 - DNA, 1437 bp, Citrobacter koseri
atggcaaggacaatattacgcgcacgccgtttcttcagcctgatattaccgttttttttcatttcctctgtatacgctgaacaaacgtccgttcccgcaaagaccgtcaccgttgaagcgaagaatgaaaccttcgcccctcagcatcccgatcaatatctctcatggaaagcgacgtcagaacagtcaacgcgtgaagatgcgctggcagaagacccacgtctggtgatcctgtgggcgggataccccttctcgcgtgactacaataagccgcgcgggcacgcttatgcggttaccgatgtgcgtgaaaccctgcgtaccggcgcaccgaaaaatgccgaagatggcccattgccgatggcctgctggagctgtaaaagcccggatgtggcgcgtctgatccagaaagatggcgaagacggctacttccacggtaaatgggcgcgcggcggcccggaaatcgtcaatgccctgggctgcgccgactgccataacaccgcctcagacgatttcgccaaaggcaaaccggcgttaacgctctcccgtccttatgccgagcgcgcgatggaaaccatcggcaaaccgtttgataaagccagtcgttttgaccagcaatctatggtgtgcgggcagtgccatgtggagtactactttgacggtaaaaacaaagccgtcaaattcccgtgggatgagggaacaaaagtcgaggatatggagaaatattatgacgccatcgccttctctgactggacaaacccgctgtcgaaaacgccaatgctgaaagcgcagcacccggaatatgaaacctggagcgtgggcattcacggcaagaacaacgtgacctgtattgattgtcacatgccgaaagtgcagaacgccgaaggcaaactctacaccgaccataagattggcaatccgtttgataacttcgcccagacctgcgccaactgccacacccaggataaagcctccctgcaaaaagtggttgctgagcgtaaacaggccattcatgacctgaaaatcaaggttgaagatcagttagtacacgcgcatttcgaagcaaaagcggcgtgggatgcgggcgcgacagaagcggaaatgaaaccgattctggacgatatccgtcatgcgcagtggcgctgggatctggcgattgcctcgcacggcatccatatgcatgccccggatgaaggtctgcgtatgctgggcggcgcgatggataaagcggcggatgcccgtaccaaactggtgcgcctgctgggcagtaaaggcatcactcatgaaatcccgttgccggatatctccaccaaagagaaagcccagaaagcgattggtttgaacatgcagcaaatcaacgccgagaagcaggacttcatcaagacggtgattccgcaatgggaagatcaggcgcgtaaaaacggtctgttaagccaataa

SEQ ID NO: 74296 - DNA, 1959 bp, Citrobacter koseri
atgagccaaatacataaacacgctattcccgcaaacattgcggatcgttgcctgataaacccggagcagtatgaggcgaaatatcaacaatctattaacgagccagataccttttggggtgaacagggaaagattctcgactggattacaccgtataaaaaagtgaagaacacctcctttgcgcccggcaacgtgtcgattaaatggtatgaagatggcacgctgaacctggcggcaaactgccttgaccgccatctgcaagaaaacggcgaccgtaccgccatcatctgggaaggcgatgacgccacccagagcaaacacatttcatatcgcgaattgcatcgcgatgtttgtcgtttcgccaatacgctgctggagctgggcattaagaaaggcgacgtcgtggctatttatatgccgatggtgccggaagcggcggtggcgatgctggcctgcgcgcgcattggcgcggtgcattcggtgatcttcggcggcttctcgccggaagcggttgccgggcgaatcatcgactccagctcacgtctggtgatcaccgccgatgaaggcgtgcgtgccggacgcggcatcccgctgaaaaagaacgtcgatgatgcgctgaaaaacccgaatgtgaacagcgttgaacatgtggtggttttaaaacgtactggcgggaaagtcgactggcatgaaggccgcgatctgtggtggagcgacgtgattgagaaatccagcgctgaccatcagccggaagagatgaatgcggaagatccgctgtttatcctctacacctccggttcaaccggcaagccaaaaggcgtgctgcataccaccggcggctatctggtctatgccgccaccacctttaagtatgtctttgactatcacccggacgatatctactggtgcaccgcagacgtaggttgggtgaccgggcacagctacctgctgtatgggccgctggcctgcggcgcaaccaccctgatgtttgaaggcgtgccaaactggccgacgcctgcgcggatggcgcaggtggtggataagcaccaggttactattctctacaccgccccaaccgctattcgcgctctgatggcggaaggcgataaggcgattgaaggcaccgatcgctcttcgctgcgcatcctcggttccgtcggcgaaccaatcaacccggaagcgtgggaatggtactggaagaagatcggtaacgaaaaatgcccggtagtggacacctggtggcagaccgaaaccggcggattcatgatcacgccgctgcccggcgcgactgaactgaaagccggttccgccacgcgtccgttctttggcgtgcagcccgcgctggtggataacgaaggccacccgcaggaaggggcgaccgaaggcaatctggtgattaccgactcctggccgggtcaggcgcgtaccctgttcggcgatcacgagcgttttgagcagacctacttctctaccttcaaaaacatgtatttcagcggcgacggcgcgcgtcgtgacgaagatggttactactggatcaccgggcgcgtcgatgacgtactgaacgtttccggccatcgtctgggcacggcggagattgaatccgcgctggtatcgcatccgaagattgccgaagccgcggtggtcggtattccacacaacatcaaaggccaggccatctacgcctatgtcacgctgaatcacggcgaagatccgtcgccggagctgtataccgaagtacgcaactgggtacgtaaagaaattggcccgctggcaacaccggacgtgctgcactggacagactcactgccgaaaacgcgttccggcaaaatcatgcgccgtattttgcgcaaaatcgcagcgggcgataccagcaatctgggcgatacctcaaccctcgccgatcctggcgtggtcgagaaactgctcgaagagaagcaggccatcgcaatgccttcataa

SEQ ID NO: 74297 - DNA, 315 bp, Citrobacter koseri
atgaatgacaatatttatcaacggatagaagacagtgcgcgtttcagggagttagtcgaaaaacggcaacggtttgccaccatcctgtcggtcatcatgctggcggtttatatcagctttattttactgatcgccttcgcgccgggctggctgggcaccccgctacacgccggcaccaatgtcacccggggtattccaattggggtgggcgtcattctgatctccttcatcctgaccggtatttacatctggcgggcgaatggtgaattcgaccgtcttaacaacgccgtactgcacgaggttaaagcatcatga

SEQ ID NO: 74298 - DNA, 1650 bp, Citrobacter koseri
atgaagagagtcctgacggcgcttgccgccacactacccttcgctgcaaacgcagcggatgccattagcggtgcagtagaacgccagccaaccaactggcaggcaatcgttatgttcctgattttcgtggtgtttacgctcggcatcacctactgggcctctaaacgcgtccgttcacgcagcgactattacacggcaggcgggaatattaccggcttccagaatgggctggcgatcgccggcgactatatgtcggcagcatcgttcctcgggatttccgctctggtgttcacctccggttatgacgggctgatctattcactcggcttcctggtgggctggcctatcattctgttcctgatcgccgagcgcttgcgtaacctgggtcgctatacctttgccgacgtcgcctcttaccgactgaaacaggggccgatccgcattctgtctgcctgtggttcgctggtggtcgtggcgctttacctcatcgcccagatggtgggggcaggtaaactgatcgaactgttgttcggtctgaactaccacattgcggtcgtgctggtgggcgttctgatgatgatgtacgtcctgttcggcggcatgctggcaacgacatgggtacagattatcaaagccgtactgctgctgttcggcgccagctttatggcgttcatggtgatgaagcacgtcggcttcagcttcaacaacctgttcaccgaagcgatggcggtacacccgaaaggttcagccattatgagccctggcggtctggtcaacgacccgatctccgcgctgtcattaggcctggggctgatgttcggtacggcaggcttaccgcacattctgatgcgtttctttaccgtcagcgatgcccgcgaagcgcgtaagagcgtgttttacgccactggctttatgggctatttctacatcctgacctttattatcggcttcggcgcgatcatgctggtaggcgctaacccggagtataaagatgccgcaggcgcgttaatcggcggcaacaacatggcggcggttcatctggcgaacgcggtaggcggcaacctgttcctcggctttatctctgcggtggccttcgcaacgatcctggcggtcgtggccggtctgacgctggcaggcgcatcggcggtatctcacgacctgtacgcgaacgtgtttcgtaaaggcgcgaccgaacgcgaagaattgcgggtatcgaaaattaccgtactggtgctgggcgtgatcgccatcattctgggcgtgctgtttgaaaaccagaatatcgccttcatggtcggcctggcgtttgccatcgcggcgagctgcaacttcccaatcatcctgctctccatgtactggtcgaagctgaccacgcgcggcgcgatgatgggcggctggttaggtctggtgacggctgtcgtgctgatggttctcggcccaacgatttgggtgcaaatcctcggccacgaaaaagccatcttcccgtatgagtatccggcgctgttctccatcagcgttgcctttatcgggatctggttcttctccgctaccgataattctgcggaaggtaatcgcgagcgtgagcagttccgcgcccagttcatccgttcccagaccgggtacggcgttgagcaaggccgcgcgcattaa

SEQ ID NO: 74299 - DNA, 690 bp, Citrobacter koseri
gtgagtaattttcagctaagcgtactgtgcctggtcatcacgctggggatctatttcgtcaataagcggctgtatcgtcgctttcgtaagctgccgttgatgccgctggtgctcacgcccgcgctgttggtattgatactggtgtttggccatatctcctggcagaactacattggcgaatcgcactggctgctgtggttgttaggcccggcgaccatcgcgtttgccgttccggtttacgataatctcgccatcattaaacgccactggatgtcgctgacggcgggcgtggtaacggcaaccgtggtggcggtcaccagttccgtctggctggcgcgcctgtttacgctgccggatgagattcagcgcagcctggccgtgcgttccgtcaccacgccatttgcgctggcggcggcagagccgctgggtggtcagccggatttagtggcgctctttgtggtggtgactggcgtgttcgggatggcggttggcgatgcgctgtttttgcgcctgtctattcgtgaaggaatggcgaaaggggccgggtttggcgcggcatcacatggggcaggtacggcgcgttcgtatgaactgggtcagcaggagggcgtcgtcgccagtctggtgatgatgctgtccggtgtgatgatggtgctggcggcgccgctggtcgcaaaagtgatgttctga

SEQ ID NO: 74300 - DNA, 411 bp, Citrobacter koseri
atggctgtggcgataagccgcgttacgcctgctgttatgcaacgactccagataccggttcaggtactgctgtatgcaggtttatttatttttgctcaatatcttgtttcatggctgcatctgccgcttcccgccaatctggttgggatggcgttgatgctggcgctgattgtctgtcgggtgatcccgcttaactgggttcgtgcgggcgcacgctggctgctggcggaaatgctgctgttctttgtccccgccgtggtggcggtcgttaattatgcgcaactgctgttgatggacggctggcgcatcttcgccgtgattgcgatcagcacgctgatggtgcttggcgcaaccgcatgggtggtggataacgtataccgctatgagatgagcagggtaaaccgtgagtaa

SEQ ID NO: 74301 - DNA, 888 bp, Citrobacter koseri
atggatatcagaacgctgcgttattttgtcgaggtggtgcgccagcagagtttcacccgcgcagcggagaagttatttgtcactcagcccaccatcagcaagatgctgaagaatctggaagatgagcttaattgcacgctgctgatccgcgatgggcgacgtctgctgctgacggataccgggcgcgtggtgttcgagcgcggcctggcgatccttgctgaatttcgccagctggaagcggagctgggcgatattaaccatctcaataaagggctgctgcggcttggcatcccgccgatggtcggcatgctgatggccgggccgattagcctgtttcgccagcgttatccgggtgtggaactgaagattgcagaatttggcggtttgacggtacagcaggcggtaatgaacggcgagctggatgtggcgatgaccgcgctgccggtggaggaagagagcgggctaacgaccttgtcgctgttcagccacccgctatgcgtgctggtgccgcgttccggtaagtggatggcgtgcgagtcgatttcccccgaagcgctggcggagcatcctctgcttatctacaacgaagattttgcgttgaatcgccagttgatgcggctttttaagcagcatgatgtgaagccgcgtattgcggtacgcagcggtcagtgggatttcctggccgctatggtgcaggccggcgtcggaattgcgattttgccggagccgatttgccaacggctggataaacaaaccctgcgctggctcccgctggagagtgatttacgctggcagttgggcatgatctggcgcgaaggcgtttatttgtcccacagcgccaaggcgtggttgacgtgttgcgaagggttttggttaacgcaggaataa

SEQ ID NO: 74302 - DNA, 495 bp, Citrobacter koseri
atgtccaactatcgtcgttattacattaatgggggaacgtggtttttcaccgttaatcttcaggatcgtaaaagcggtcttcttacgtcccatatccatgcgcttcgtcatgccatcgccagcgttaaacagcgtaaaccttttcatatcaacgcttgggttgtattacccgaacatatgcattgtgtatggacccttcctgaaaacgagcacgatttctcctctcgctggcgcgaaattaaaaaacatttctctaaatcgctgggtttgcgtcaggtctggcaacctcgattctgggaacacacgattcgggatgaatacgattatcgccagcatgttgattatagttatatcaatccggttaaacatgcctgggttaaacaggtaaaggattggcccttttcaacatttcatcgcgatgttcgccacgggatataccctgcggattgggcgggagagattaccgggcttaatgttggtgaacgtggcgattaa

SEQ ID NO: 74303 - DNA, 159 bp, Citrobacter koseri
atgagcagaggtaaattcaggaaaacggctcgcaaaattgttgcgccgccaggcaatatcgccccctgtaggcccggcaagcaaagcgccaccgggcaatttccgccccctgtaggcccggtaagcgaagcgccaccgggcgatacgggtgcttactga

SEQ ID NO: 74304 - DNA, 1647 bp, Citrobacter koseri
atggaaatcttcttcacaatactcatcatgacccttgtggtctcgctgtcgggggtatttactcgtgtattgcccttccagcttcctttacccctcatgcaaatcgccattggcgcgctgctggcatggccgacgtttggtttgcatgtggaatttgaccctgaactgttcctggtgctgtttattccgccgctgttgttcgcagatggctggaaaacgccgacccgggagtttctcgaacatgggcgagagattttcggcctggcgctggcgctggtgctggtcacggtggtcggaattggctttatgatttactggctggtgccgggtattccgctgataccggccttcgcgctggctgccgtgctgtcgccgaccgatgcggttgcgctttccggcattgtcggcgaggggcgcattccgaagaaaattatgggcatcctgcaaggcgaggcgttgatgaacgacgcgtccggcctggtgtcgttgaaatttgccgtcgctgtggcgatggggacgatggtgtttaccgtcggcggggcgacggtggagttctttaaagtcgcagtgggcggtattctggcgggctttgtcgtcagttggttatacggtcgctccctgcgtttcctgagccgttggggcggggatgagccagcgacgcaaatcgtcctgctgttcctgctgccgttcgcctcctacctgattgcggaacatatcggcgtatccggcattcttgccgctgtggcggccgggatgaccatcacccgttccggcgttatgcgccgcgcgccgctggcaatgcgtctgcgcgccaacagcacctgggcgatgctggagtttgtctttaacggcatggtctttctgctgttgggtctgcaactgccagggattctggagtcgtcgctggtggcggcggaagccgatcccaacgttgaaacctggatgctgttcaccgatatcgtgctgatttatgccgcgctgatgctggtgcgctttggctggctgtggacgatgaagaacttcagtaatcgcttcctgaagaaaaagccgatggagtttggcgcctggacgatgcgtgaagtccttatcgcctcttttgcaggggtacgcggggcgattacgctggccggtgtgctctctatcccgctattgttgccggatggtaacggcttcccggcgcgctatgagctggtattccttgcggcgggcgtgattttgttctcgctgtttgtgggggtcgtgatgctgccgattctgctgcaacatctggaagtgggcgatcactcacagcagcagaaagaggagcgaatcgcccgcgccgccacggcggaagtggcgattgtcgcgattcagaagatggaagaacgtctggcggcggataccgaagagaacatcgataaccagttgctcaccgaggtcagctcccgtgtgattggtaacctgcgtcgccgcgccgatgggcgtaacgatgtggaaagctcgatgcaggaagagaacctcgaacggcgcttccgcctggcggcgctacgctcggaacgtgcagaattgtaccacctgcgcgcgacgcgtgagatcagtaacgaaaccctgcaaaaactgctgcatgacctggatttgctggaagcattgttgatcgagaatcagtaa

SEQ ID NO: 74305 - DNA, 1350 bp, Citrobacter koseri
atgtctacgccttcagcgcgtaccggcggttcactcgacgcctggtttaaaatttcacaccgtggaagcaccgtccgtcaggaagtggttgccggattaacgactttcctggcgatggtctactccgttatcgtggttccggggatgctgggtaaagccggattcccgcctgccgccgtatttgtggcgacctgcctggtggctggcgtcggttctattgttatgggtctgtgggcgaacctgccgttggctatcggttgcgccatctcgttgaccgccttcaccgcgtttagcctggtgctgggtcagcacattagcgttccggttgcgctgggtgcggtattcctgatgggcgtgctgtttaccatcatctcggcgaccggtatccgtagctggatcctgcgcaatctgccgcatggcgtggcgcacggcaccggcatcggtatcggcctgttcctgttgctgatcgccgcgaatggcgtgggtctggtgattaagaacccgctggacggtctgccggtcgcgctgggtaactttgattctttcccggttatcatgtcgctgattggtctggcggtcattatcggcctggaaaaactgaaggtgccgggcggcattctgctgaccattattggtatttcggttgtgggtttgatcttcgatccatccgtccatttctccggcttttttgctatgccgtctttaagtgatgaacacggcaactcgctgattggcagcctggatattatgggcgcgctgaacccgatcgtcctgccgagcgtgctggcgctggtgatgaccgctgttttcgacgccaccggcacgattcgcgcggtcgctggccaggcgaacctgctggataaagacgggcagattatcgatggcggcaaagcgctgaccaccgactccctgagcagcgtgttctctggtctggttggcgcagcgcctgcggcggtatacattgaatcggcggcgggtacggcggcaggcggtaaaacgggtctgacggcgatcaccgtcggcgtcctgttcctgctgatcctgttcctctctccgctctcttatctggttccggtctacgcgaccgcgcccgcgctgatgtacgtcggcctgctgatgctgagcaacgtggcgaaaatcgacttcgctgactttgtggatgcgatggcgggtctgatcacggcggtgtttatcgtcctgacctgcaacatcgtaaccggcattatgattggttttgctacgctggtgatcggccgcattgtgtcgggcgaatggcgtaagctgaacgtcggcaccgtggtgattgccgtagcgctggtcgccttctatgcgggcggctgggctatctga

SEQ ID NO: 74306 - DNA, 669 bp, Citrobacter koseri
atgctgacggtgcatcatttgaatcaatctcgttcccagcgcgtgctctgggcgctggaggagctgtcgctgccctaccagattgttcgctaccagcgtgaaaaaaccatgcttgcgccaccggcgctgaaaaaaatccacccgcttggaaaatcgcccgttattgaagataacggtgagatcctcgccgaatccggcgccatcctggagtatttgcaggaaacctatgaccacgcagggcagtttaaacctgccgatgcccggcaaaaacggcagtatcggttctggctgcattatgcggaaggctcgttaatgccaatgctgttaatgaaactggtgtttgtcagcctgggtaaaccgccggtgccatttgggttacgcacgctgggcggcattctggggcagggcgtgcaaaaagcgtatctcaacccgcaactggagacgcatgcgcgctacattgatgcgcatcttgccgcgcagccctggtttgccggggaacatatcagcatggcggatatccagatgagttttcctctgtttgcgttactgagccgaggcggaattaacgacctgacgcacattcgcgcctggaagaagcgcgtagagatgcgcccggcgtggcaaagggctatccagcaaggcggtccttttgagatccctggcggatag

SEQ ID NO: 74307 - DNA, 459 bp, Citrobacter koseri
atggaaaagaaattaccgcgtataaagtccctgcttacgccgggtgaggtggcgaaacgtagcggtgtggcggtatcggcgctgcacttttatgagagcaaagggcttatcagcagtgtccgtaacagcggcaatcagcggcgatataagcgcgatgtgctgcgctatgtggcgatcatcaagattgctcaacgtattggcattccgctggcgaccattggcgaagcgtttggcgtattgcctgaggggcatacgttgagcgcaaaggagtggaagcagctttcttcgcaatggcgcgaggagctggacagacgtattcatactctggtggcgttgcgtgatgagctggacggctgcatcggctgcggctgtttgtcgcgtagcgattgcccgctgcgcaaccccggcgatcagctcggtacgcagggaacaggggcgcgattgctggaagatgattaa

SEQ ID NO: 74308 - DNA, 324 bp, Citrobacter koseri
atgtcccatcagcagataattcagacccttattgaatggattgatgaacatatcgaccaaccgctgaacattgatgtggtcgcaaaaaaatcaggttactcgaagtggtatttacagcggatgttccgcacggtgatgcatcagacgctgggcgactatattcgtcagcgccgactcctgctggccgccgtagagctacgaacgaccgagcgccccatttttgatatcgcgatggatctgggatatgtgtcgcaacagacattttcgcgcgtcttccgccgcgagtttgaccgcacgcccagcgactaccgtcatcgtctgtaa

SEQ ID NO: 74309 - DNA, 1539 bp, Citrobacter koseri
atggtggtattactccccgtgatgctggcgctatggtttgcccacatgcgggcggtgtctgaaacccgtaatcaactgcactcttttgccgagctggcattagaaaaaacggaactggttgtccagcaggtggagctggcccgcgacgcgatacagcagtatcagggaaaagcctgtactcctgcgcatcaaaaacgaatgcaggatattattcgcggtcgtttgtatatcagcgagttaatttatgcgcaagacgatcattttttatgctctacggtaatggcgcccgccagtccttatattatccctgccgcagattataaacgagaaccagacgtttctatttattactatcgtgatacgccgttctttgctggctacaaaatgacgtatatgcaaagaggacactatgtcgcggtaataaatccgttgtcttacagcgaggtgatgtcagacgatccgactctggcctggggcgtatatgacacggtgacgaactcctttttctccgtgagcgagcaggcaaacgtcgaacaattattaccgttgctgcaccgtgatgaatctacctttcagcaaaataatcgcttctataccattgcccattcagaaaaacgtccgatcgcgataattgtttccactgataacgcgcgtttctatcagaacctgtaccatcaggcgacgttaacgctgccgttaggcattatctgtagcatcattgtgttattgatgtggtcgcgtacgcgtgaggaatatcattcaccgcgccgtttgttgcagcgagcgatcgataaacgtcaactgcgtctttattatcagcccattattgatattcaaaatgaaaaatgcgtgggggcggaggcgctattgcgctggcctggttttgaagggcaggtgatgagcccggcagagtttatcccgctggctgaaaaagaggggatgattgcgcagattaccgattacgtggtggaagaagtattcaacgatctgggacattttctcgcctcgcaacctcatctttatatctctattaatctctccgcttctgatttccactcctcccggcttatcgcgttaattgcggagaaagcccgccagcattccgttcttgcgcaacaaattaaggtggaagtgacggagcgcggctttattgacgtgccgaaaaccacgccggttattcaggcatttcgtcaggcaggttttgaagtggcgattgatgattttggaacagggtattcaaacctgcacaacctgtattcattgaatgtcgatattctgaagattgataaatcctttatcgacacgctgaccaccaatagcaccagccatctgatcgcggaacatatcatcgaaatggcgcaaagtttacacctgaaggccattgccgaaggtgtggaaacggcagatcaggtgaactggctgttcaagcgcggcgttcagtattgtcagggatggtattttgcgaaggcgatgccgccgcaggcgtttattcagtggctgcaacagtcgcccgcactcctgatgcagcgcgggcagtaa

SEQ ID NO: 74310 - DNA, 282 bp, Citrobacter koseri
atggctaccataaccactggcgtggttcttctccgctggcaactgctgagcgctgtgctcatgtttttagccagcacgctcaatattcgctttcgtaaatccgactatatcggactcgcggtgatcagtagcggccttggcgtcgtgtcggcctgctggtttgcaaccgggttactcggcatcactctgatggatgtctccgcaatctggaacaatatcgaagccgtgatggtggaagccatgagccataccccgccagagtggccgatggtgttgacctga

SEQ ID NO: 74311 - DNA, 519 bp, Citrobacter koseri
atgccgactccagttcagtgcgctcctttaacgtttgaatcgctgtatcgtgcgcatcacggctggctgacgcactggctggcgcgaaagttacagtcggcgttcgacgccgacgacgtagcccaggacaccttcctgcgtattattaacggtgaatctctgacggcgattcgcgacccaaagtcgtttctctgcaccgtcgccaaacgggtgatgatcgaccttttccgccgcaatgcgctggaaaaagcgtatctggatatgcttgcgcagttacccgaaacgctggcgccttccgctgaagaaaagcagtcgcatctcgaaacgctgcaacttgtcgacaggatgctggacgggttgagcgccaaagcgagaacggccttcctgctttctcagcttgacgggctgacctacagcgacatcgcgcaacgtctgaatgtttccgtcagttcggtgaaaaagtacgttgcgaaagccacggaacactgcctgctgttccgcctggagcatgacctgtga

SEQ ID NO: 74312 - DNA, 957 bp, Citrobacter koseri
gtgaaaacctccctcaccgatgcccgccgccaggcgctacgttcagcctcacactggtatgccgttttaagcggggagcgcgtgagcccccagcaggaagcgcgctggcagcagtggtatgaacaagatcaggataatcaatgggcctggcagcaggtcgaaaacctgcgctgccagatgagcagcgtccccggcaaactcgccagccacacgctgaaagacagccgcctgacgcgccgccacgtactgaaagggttgctgttgctggtctgcgcgggcggcagttggcagctctggcgatcggagttgggcgaaggcctgcgtgctgattatcgtaccgcccgggggcagactcgccagcagacgctggaggatggcacgttgctttcgctgaataccgacagcgcggttaacgtgcgatttgacagtagccagcgccagatccagctctggtacggcgagatcgccattaccaccggtaaagacgcgctgcaacgcccgtttcgtgtacagacgcgccagggccagctcaccgcattgggtacggaatttaccgtacgccaggacggcgatgaaaccgtccttagcgtccgccaacatgccgtcgaagcgattctcgccggagatccgcaacaaaaacgggttattcagcaaggtgaaacggtgcgcttcagcgcctcgcagtttggcgacgtcgcatcattgaatgacgagtctgcaagctggacgcagggcgtgttaagtttcagcgacaaacctctgggcgacgtcatcgccacgctctcgcgctaccggcacggcatactgcgttgcgacccggccgttgccggattacgcctgacagggacgttcccgctcggcaacaccgatgccgtactgaatgcgatcgcgaaaacgcttcctgtgaaaattcagtttgttacgcgctactgggtcacgctgtctcccgccatttaa

SEQ ID NO: 74313 - DNA, 2316 bp, Citrobacter koseri
atggcctttcataacacagcacctctggtgatggcgattcgtttaagcctgcttccgcttgccggactggcttcactgcctgcatttgccacgcagttcgatattgccgccggagacttagacaaagcacttaatcaatacgctgcccgcagcggcattattatgtcagtggatgcttcgctcacgcggggcaaacacagcgacggactgcacggcgactacgcgcttgaagatggcctgcgcacgctgctaaaggggagcggcctacaggaaaaatcgttaggcgataacacctggacgctggaagccgccccggttgccagcgaggactcgttgaccgtagtcggcgactggctgggtgaagcccgggaaaacgacgtgttcgaacatgccggcgcgcgtgacgttatccgtcgggatgatttcaccaaaaccggcgcgacgaccatgcgcgaagcgctgaaccgtatccccggcgtcaacgccccggaaaacaacggcaccggcagccatgacctggcgatgaacttcggtattcgcggccttaacccacgcctggccagccgctcgacggtattgatggacggcatccccgtaccttttgcgccatacggtcagccgcagctgtcgctcgcgccggtctctctgggcaatatggatgccgttgacgtggtgcgcggcggcggcgcggtgcgctatgggccgcaaagcgtgggcggcgtggtgaacttcgtgacccgcgcgattccgcaggatttcggtattgaagccggcgttgaagggcaactcagccccacctcgtcgcaaaacaatccaaaagagacgcacaacctgatggtaggcggaacggcggataacggtttcggcacggccctgctctactccggcacgcgcggcagcgactggcgcgaacacagcaacacccgtatcgacgacgtgatgctgaaaagcaaatatgcgcctgacgaggtacacaccttcaatagcctgctgcaatactatgacggtcacgccgatatgcccggcggcctgtcccgcgccgactacgacgccgatcgctggcagtccacgcgcccgtatgacagcttctggggccgccgccagcttgccagtctgggatatcaataccagcccgacagccagcacaaattcaatgttcagggtttctacacccgcaccctgcgcagcggttatttagagcaaggaaaacgcattacgctctcaccgcgctactactgggttcgcggcattgaaccgcgctacagccagagctttatgattggcccgtctgcgcatgaagtcggcgtaggctatcgctatgtcaatgaatccacgcatgaaatgcgctactacaccgcaaccaccagcggtcagttgccgtcaacatccagcccttatgaccgtgatacgcgttcagggaccgaagctcacgcctggtatctcgatgacaaaattgatatcggcaactggaccattacgccaggtatgcgttttgagcacattgaatcctaccaggacaacaacgttaaaggtacgcacgaagaggtgagctacaacgccccgcttccggcgcttaacgtcctctaccacctcactgacagctggaatctttatgccaacactgaaggctcgttcggcaccgtacagtacagtcaaattggcaaggctgtgcaaagcggcaatgtggaaccggaaaaagcgcgaacctgggaagtcggaacccgattcgacaacggcgcgctgacggcggaaatggggctgttcctgattaactttaataatcagtacgactccaaccagactaacgatacggtcaccgcccgtggcaaaacccgtcataccgggctggaaacgcaggtacgttacgatctcggcgatatgacgcccacgctggaaaatgtcgccgtttacgctaactacgcgtacgttaacgccgaaattcgcgaaaaaggcgacacttacggcaatcaggtgccgttctcaccaaagcataaagggacgctgggcgtggattacaaacccggcaactggacgttcaacctgaacagcgatttccagtccagccagtttgccgacaacgccaatactgtgaaagagagcgcggacggcagcaccgggcgtattccgggttacatgctgtggggcgcgcgcgtggcgtatgacttcggccccgagatggccaacctgaacctcgcgtttggcgtgaagaatatcttcgaccacgagtattacacccgctcgtatgatgacaacaacaaaggcatctatgccggacagccgcgaacgctgtatctgcaaggatcactgaagttctga

SEQ ID NO: 74314 - DNA, 903 bp, Citrobacter koseri
atgtttgcttttattcgcgtttattttttcagcctgatcgtcctggcagcgccggtttttgctgtgacggtgcaggatgaacacggcgcctttaccctgaataaaacgccgcaacggattgtcgtactggaactgtcgtttgccgatgcgctggcggcggtgaacgtcagtccggtggggatcgccgatgacaacgatcccacgcgtctgctgccggaagtgcgccagattatcgggcaatggcagtccgtcggcacccgcgctcagccgagtcttgaggcgatcggcgcgctaaagcctgacctgattatcgctgacagcagccgccacgcagggatttacgccgcgctgcaagagatcgcccccgtgttgttgctcaaatcccgcaatgaaacgtacgctgaaaatctgcaatccgccgcgatcatcgggaaagtatcaggtaaagatgctgaaatgcaaaaacggctgacgttgcatcgggaacgtatgcgcgcgtttgccgcccacttgccgaaaggggccagcgtggtattcggcacctcacgcgaacagcagtttaatctgcacagccgcgaatcgtatacgggcggcgtgctcgctgcgctgggtctgcgcgtgccggaggcaatcaactctgcgccaatgaccacgattaatctggagcggctactggcgctcgatccgcagtggctgattgtcgcgcactaccgccaggagagcatcgttaaacgctggcagcaggatacgttgtggtccatgctccaggcgtcgcaacaccaccaggttgccgctgtcgatagcaatagctgggcgcggatgcgcgggattttcgctgcggaacgcattgccggcgatacggtgaaaatctttcatcaccagacgcctgataccacgcaatga

SEQ ID NO: 74315 - DNA, 987 bp, Citrobacter koseri
atgaggacattgatcatttggggagcgcccgtactggcgctcctggcagcgttctggctgagcctgttctgctactcggcgatcccgatttcacccgtcagtgctctgcatgccctgtttccttcttcaacgcctccgctttcggaggcgttggtgcgtaatttacgtctgccgcgcagcctggtggcattgctgattggcgccagccttgccctggcgggaacattgctgcaaaccctgacccataacccgctagcctccccttctctgaccggcattaacagcggtgcggcactggcgatagcgttaaccagcgcattcagccccatgttgctcagcgggtattccatcgcgtttatcgccgccgcaggcggaggcctcgcctggcttctggtgatgctggctggcggcggctggcgacaggagcccgaccgcaacaaactgattctcgccggaatcgcgctctccgcgctgtgtatggcgctgacccgcatcacgctgttattggcggaagaccatgcttacggcattttttcatggctggcgggcggtattgcccatgtgcgctgggccgagttctggcagctctttccttttgttctggtgattattcccgtcatgctgctgctggcgaacgcccttaatctgctcaacgtcagcgatgtcgccgcacacacgctcggcgtaaacctgtttcggctgcggcttaccgtcaatatcggcgtgctggtgctggtcggcgcctgcgtcagcgtggcggggccggtggcgtttatcggcctgttaatgccgcatctggccagagcgtggtcaggtcacggccagcgtaagttgctgccgatgagcctgctgatgggcgcaacgtttatgctgctggcggatattctggcgcgagcactggcctggccgggcgagcttccggcaggcgcagtgctggcgctgattggcgcgccgtgttttgtctggctggcaaggaggcgtggatga

SEQ ID NO: 74316 - DNA, 957 bp, Citrobacter koseri
atgaaagcctttattctgctcatcacgttgctcctgctgagtatcaccgcgctgctgtcattgcgtctgggcgtggttcccctgccctggtccgcgctgatcgatggctggcataccggtcacgagcaccactatgttctgacccagtatcgtctgccgagactgctgctggcgatattcgtcggcgccgccctggcgatttccggcgtactggtgcaaggcatcgtgcgtaatccgctggcctcgccggatattttaggggtgaaccatgccgccagtctggcaacagtaagcgcactcatgctgctgccatcgctgtcggtcgtctggctgccgctgctggcatttgtgggcgggctttgtgcgctgatcttactgcgtgcgattgcgggtcgctcctcccccctgcgcctggcgttaatcggcgtggcgttgtcggcaacctgggccagcctgacggattacctgatgctctcccgcccgcaggacgttaacaacgcgctgctgtggctgaccggcagtttatggggacgcggctggtcgtttgtgtatgtggcgctgccgataatgctggcgcttattccactcagcgcctggttttgccgcgatctggatctgctggcgctgggcgatgatcgcgccagcacgctcggcgtcccggtcaggcgggcacagcgcctgggattgctcctcgccgtcgcgctggcagccaccagcgtggcagtttgcgggccgatagctttcgtcagcctggtcgtgccccacctgacccgacgcctgctgggagggcgccatcactggctgctgcccggcgctgcgctaatcggcgcatttgtcttaacgctggccgatttgctggcaaggatcattaaccctcccacggagcttccggcaggcatgctcaccgccattatcggcgcgccgtggtttatctggttgcttgtgaggatgcgctaa

SEQ ID NO: 74317 - DNA, 768 bp, Citrobacter koseri
atggatatcagatgtgaaaacctgactgccggatacggtgataaacgcattcttgacggcctgtcggttacgctacccgccgggcagatcaccgcattactggggcctaatggctgcggcaaatcgacgctgctgaaatgccttgcccgcctgctcataccgcaatccggcaccttgcacattgcgggtaagccgctgtcggcattctcaccccgcgcgctttcgcgtcacctggcgctactgccgcaacagcacatgacgccggaagggatcaccgtgcgggaactggtcagctatggccgcagcccgtggctgccgctgtgggggcggctttctcgcgacgaccatcagcatgtcaaccgggcaatggcgcagacgcacactgacgcgctggcagaaaggcggctgacggagctgtccggcggtcagcggcagcgcgtgtttctggcgatggtgttagcgcaggatacgcccattgtattactggatgaacccaccacctggctcgacattaatcatcaggtggagttgatggcgctcatgcagatgctaaaacaggcggggaaaacggtcgtgacggtactgcacgacctgaatcaggcaagtcgctattgcgatcatcttgtcgtgctggcgcaggggaatgtgattgcgcaagggcaacctgttgatgtgatgcaaccagaattattacgcaaggtatttcaggttgatgcggaaattcaccctgaaccgctaacaggaaaaccaatgtgtattattcgttag

SEQ ID NO: 74318 - DNA, 2718 bp, Citrobacter koseri
ttgaccagaatgccgaataaaaatcgtctccattctgcgccatgcgttgaaaaaaaaccgtaccagcaatctgttaacgaggtacttgaaaaaaagcagagtcagccttccgggctgacgcaaaatgaagccagcgcgcgcctcgcgcagcatgggcctaacgcgctgccagaaaaagcaggcaaaccggcatggttacgcttcctggcgcatttccacgatgttctgatttatgtcctgatcgctgcggcggtgctgactgcggtcatgggtcattgggtggatacggccgtcattttgggtgttgccgttatcaacgcgctgattggccacattcaggaaaataacgcggaaaagtcgctgaaaagcatccgcaatatgctgtcgaactcagcggtcgcgatccgcaacggtcaacatgaaaccgtccccacaaccgaactggtggtgggcgatatcgtcgtgctgcgcgcaggcgatcgcatcccggcagatcttcgcgttatggaagcccataacctgcgggttgaagaggccatcctgacgggtgagtccaccgttgtcgataaaacagccgacacccttaccggcgaactgccgttaggcgatcgtaaaaatctgctgttctccggcaccaccatcagcgcaggcgccgggctgggtgtggttatcgccaccggtgaagaaactgaactcggccacatcaaccagatgatgacgggcattgagaagcaccgtaccccgctgctggttcagatggataaactcggcaaagccattttcgccattatcgtcgccatgatggcaggactatttgtgttcagtctgctgctgcgcgatatgccgatgggcgaactgctgctttctctgattagccttgccgtcgcggccgtaccggaagggctgcccgcgatcatctcgattattctgtcgctcggcgtacagacaatggcccgcaaacgcgccattatccgcaagctgccgacggtcgagacgctgggtgcaatgtccgtgatctgttccgataaaacgggcaccctgaccatgaatgagatgacggtaaaagccattattacggcggacaaaaattaccgcgttcagggcaacagctatgagccaatgggcgagatccatactgaggagagcgacactgcggtagagatcctgcccggcagcctgctggagaactaccttcgcactatcgacctgtgtaatgacagccaattgattcaggacgaaaacggtcactggggcatcactggcgggccaacggaaggggccttaaaagtgctggcggcaaaagcgcgccttcccgccattgaaactgaactgcgcagcaaaatcccgttcgattcgcagtacaaatacatggcgacgcaccatcgcattggaaatgaagagcgcgtactggtgaccggtgcgccagatgtgctgtttaaactgtgccagctacagcagactgctaccggtactgaagcttttacgcaaaatcactgggaagcggagatcgcgcgctatgcgaaagaaggtctgcgcatggttgcggcagcctggaagccagggcgtgcagaagccgcctctctcacccatgagtgcctgaatgacggcctgatcttcctgggcatcgcaggcatgatggacccgccgcgtccagaggccattgacgcaatccaggcctgccagcaggcggggattcgcgtgaagatgatcaccggcgatcacccgcaaacggccatgagtatcggcggcatactggggattcataacagcacccacgcggtaacgggctacgaactggagcagatggacgatgcggcattagccgaagctgctgtcacttacgacatctttgcccgcaccagccccgaacataaactgcgtctggtgaaggcgctgcaaaacaaaggcgagattgtcggtatgaccggcgacggagtcaacgacgcccccgcgctgaagcaggcggacgtcggcatcgcgatgggcatcaaaggcacggaagtgacaaaagaagccgctgacatggtactgacggacgataacttcgccaccatcgccagcgccgtacaggaggggcgtcgcgtttacgacaacctgaagaaaacgattctgttcatcatgcccaccaacctggcacagggtctgctgatcatcattgccctgttggctgggaacctgatcccgctcacgccggtactgattctgtggatgaacatggcgacctccgccacgctgtcgttcgggctggcatttgaagccggtgagcgcaacatcatgcgacgcccgccacgccagagtaatgagaacgtcatggatgcctttgctatctggcgcgtcggttttgtcggaacattaattgcggcctgcgcctttgcgctggaagcctggttgcagcctcgcggccacagcccggagtttatccgtaccgtgctgttgcagacgctggtcaccgcacagtgggtatatatgctcaactgtcgggtttcggatggtttctcgctgggacgcgggctgctgatgaataaaggcatctggatggtcagcggcattctgttgctgttacaaatggcgattatctatatgcctttcatgcagatgctgtttggcacagaagcgctaccgctgcgttactggggcataaccttcgctatcggcgcagtgctgttctgcattgtggagatagagaaaccgctcacccgtaaattccgccggaaatag

SEQ ID NO: 74319 - DNA, 432 bp, Citrobacter koseri
atgaataaagtcattttaatgcccgttgatattctggcgatggatctctctgacaaagccattgcctatgctgatcatatggtgaacaaagaaaacggcgtgatccatctgctgcatgtgttccctaaactgggtacctccccaatgcgtggttttgcctcggatatcagaaaatacgaggaatacatgacgaatgacgcgcaagaaaaaatgcttaaccttgcgagaaaattcaaaacgccgttggagaatattcgttttgaagtccgtcatggcaatattcgtgatgaagtaaataacgcggtagaagcgcataacgccgagatgattatcatcggttcgcgcaagccgggtattgcaacgcatttgctcggttcggctgcggcgaatattttgcgatacgcgaaaattccggtgatggttattcgttaa

SEQ ID NO: 74320 - DNA, 537 bp, Citrobacter koseri
atggccagcagaggcgtaaacaaggtgattctcgtcggtaatctgggccaggacccggaagtacgctacatgccaaatggtggcgcagttgccaacattacgctggctacttccgaatcctggcgtgataagcagaccggtgagatgaaagagcagacggaatggcaccgcgttgtgctgttcggcaaactggcggaagtggccagcgaatatctgcgtaaaggttctcaggtttacattgaaggtcagctgcgtacccgtaaatggaccgatcagtccggtcaggacaaatacaccactgaagtggtggtcaacgttggcggcaccatgcagatgctgggtggccgtcagggcggtggcgctccggctggcggcaatatgggcggcggtcagcagcagggcggttggggtcagcctcagcaaccgcagggcggcaaccagttcagcggcggcgcgcagtcccgtccacagcaacaatccgctccggcaccgtctaacgaaccgccaatggatttcgacgacgacatcccgttctga

SEQ ID NO: 74321 - DNA, 2823 bp, Citrobacter koseri
atggataagatcgaagttcggggcgcccgcacccataatctcaaaaacatcaacctcgtcatcccgcgcgacaaactgattgtcgtcaccgggctttcgggttctggcaaatcctcgctcgcttttgacaccttgtatgccgaagggcaacgtcgttacgttgaatccctttccgcgtatgcgcgtcagtttctgtctttgatggaaaaaccagatgtcgaccatattgaggggctgtcgcccgctatctcaattgagcagaaatcgacatcccataacccgcgctctacggtaggtacaattaccgaaatacatgactatctgcgtctgctgttcgcccgcgtgggtgaaccgcgctgcccggatcatgacgtcccgctggcggcgcaaaccgtcagccagatggtggataacgtgctgtctcagccagaaggcaaacgcctgatgctgctggcgcccattattaaagagcgcaaaggcgagcacgccaaaacgctggaaaacctggccagccagggctacatccgcgcccgtattgatggcgaggtctgcgatctctccgatccgccgaagctggagctgcaaaagaaacacaccattgaggtcgtgatcgatcgtttcaaagtccgtagcgatctgtcccagcgcctggcggaatcttttgaaaccgcgctggaactctccggcggcaccgcgatcgtcgcggatatggacgatacgaaagcggaagagctgctcttctccgccaacttcgcctgcccaatttgcggctacagtatgcgcgagctggaaccgcgtctgttctcgttcaacaacccggcgggagcctgcccgacctgtgacggcctcggcgtacagcaatatttcgatcccgatcgcgtgatccagaacccggagctttctctggctggcggcgcgattcgcggctgggatcgccgtaacttctattatttccagatgctgaaatcgctggcggaacactataagttcgacgtggaagcgccgtggggaagtctgagtcagaatgtgcataaagtcgttctgtacggttccggcaaagagagcatcgagttcaaatacatcaacgatcgtggcgacacctccgtgcgtcgccatccgttcgaaggcgtgctgcacaacatggagcgccgttacaaagagacggagtccagcgcggtacgtgaagagttagctaaattcatcagcaaccgtccgtgcgccagttgtgaaggcacgcgtctgcgccgtgaagcacgtcatgtcttcgtcgagaatactccgctgcctgcgatctccgacatgagcatcggccatgcgatggacttcttcaacaatctcaagctcgcaggccagcgagcaaagattgcggagaagatcctcaaagagattggcgaccgcctcaagttcctggtaaacgtcggcctcaactacctgacgctgtcccgctcggcagagaccttgtccggcggcgaagcccagcgtatccgtctggccagccagattggcgcggggctggtaggtgtgatgtatgtgctggatgaaccgtctatcggtctccatcagcgcgataacgaacgtttgctgggaacgctgattcacctgcgtaatctcggcaataccgtgattgtggtggagcatgacgaagacgccatccgcgccgccgaccatgtgatcgatatcggccccggcgctggcgtacacggcggtcaggtcgtggccgaagggccgctggaggcgattatggcggtgccggaatccctcaccggccagtacatgagcggcaaacgcaagattgaagtgccgaaacagcgcgttcccgcgaacccggagaaagtgctgaagctgaccggcgcgcgcggcaacaacctgaaagacgtcaccctgacgctgccggttggcctgtttacctgtattaccggcgtatccgggtcgggtaagtccacgcttatcaacgacacgctgttcccgattgcccagcgccagttaaacggggcgaccattgcggaacctgcgccgtatcgtgatattcaggggctggagcatttcgataaagtcatcgacatcgaccagagtccgattggccgtacgccgcgctctaacccggcaacgtataccggcgtgtttacgcccgtacgtgagctgttcgctggcgtgccggaatcacgctcacgcggctatacgccgggacgtttcagctttaacgtgcgcggcgggcgctgcgaagcctgtcagggtgacggcgtcatcaaggttgaaatgcacttcctgccggatatttacgtaccgtgcgaccagtgcaaaggcaagcgctataaccgcgaaacgctggagattaagtacaagggcaagactatccacgaagtgctggatatgaccatcgaagaagcgcgcgaattctttgacgccgttccggcgctggcacgtaagctgcaaacgttgatggacgtgggactgacctacatccgtctcggtcagtccgccaccacgctctctggcggtgaagcacagcgcgtgaagctggcgcgtgaattgtcgaaacgcggcaccgggcagacgctgtacattctggatgaaccgaccaccggtctgcattttgccgatattcagcaactgctggacgtgctgcaccagttgcgcgaccagggcaacaccattgtggtgattgagcacaacctggacgtcattaagacggcggactggattgtcgatctcggcccggaaggcggcagcggcggcggcgaaattcttgtttccgggacgccggagacggtcgcagagtgtgaagcgtcacatactgcccgtttcctcaagccaatgctgtaa

SEQ ID NO: 74322 - DNA, 357 bp, Citrobacter koseri
atgaccaattcggagttactgcaatattgcatggcaaaaacaggcgcggaacagagcgttcacagtgactggaaagccacacaaatcaaggttgaagatgtgctttttgccatggtgaaagaggtggaaaatcgcccggcggtatctttgaaaaccagccctgaactggcggagttgctgcgccagcaacacagcgatgtgcgaccaagccgacatcttaataaagcgtactggagcaccgtctacctggacggttcgctaccggattcgcaaatctattatctggtggatgcctcttatcaactggcggtaagtaccctgccggaggacaagcgtaagctgttggtgcagccgtga

SEQ ID NO: 74323 - DNA, 714 bp, Citrobacter koseri
atgcgcaagataaccctggccttgagcgccttttgtttacttttcacgttaaataattcagcaatcgccctggcgtcctcgccgtcgccgctaaatcctggcaccaacgtcgcgaaactcgccgagcagtctcccatccactgggtttctgtcgcgcagatcgaaaatagcctggcgggtcgtcctcccattgctgtcgggtttgatattgatgacaccgtgctgttttccagccctggcttctggcgcggcaaaaaagtctattcgccagaaagcgaggattatctgaaaaatccggcattctgggagaagatgaacaacggctgggatgagttcagcattccgaaagaggtggcgcgtctgctcatcgatatgcacgtccggcgtggcgacagcatcttttttgtcacggggcggagccagacgaaaaccgaaaccgtctcgaaaacgctggctgatgatttccacattcccgcagccaatatgaatcctgtgatttttgcaggcgacaagccgggccagaacaccaaaacgcagtggctacaggagaaaaatatccgcatcttctacggcgactccgacaatgacattacggcagcccgtgacgcgggcattcgtggcatccgcatcctgcgcgcctccaactctacctataaaccgttgccacaggccggcgcgtttggggaagaggtgattgtgaactcggaatattaa

SEQ ID NO: 74324 - DNA, 261 bp, Citrobacter koseri
atgaatggagggggcagcgctaccgcttaccgggcctacgagttgctttgtaggccggataaggcaacgccgccatccggcaggtcgcccggtggcgctgccgcttaccgggcctacgggctgctttgtaggccggataaggcaacgccgccatccggcaacacaattacttacatcaccgcagcaaacgccttcgccacgcgctggacattgccggaattcagacccgccacgcacatgcgtccgctggcgatcaggtag

SEQ ID NO: 74325 - DNA, 1194 bp, Citrobacter koseri
gtgtttcaaaaagttgacgcctacgctggcgacccgattctttcgcttatggagcgtttcaaagaggattcgcgtagcgacaaagtgaatctcagcatcggtctgtattacaacgaagagggcatcattcctcagcttaaagccgttgccgaagcggaagcccggattaatgcgcagccgcacggcgcgtcgctgtacctgccaatggaaggtctcaatacctatcgccataccattgcgccgttgctgtttggcgccgatcatccggttcttcagcagcaacgcgtggcgacaattcagacgctgggcggttccggcgcgctgaaggtaggggcggatttcctgaagcgttattttcctgaatccgccgtgtgggtcagtgacccgacctgggaaaaccacatcgcaatttttgaaggcgctggtttcgaagtaagcacttacccctggtatgacaacgccactaacggcgtgcgtttcaacgacttgctggcgaccctcaacaccttgcctgcccgcagcattgtgctgctgcatccgtgctgccataacccgaccggtgctgatttaacccattcgcagtgggacgcggttattgagatcctgaaagcgcgcgagttgattccgttcctcgacattgcctatcagggatttggcgcaggtatggaagatgatgcctacgcgattcgcgccattgccagcgccggattgcccgcgctggtcagtaactctttctcgaagatcttctcgctgtatggcgagcgtgtgggcgggctttcggtggtctgtgaagacgctgaggccgcaggccgcgtgttgggtcagctcaaagccaccgtgcgccgtaactactccagcccgccgaattttggcgcgcaggtggttgccgccgtactgaacgatgaggcgctcaaagccagctggctggcggaagtggaagcaatgcgcacgcgtatcctggcgatgcgtcaggaactggtgaatgtcctgaacgccgagataccgggccgtaactttgattatctgctgcaacagcgcggcatgttcagctataccggcctgagcgctgcacaggtggaccgtctgcgtgatgagttcggcgtctacctgatcgccagcggacgcatgtgcgtggcgggtctgaattccggcaatgtccagcgcgtggcgaaggcgtttgctgcggtgatgtaa

SEQ ID NO: 74326 - DNA, 1080 bp, Citrobacter koseri
atgcaagcggcaactgtagtcattaaccgccgcgctctgcgacacaatctgcaacgtctgcgtgaactggcgcctgccagcaagctggttgcggtcgtgaaagcgaacgcttacggacacggtcttctggagaccgcgcgaacgctccctgatgccgacgctttcggcgtcgcccgccttgaagaagccctgcgcctgcgggcgggcgggatcacgcagcccattctgttgctggaaggtttttttgaagccaccgatctgccagtcatctctgcacagcatctgcataccgccgtgcataacgaagaacagcttgccgcactggaagccgccgaactggatgagccggtaacggtgtggatgaaactggatacgggaatgcatcgtctgggcgtgcgtcctgaaaaagccgaagcgttttatcaacggcttacgcagtgtaaaaacgtgcgccagccggtaaatatcgtcagccatttcgcccgcgccgatgagccggaatgcggtgcgaccgagcagcaactcgatatttttaataccttctgcgaaggtaaaccggggcaacgctccatcgccgcttccggcggcatcctgctgtggccgcagtctcattttgactgggcgcgaccgggcatcatcctctacggcgtctcgccgctggaaaatcagtccactggcgaagattttggctgccagccggtcatgtcgctaatctccagcctcattgccgttcgcgagcataaagcgggcgaaccggtgggttacggcggcacatggatcagcgagcgtgatacgtgtctgggcgtggttgctatgggctatggcgatggttatccgcgtgcggcgccgtccggtacgccggtgctggttaacggtcgggaggtgacgattgtcggtcgcgtggcgatggacatgatctgcgtcgatttaggccctcaggcgcaggacaaagcaggcgatccggtcattttgtggggtgaaggtctgcccgttgagcgcattgcggaaataacaaaagtgagtgcttacgaacttatcacgcgcctgacatcaagggttgcgatgaagtacattgattaa

SEQ ID NO: 74327 - DNA, 1416 bp, Citrobacter koseri
atggcaggaaataaacccttcaacaaacaacagactgatgcgcgtgaccgtgatttgcaggttgacgggctgaaagtaccgccgcactcgattgaagcggaacagtcggtgttgggcggtttaatgctggataacgaacgctgggacgatgtcgccgaacgcgtagtggcggatgacttttatacccggccgcaccggcatatttttaccgaaatgcaccgtttgcaggagatggggaaacccattgacctaatcacgctggcggagtcgctggaaattcaggggcaactggacagcgttggcggttttgcttacctggcggagttatccaaaaatacgccaagtgcggcgaacatcagcgcttatgcggatattgtccgcgaacgtgccgttgttcgcgatatgatttccgtcgcccatgaaattgccgatgcgggttacgatccgcaggggcgcaacagcgacgagctgctggatctcgcggaatctcgcgttttccagattgcggaaaaccgcgccaataaagacgaaggcccgaaaagcatcgatcaaatcctcgatgcgaccgtggcgcgcattgaaacccttttccagcagccgcatgacggtgtgacaggggtcgataccggttatcaggacttaaacaaaaaaaccgccggtttgcagcgctcggatctgatcatcgtagcggcgcgtccgtcgatgggtaaaacgacatttgcgatgaacctctgcgaaaacgccgcgatgttgcaggagaaaccggtactgatcttcagtctggagatgcccggcgaacagattatgatgcgtatgctggcgtcgctgtcgcgcgtggaccagacgcgcattcgtacgggtcagctggatgacgaagactgggcgcgtatttccggtacgatgggcatcctgctggagaagcgcaatatgtatattgacgattcatccggcctgacgccgacggaagttcgctcgcgcgcccgtcgtatctaccgtgaacatggcgggttaagcctgatcatgatcgactacctgcaactgatgcgcgtgccgtcgctctccgataaccgtacgctggaaatcgcagaaatctctcgctcgctgaaagcgctggcaaaagagctacaggtgccggtggtggcgctgtcgcagcttaaccgctctctggaacaacgcgccgataaacgcccggtcaactcggatctgcgtgaatccggctccatcgagcaggatgccgacttgatcatgtttatctatcgtgatgaggtttatcacgaaaacagcgacttaaaaggcatcgcagaaattattattggtaaacaacgtaacggcccaatcggtacggtacgtctgacgtttaacgggcaatggtcgcgtttcgataactatgcgggaccgcaatacgacgacgagtaa

SEQ ID NO: 74328 - DNA, 984 bp, Citrobacter koseri
atggcaacacgaattgaatttcacaagcacggtggccctgacgtcctgaaagcagtggactttacccctgtagacccggcggaaaacgaaatccaggtcgaaaataaagcgattggcatcaactacattgatacctatattcgcagtgggctctatccaccgccatccctgcccagcgggttgggcaccgaagcggcgggcgtggtgagtaaagtcggcagcaacgttaaacatattaaagcgggcgaccgcgtcgtttatgcccagtctgcgctcggggcttacagttcggtacacaatgttcccgccgataaggccgccattctccctaaagcgatctctttcgagcaggctgccgcctcttttctgaaagggttaacggtcttttatctgctgcgcaagacctatgaggttaaacccgacgaaccgtttttgttccatgccgccgccgggggcgtgggccttatcgcctgccagtgggccaaagcgctgggcgcgaaacttatcggcacggtaggcagcgcgcagaaagcgcaaattgccttacaggctggcgcatggaaagtgattaactatcgtgaagaaaatatcgctgaacgggtgaaagagattaccggcggcaaaaaagtacgggtggtttacgattcagtcgggaaagacacctgggaagcgtcgctggattgcctgcaacgccgggggctgatggtgagttttggtaacgcttccggcccggtgaccggcgttaacttaggcatcctgaaccaaaaaggctcgctgtacgtcactcgcccttctctccagggttacatcaccagtcgcgatgaattgaccgaagccagcaacgagctgttttcactgattgccagcggcgtgataaaagtcgaggtcgcggagaatcagaaatacgcgttgaaagatgcgcagcgcgcgcatgaggtgctggaaagccgggcaacgcagggatcgagcctgctcattccgtag

SEQ ID NO: 74329 - DNA, 243 bp, Citrobacter koseri
atgctggaactactttttgtgatgggcttttttatcatgctgatggccaccggcgtgtcattgttgggaattctggccgcgctgatggtggcgaccgccgtgatgttcctgggcgggatgtttgcgttggtgatcaaactgctgccgtggttgctgttggctgttgccgtggtgtgggtcatcaaagcggtaaaaacgccaaaaatcccacagtatcagcgcaataaccgtcggttttactaa

SEQ ID NO: 74330 - DNA, 1038 bp, Citrobacter koseri
atgcatcaaaataaagagtcacaaaacacgttgcaaaccaacgtgataccagagaagttagccctgtatcctgctcatcgtttttctatcgcgccgatgctcgactggacggacagacattgccgctacttcctgcgtctgctgtctcgccagacgttgctctataccgagatggtaactaccggggcgatcattcatggcaaaggcgactatctggcatacagcgaggaagagcatccggtagcgttgcagcttggcggcagcgatccgtcggcgctggcgcaatgcgcgaaactggcgcaggcgcgaggatatgacgaaattaaccttaacgtaggttgcccgtctgaccgtgtacaaaacggcatgtttggcgcctgtctgatgggaaatgcgcaactggtggcggattgcgtgaaggcgatgcgggacgtagtgtcgatcccggtaacggtcaaaacccgtatcggtattgacgatcaggatagctacgaatttctctgtgacttcatcaatacggtcgccggtaaaggcgaatgcgagatgtttattatccacgcgcgcaaggcctggctctccgggctcagtccgaaggaaaaccgcgagatcccgccgctggattacccgcgcgtttaccagttaaagcgtgacttcccgcatctgaccatgtccatcaacggtggtattacgtcgctggaagaggcgaaagcgcatctggaacatatggatggcgtgatgatcgggcgcgaagcctatcaaaacccgggtattctggcctccgttgaccgtgagatttttggcgcgaccacggcggatgccgatcctgtggctgtcgttcgcgccatgtatccgtacattgagcgtgaactgagccaggggacatacctcgggcatattacccgtcatatgctggggctgtttcaggggattcctggcgcgcgccagtggcgccgttatctgagcgaaaatgcccataaagcaggcgccgacattgacgtgctggaacatgcgctgaaacgggtggcggataagcgttaa

SEQ ID NO: 74331 - DNA, 687 bp, Citrobacter koseri
atgatgaacacacgatggttacatattctggcagtcctgctggcgctggcggggtgcagtcacccgcagacgtatcccttacagtcgaagcaggctgccagcggtgactggacattgccctacgggaaagggagtttttcttttatcagcccttgggcattacccgcgcgggtaagacatgcacgggtaattgataccgacggctatctttataccttttacacactggactccacaccaaaagatcctgattccattgataaatggaccaaaaacaagcatggcggaagcgttaatttcaataaaatcaacaagcctccgcagtttatcgtgttctgctgggattcattcatcgatcgccggacttatgaaacccgcgtgatattttcacccgcaatgtggcagcgtatgaagacacctgccgatcatctgtttggcggggagcctctgtggtacaacaatattctgttcggccttgcgcctggcggcaaggtcagtgtctggttccctgatgcaggggattatcctgccatccccataacgccccggaaaatccacaccctgtcgggtaatgaactgacgatctgtaaggagggggcaaacagcgacttcctgcacgaataccgttattcagagagaacggaagcatttatcaaaggaaaaacctacccctacggggagtggtaa

SEQ ID NO: 74332 - DNA, 687 bp, Citrobacter koseri
atgatgaacacacgacggttacatattctggcagtcctgctggtgctggcggggtgcagtcacccgcagatgtatcccttacagtcgaagcaggctgccagcggcgactggacattgccctacgggaaagggagtttttcttttatcaccccttgggcattacccgcgcgggtaagacatgcacgggtaattgataccgacgggtatctttataccttttacacgctggactcaacatcccgtgacccggtttccattgatagatggggggatattttgtatggcggaagcgttaacttcaataaaatcaacaagcctccgcagtttattgtgttctgctgggattcattcatcgatcgccggacttatgaaacccgcgtgatattttcacccgcaatgtggcagcgtatgaagacacctgccgatcatctgtttggcggggagcctctgtggtacaacaatatcctgttcggccttgcgcctggcggcaaggtcaggatctggttccctgatgcaggagattatcctgccattcctgtaacaccccggaaaatccacaccctgtcgggtaatgaactgacgatctgtaaggagggtgcaaacagcgacttcctgcgcgaataccgttattccagcgatacagaagcgtttatcaaaggaaaaacctacccctacggggagtggtaa

SEQ ID NO: 74333 - DNA, 1983 bp, Citrobacter koseri
atgggtgatattatttatgtaaccattgagggtgagcatcagggggatatttcctctggttgtggaaccacaacttcagtggggaatcgttggcagcagggacatgaagatgaaattttcgtttttagccttacacaggggatatcaaacactggaatgggggtgaagcatcaggggctgtcctttagcaaagtaattgacagggcgtcaccgttactgacaaatgcgatcaataataatgaaaatcttaaaatgcgctttgatatttatcggatcaatagatttggccgatgggagaagtattatgtcattaaactgagaggggcaagattaaatcggctggtatctgaatcacggcaaaatagtttggattatgaatatatttcgctggattatgattatattcattgtcagcatcttctcgctggtactgagttcgattaccttgttacgcctgaacgatataatcagctttttccagtggcgcaggttatatctcctcccccggagccggagaaacgaaatgttacgctggtgctggggatcttcttcgatggtacgggcaataacgcggtcaatacgcgaaatatgctggcggcttgtaccgcgcagcattttgacattgataaccctgatgcggaaagaattctccaaaagagtgcttccgaaaaaatggggctgagtggtacagaggcaaccagctactacgggtactatacaaatatacactggataaatgaattgtacttgcaacgatttcctgctgacgggaaatatattcaacatgccgtatatattgagggcataggtacgcaggctggtgaagcggacagcatgatcggcttagggcttggcacgtctgattacggtgtaatcgctaaaactgacgatgcggtagcgcaactggctgaagcaataaaggccacaatacgtatattggagggcaaacttattattgagaacttgctgtttgatattttcggcttcagtcgcggtgcggcggcggcccgtcattttgcgaatcgcgtacagtcagaagacggcgcaattgtgaatgccattaatgctggcatggtaaagcaggtctacacggggaaacctgcaggaaagacccgctttatgggtatttttgataccgtcacggccgttggaactccctttaatggtctgaatccgcacagcgctgatacgggcgatgtcaatattcatttgcggcccggtgtggcgcaaaaagttttccatatcaccgctcagcatgaatgtcgctataactttgcgcttaacagcgtggcgcctgcctggccggagataaccttacccggagtgcattccgacatcggcggcggttacctgcctaagatgcgtgaggatctgtttcttacccgcccgcaggtggacactttaccatcaaatcaacctgatgaacgttccggcgcttaccggaagaccatggcacaactactggttctggaagcctctcctgctatcgcaccgattattcgtactaatgaaatcacccctgaagtgtggtcagacgactacgctgctactgaccgttatgggcagatgcaaaaacgcagctttgccgcactgacgctgcgtcagcgtattgtccgaaatgactggtcgaaggtaattctgcgggtgatggtcgatgcggcgaaggaggcgggggtgatgtttaatgagaacctggaagtggatgaacttaaaattcctgctgatctttctctcttcctggaacgtgcaatttcaatgggaaaatctgcacgcttaagacggccaactatcgggttcactaagcaggacattgaaattatcgccaaaacctatatccactgttcagcaaactggaatgccgtcgccgtaagtaaaacgggtaaaccacaaggcggggtttctgcttctgaaacgatcggcttcgttaaccggcctgacgcaggatggctcagaacagtttacaacatggacgggaaacaatga

SEQ ID NO: 74334 - DNA, 516 bp, Citrobacter koseri
atggaaaagaccaccacgcaagagcttttagcgcaagctgaaaaactctgtgcgcaacgcaatgtgcggctgacaccccagcgcctcgaagtgttgcgtctgatgagcctgcaggaaggcgcgatcagcgcctatgacctgctggatctgctgcgtgaaacggagccgcaggccaaaccgccgacggtgtatcgtgcgctcgattttctgcttgagcagggttttgttcacaaggtcgaatccaccaacagctacgtgctctgtcacctgttcgatcagccgacccatagctcggccatgtttatctgcgaccgttgtggtgtggtaaaagaggagtgtgctgaaggcgtggaagacattatgcatacgctggcggcaaaaatgggattcgctctgcgccataacgtaattgaagcacacgggttatgcccggcgtgtgtggaagtcgaagcctgtcgccaccccggcgagtgccagcacgaccattctattctggtgaagaagaaaccacgttaa

SEQ ID NO: 74335 - DNA, 213 bp, Citrobacter koseri
atgatgaataaagacgaaatcggcggcaactggaaacagtttaaaggtaaagtgaaagagcaatggggcaaactgaccgatgacgatatgacagtcatcgaaggtaagcgtgatcaactggtgggtaaagtccaggaacgctatggttacgcaaaagatgaggcggaaaaagaagtgaaagaatgggaaaaccgtaacgactaccgctggtaa

SEQ ID NO: 74336 - DNA, 1320 bp, Citrobacter koseri
atgcctttcttcacatcctctgacaaagcactctggcgcctcgccttacccatgattttttccaatatcaccgtccccttactgggtctggtggatacggctgttattggtcatctcgatagccccgtctatctgggtggtgttgccattggcgcaaccgcaaccagcttccttttcatgctgttgctcttcttacgcatgagcactaccgggttaacggcgcaggcctttggcgcgaaaaatccgcaagcgctggcgagagcgttggtgcaaccactcatcctggcgctgagcgcgggggcgctgattgcgctgctgcgcacgccgattatcgatctggcattgcatatcgttggcggtagcgaagcggtgctggagcaggcaagacgctttctggcgatccgctggctgagcgccccggcatctctggcgaatctggttttgcttggttggctgcttggcgttcagtacgcccgtgcaccggttatcctgctgattgtcgggaatatcctgaacatcgtcctcgacctgtggctggttatggggctgcacatgaacgtgcaaggagctgcgctggcgacggtcatcgctgaatatgccacgctgttaattggtctgctgatggtacgcaaagtccttcgtttgcgcggtgtctctcccggtatgttgaaacaggcctggcgcgggaacttccgtcgtttgctggcgcttaatcgcgacatcatgctgcgttcgctgctgctgcaactctgttttggcgcaatcacggtactgggcgcccgtatgggaagcgatatcattgcggtgaatgccgttcttatgacgttgctgacctttactgcctatgcgctggacggcttcgcctatgcggtagaagcccattcgggtcaggcttatggcgcgcgggacggcagccagctactggacgtatggcgggcggcgtgtcgccagtcgggaattgtggcgctgctgtttgcgctggtttatgtgctggcgggggagtacatcatcgcactgctgacttcgctgccgcagattcagcttctggccgatcgctatcttatctggcaggtgattctgccgctggtgggcgtctggtgctatttgctggacggtatgtttatcggggcgacgcgggcggctgaaatgcgtaacagcatggctgtcgccgcagccgggtttgcgctcaccctactgacgataccgctgctggggaaccacggactgtggcttgcgctaaccgtttttctggcgcttcgtgggctttctctggcatttatctggcggcgacactggcgaaaagggacctggtttgcctga

SEQ ID NO: 74337 - DNA, 609 bp, Citrobacter koseri
atgaaagcgttaacggccaggcagcaagaggtgtttgatctcattcgggatcacatcagccagacaggtatgccaccaacgcgtgcggagatcgcgcagcgtttggggttccgttccccaaacgccgctgaagaacacctgaaagcgctggcgcgtaaaggggtgattgaaattgtttccggcgcatcgcgcggtattcgcctgcttctggacgaagaagaagggttgccgctggtcggtcgtgtcgccgccggtgaaccgctgctggcgcagcagcatatcgaaggccattatcaggtcgatccctcgctgtttaaacccaatgctgattttctgctgcgtgttagcggcatgtcgatgaaagatatcggaattatggacggcgatctgctggcggtgcataaaactcaggatgtccgtaacggccaggtggttgtggcgcgtattgacgatgaagtcacggtaaaacgcctgaaaaaacagggcaataaagttgaacttttgccagaaaacagcgaatttaaaccgatcgtggttgacctgcgtgagcagagcttcaccatcgaaggactggcggtaggcgttatccgtaacggtgaatggctgtaa

SEQ ID NO: 74338 - DNA, 369 bp, Citrobacter koseri
atggccaataataccactggattcacccgaatcattaaagccgcaggctattcctggaaaggttttcgcgccgcatgggtcaacgaagcggcgtttcgccaggaaagcatcgccgtgctggcaggtgtgctgattgcctgctggctggatgtggatgccattactcgcgtattgctgattggttccgtgatgctggtgatgattgttgaaatccttaacagcgccattgaagctgttgttgaccgtattggctctgaataccatgaactctccggccgcgcgaaggacatggggtctgcggcggtgctgctgtctattttcgtcgcgctgatgacctggggtctcctgctatggtcacatttccgctaa

SEQ ID NO: 74339 - DNA, 2421 bp, Citrobacter koseri
atgtccggctggccacgaatttactacaaattactgaatttaccattaagcgtgctggtaaaaagcaagtctattccggcagatcctgccccggagttggggcttgatacatcgcgccctattatgtacgtattgccgtacaactccaaagcagacctgctgacgctgcgcgcccagtgtctggcgcacgatcttcccgacccgctggagccgctggagatcgacggaacgctgctgccgcgttatgtctttattcacggcgggccgcgtgtcttcacctattacacgccaaaagaagagtccattaagcttttccacaactatctcgatctccaccgcagcaatcccgatctggatgtgcaaatggtgccggtatcggtgatgtttggccgctctccggggcgcgaaaaaggagaagagaacccgcctttacgtatgctgaacggcgtgcagaaattctttgccgtctcctggctgggacgcgacagctttgttcgtttctcgccgtccgtgtctttgcgtcggatggctgacgaacacggcactgacaagacaatcgcgcagaaactggcgcgcgtggcgcgtatgcacttcgcccgtcaacgtctggcggcggtcgggccgcgtctgccagcccgtcaggatctgtttaacaagctgctggcttcaaaagccatcgctcgcgccgtggaagatgaagcgcgcagcaaaaaaatctcccatgaaaaggcgcagcaaaacgccattgcgctgatggaagagattgctgccaacttctcctacgagatgatccgtctgaccgaccgtattctgggctttacctggaaccgtctttatcaggggattaacgtccataacgccgagcgcgttcgccagttggcgcacgacgggcatgaaattgtctatgtgccctgccaccgcagccatatggactatatgctgctttcctacgtgctgtatcaccaggggctggtgccgccgcatatcgctgcgggcatcaacctgaacttctggccggcgggtccgattttccgccgtctgggcgcgttctttattcgtcgtaccttcaagggcaacaagctctactccaccgttttccgcgaatacctgggcgagctgttcagccgtggttactcggttgaatatttcgtcgaaggcggtcgctcgcgtaccggtcgtctgctcgacccgaaaaccggcacgctgtcgatgaccattcaggcaatgttacgcggcggcacgcgtcctatcacgctggtgccgatctacatcggctatgagcatgtgatggaagtgggcacttacgccaaagagctgcgtggcgcgacgaaagaaaaagagagcctgccgcaaatgctgcgtggtttaagcaaactgcgtaatctgggccagggctacgtcaactttggcgaaccgatgccattgatgacttacctcaaccagcatgtgccggagtggcgtgaatccatcgatcctatcgagtctatccgcccggcctggctgacaccgacggtgaataacattgccgccgatctgatggtgcgcattaacaacgccggtgcggccaacgccatgaacctgtgctgcaccgcgctgctggcttcccgccagcgctctctgacccgtgagcagctgactgaacagctcgactgctatctgagtctgctgcgcaacgtgccgtacgcggcggattctacggttcctgcgcagagcgccagtgaactgatcgaccacgccttgcagatgaacaagtttgaggtcgagaaagacaccatcggcgatatcatcattctgccgcgcgagcaggccgtgttgatgacctactatcgcaacaacatcgcgcatatgctggttctgccttccctgatggcggccatcattacccagcaccgccacatctcgcgtgacgcgctgatgcagcatgttgacgtgctctacccgatgctgaaagcggaactgttcctgcgctgggaacacgatgagcttgccagcgtgattgacgcgctgagtagtgagatgcaacgtcaggggctgatcgccgtgcagaacgatgagctgcatatcaatccggcacattctcgcacgctgcaactgctggcggctggcgcgcgcgaaacgctgcaacgctatgccatcaccttctggctgctgagcgcgaatccgtcgatcaaccgcggtacgctggaaaaagagagtcgcacggtcgcgcaacgtctttccgttctgcacggcattaacgcgccggagttcttcgataaagcggtgttcagttctctggtgctgactctgcgtgatgagaaatacatcagcgataccggagacgccgagcctgagcagacgatgaaggtgtatcagatgttggccgatttgatcacgtcggatgtgcgtctgaccattgagagcgcaacgcagggcgagtga

SEQ ID NO: 74340 - DNA, 870 bp, Citrobacter koseri
atggagtggagtctgacgcagaataagctgttggcgtttcaccgcctgatgcgtacggataagccaatcggcgccttactgctgctctggccgacattatgggcgctgtgggtagcgacgccgggagtgccgcaactgtggattctggcggtgtttgtcgccggggtctggttaatgcgcgccgccggttgcgtggtcaacgattatgccgatcgtaagtttgatggacatgtgaaacgcacggctaaccgaccgttacccagcggggcggtcacggagaaagaggcgcgcacgctgtttgtcgtactggtagtgctctccttcctgctggtattaacgctgaatacgatgaccattctgctgtcgattgcggcgctggcgctggcgtgggtctatcccttcatgaagcgttacacccatttgccgcaggttgtgctgggcgcggcgtttggctggtctattcctatggcgtttgcggcggtgagtgagtccgtgccgctgagctgctggctgatgttcctggccaatatcctctgggcggtggcctacgacacgcagtatgcgatggttgaccgggacgacgatctgaaaatcggcattaaatcgacggccattctgttcgggcgacatgacaaacttattatcgggattttgcagattgcggtgctggcgctaatggcgctgattggctggctgaacgggctgggctgggggtattactggtcggtgctggtggccggcgcgctgtttgtgtatcagcagaaactgattgtcgggcgcgaacgtgaagcctgttttaaagcgtttatgaacaataactacgtcggcctggtgctgtttttagggctggcgatgagttacgttggctga

SEQ ID NO: 74341 - DNA, 498 bp, Citrobacter koseri
atgtcacaccctgcgttaacgcaactgcgtgcgctgcgctattttaaagagattcctgcgctggattcccggttgctcgactggttacttctggaagattccatgaccaaacgttttgagcaagaggggaaacgggtaagcgtgacattgcttcgggaagcgtttgttggtccacatgaagtggctgaagaggtggcgctgctaccggtcgaatcccgctactggttacgtgaaattttgttatgtgcagacggcgaaccctggcttgccgggcgtaccgtcgtgcctgaatcaacgttgtgcggccctgagctggccttacaaaatctgggaaaaacgccgttagggcgctacctgtttacatcatcaacgttgacccgagattttattgagattggtcgtgatgccgcactgtgggggcgtcgttcccgcctgcgtctgagcggtaagccgctgatgcttaccgagctgtttttgcccgcatcaccgttgtattaa

SEQ ID NO: 74342 - DNA, 942 bp, Citrobacter koseri
atgaaaatgaagaaaagtctcgtcgccctttgtttatcggcgggtttgctggcaagcgcaccaggcattagcctggcggatgtaaactatgttccgcaaaacaccagcgcagcgcctgcgattccgacctccgcactacaacaactcacctggacgcctgtcgaccagtccagtacgcagtccacacagctttctaccggtggtcagcggcttgacgtcgtcggtattacaggcccggttgccgcgtatagcgtaccggcgaacatcggtgagctcacgctgacattgagcagcgaagttaacaaacaaaccagcgtatttgcaccgaacgtgctgattctcgaccagaacctgacgccttcagcgtatttccccagcagctactttacctaccaggcccccggcgtgatgagcgcggatcgtctggaaggggtgatgcgcctgacgcccgcgctgggccagcagaagctgtacgttctggtgtttaccaccaataacgatctccagcagaccaccacgctgcttgacccggcaaaagcgtatgcgaaaggcgtgggtaatgccgtcccggatattcccgatccgatcgcgcgccacacgactgatggcctgctgaaactgaaagtgaaaaccaacagcagctccagcgtactggttggcccgctgtttggttcttccggtccgggacctgtcaccgtcggcaacactgcggcaccggcgaccgcctataccgcaccagccgttgccgcgccagcgcctgccccggcgaagaaaagcgagtcaatgctgaacgacacggaaagctacttcaacaatgcgattaaggacgcggtagcgaaaggtgacgttgataaagctctgaaactgcttgatgaagccgaacgcctgggatcgacatctgcccgttccacgtttatcagcagtgtaaaaggcaaggggtaa

SEQ ID NO: 74343 - DNA, 1350 bp, Citrobacter koseri
atgattactctgcgcaaacttcctctggcggttgccgtcgcagcaggcgttatgtctgctcaggcaatggcagtggattttcatggttatgctcgttccggtatcggctggacgggtagtggcggcgaacaacaatgtttccaggcaactggcgctcaaagtaaataccgtcttggtaacgaatgtgaaacctatgcggaattgaaactgggtcaggaagtgtggaaagaaggcgacaagagcttctatttcgacactaacgtggcctactccgtagcgcaacagaatgactgggaagcaaccgatccggcgttccgtgaagccaacgtgcagggtaaaaacctgattgactggctgccaggctccaccatctgggcgggtaagcgcttctatcagcgtcatgacgttcacatgatcgacttctactactgggatatttctggtcctggtgcgggtatcgaaaacatcgacctgggcttcggtaaactgtctctggcagcgacccgctctcaggaagccggtggttcctacaccttcagcagccaggatatttacaactcttctaaagacaccgccaacgacgtcttcgacgtgcgtttagccggtctggaaacgaacccggacggcgtgctggaactgggtgtcgactatggtcgcgcaaacaccactgacgattatcgtctggctgacggcgcatctaaagacggctggatgttcactgctgaacatacccagagcatgctgaagggctacaacaagtttgtggttcagtacgccactgacgcgatgaccacgcagggtaaaggtattcctcagggttcttacggctcgacttttgatatcggcgaaggcgacgatcagctccactatgtcgatcgttacgtcaataacaacggtaagctgtggcgtattctggaccacggggcgatctctctgggcgaccgttgggacctgatgtacgtcggtatgttccagaaacaggacctggataacgatctgggtactgactggtggaccgtaggcgttcgtccgatgttcaaatggacgccgatcatgagcaccctgctggaagtcggttacgacaacgtcaaatctcagcagactggcgatcgcaacaaccagtacaaaatcaccctggcgcaacaatggcaggctggcgacagcatctggtcccgcccggccatccgtctcttcgcaacctacgcgaagtgggatgagaaatggggttacatcaaagacggcgataacacattgcgttatgccgcatcgaataactccggcttcaacacaaccagccgtggcgacaacgatgagtggtccttcggcgcccagatggaaatctggtggtaa

SEQ ID NO: 74344 - DNA, 1110 bp, Citrobacter koseri
atggcgagcgtacagctacgaaatgtaacgaaagcctggggtgacgtggtggtatcgaaagatatcaatctcgacattcacgaaggggaattcgtggtgtttgtcggaccgtcaggctgcgggaaatcgaccttgctgcgtatgatcgccggacttgaaaccatcaccagcggagatctgttcattggggaagcccgtatgaacgacatcccgcccgccgaacgcggcgtggggatggttttccagtcctatgcgctctacccccacctgtccgtggcagaaaacatgtcttttggtttgaagctggcgggggccaaaaaagaggtgatgaatcagcgtgtgaatcaggtggcggaagtgctgcaactggcgcacctgctggagcgcaagccgaaagcgctctccggcggccagcgccagcgcgtggcgataggccgcacgctggtggcggaaccgcgcgtgttcctgcttgatgagccgctgtctaaccttgatgccgccctgcgcgtgcagatgcgtatcgaaatctcccgcctgcataagcgtctgggccgcacgatgatttacgtcacccacgatcaggttgaagcgatgacgctggccgacaaaatcgtggtgctggatgccggccgcgtggcgcaggtcggtaagccgctggagctgtaccactatccggcggatcgcttcgtcgcgggctttatcggttccccgaaaatgaacttcctgccggtgaaagtcactgcgaccgctatcgagcaggtgcaggttgagctgccgaaccgccagaacgtctggctgccggtagaaagcaacggcgttcaggtcggggcaaatatgtctttaggtattcgtccagagcatctgctgcccagcgacatcgccgatgtcaccctggaaggcgaggttcaggtcgtcgaacaacttggtcacgaaacacaaattcatatccagatccccgccattcgtcaaaacctggtttaccgccagaacgacgtggtgttggtagaagagggtgccacattcgctatcggtctgccgccagagcgttgccatctgttccgtgaagatggttccgcatgccgtcggctgcataaggagccgggcgtttaa

SEQ ID NO: 74345 - DNA, 1191 bp, Citrobacter koseri
atgaaaatcaaaactggcgcacgcatcctcgcattgtccgcactgacgacgatgatgttttccgcctcggctctcgccaagattgaagaaggtaagctggttatctggattaacggcgacaaaggctacaacggcctcgctgaagtgggcaaaaaattcgaacaagacaccggcattaaagtcaccgttgagcacccggacaagctggaagagaaattccctcaggttgcggccaccggtgacggcccggacatcatcttctgggcgcatgaccgttttggcggctacgcacagtctggcctgctggctgagatcaccccggaccaggcgttccaggacaaactctatccgttcacctgggatgcagtacgttacaacggcaagctgatcgcctacccgatcgcggttgaagcgctgtccctgatttacaacaaagacctcgttccgaacccgccgaaaacctgggaagagatcccggcactggataaagagctgaaagcgaaaggtaagagcgcgctgatgttcaacctgcaagaaccgtacttcacctggccgctgattgccgccgatggcggttacgcgttcaagtttgagaacggtaagtatgacgtgaaagatgtcggcgtagacagcgcaggggcgaaagccggtctgggcttcctggtcgatatgatcaaaaacaaacacatgaacgccgataccgattactccatcgcggaagccgcctttaacaaaggcgaaacggcgatgaccatcaacggtccgtgggcgtggtcaaacatcgacaagagcaaaatcaattacggcgtgacactgctgccgacattcaaaggcaaaccgtctaaaccgttcgttggcgtgctgagcgcgggcattaacgccgccagcccgaacaaagagctggcgaaagagttcctcgaaaactacctgctgaccgatcagggtctggacgtcgtgaacaaggacaaaccgctgggcgcggttgcgctgaaatccttccaggatcagttagcgaaagatccgcgtatcgccgccacgatggataacgcccagaaaggcgaaatcatgccgaacattccgcagatgtcagccttctggtatgcggttcgtacggcagttatcaacgctgccagcggtcgtcagactgtcgacgccgcgctgaaagacgcgcagggccgtatcaccaagtaa

SEQ ID NO: 74346 - DNA, 1545 bp, Citrobacter koseri
atggatgtcattaaaaagaaacattggtggcaaagcgacgcgctgaagtggtcagcgattggtctgctgggcctgctggtgggttaccttgtagttttaatgtacgcacaaggggagtacctgtttgccatcatgacgctgattttaagctctgctggcctgtatattttcgcgaatcgtaaaacctatgcctggcgctatgtttatccgggcatggccggtatgggactgtttgtcctgttcccgctggtctgcactatcgccatcgcctttaccaactacagcagcaccaaccagctcacctttgaacgcgcccagcaggtgctgatggatcgttcttatcaggcgggcaaaacctataactttggcctgtatccggcgggtgacaagtggcaactggccctcactgacggcgaaaccggcaagaattatctctccgacgcctttaaattcggcggcgaacaaaaattgcaactgaaagagactgacgcactgccgaccggtgaacgcgccaacctgcgcatcatcacccaaaatcgtcaggcgctgaaccagcttaccgccgttttacccgatgaaagcaaggtcatcatgagctcgctgcgccagttttccggcacccagccgctctataccctcgccagcgacggcacgctgacaaataaccagagcggcgtggcgtatcggccaaacaacgatattggctactatcaggccatcaacgcggacggcaactggggcgacgaaaaactgagcccaggctacaccgtgaccatcggctgggacaatttctcccgcgtctttactgacgagggcatccagaaaccgttcttcgcgatcttcgtctggaccgtggtgttctccgttctcaccgtgctgctgaccgtggcggttgggatggtgctggcctgcctcgtacagtgggaagcgctgaaaagtaaagcgatttaccgcgtgctgctgattctgccgtatgcggtgccgtcgttcatctcgattctgatcttcaaaggtttgttcaaccagagctttggtgagatcaacatgatgctgagcgcgctgtttggcctcaaaccggcctggttcagcgacccgaacaccgcccgcacgatggtcattatcgtcaacacctggctgggctatccgtacatgatgatcctctgcatgggcctgctgaaagcgattccagacgatctgtacgaagcgtcggcaatggacggtgcggggccgttccagaacttctttaagattacattcccgctgctgattaagccgctgacgccgctgatgatcgccagctttgcctttaactttaacaacttcgtactgattcagcttctgaccaacggcggcccggaccgcctcggcaccactacgccagccggttataccgacctgctcgtgagctacacctaccgcatcgcctttgaaggcggcgggggccaggacttcggtctggcggccgcgatcgccacgctgatcttcctgctggttggcgcgctggccatcgtgaacctgaaagccacgcgtatgaagtttgattaa

SEQ ID NO: 74347 - DNA, 891 bp, Citrobacter koseri
atggcaatggttcaacccaaatctcaaaagctgcgtctcttcatcacgcacttagggctgctgatttttatcgcggcaatcatgttcccgctgctgatggtcgtcgccatttcgctgcgtgaaggcaacttcgcaaccgggagtctgatcccggaacgcatctcctgggagcactggcggctggcattgggcttcagcgtggaacacgctgatggccgtgtcacgccgccccccttcccggttctgttatggctatggaactcgatcaaagtcgcggcgatcaccgccattggcatcgtggcgctctctacgacctgcgcttacgcgtttgcccgtatgcgctttcccggcaaagcgacgttgctcaaagggatgctgattttccagatgttcccggcggtgctgtcactggtggcgttgtacgcgttgttcgaccgtctcggccagtacattccgtttatcggtctgaatacccacggcggggtgattttcgcttacctgggcgggattgcgctgcacgtctggacgattaaaggctatttcgaaaccatcgacggttcgctggaagaagcggcggcgctggatggcgcgacgccgtggcaggctttccgcctggtgctgctgccgctctcggtgccgattctggcggtggtctttattctgtcgttcattgccgccatcactgaagttcctgtcgcctcgctgttactgcgtgatgtaaacagctataccctggcggtaggtatgcagcagtacctcaacccgcaaaactatctgtggggcgattttgccgccgcagccgtgttgtccgccatcccgatcacgctggtgttcctgctggcccagcgttggctggtcaacggcctgacggcaggcggtgtgaaaggctaa

SEQ ID NO: 74348 - DNA, 411 bp, Citrobacter koseri
atgacgtcactatctcgtccacgcgtggagtttatctccacgatcctacagaccgtgctgaatcttgggctgttaagtctgggcctgatcctggtcgttttcctcggtaaagagaccttacatctggcggatgtgctgttcgcgccggagcaaaccagcaaatacgagctggtggaagggttggtggtctactttctctactttgagtttattgcgttgattgtgaagtacttccagtcaggttttcatttcccgctgcgctactttgtctatatcgggatcaccgcgattgtgcggctgatcatcgtcgatcataaatcgccgatggatgtgctgatctactctgcggcgatcctgttattggtgatcaccctgtggttatgtaattcgaaacggctaaaacgggaataa

SEQ ID NO: 74349 - DNA, 453 bp, Citrobacter koseri
atgcagttaaaacacgctaccgtccgcaacgtcacctgcggtgaaaatgtggtgatttatgagcccgcaaacctgtacgactgccagcttggcgacaatgttttcatcggaccttttgtcgaaatacagggcaatacacagattggcgcaaacacaaaaattcagtcccatacgtttgtttgcgaatatgtcacgattggacgcgattgctttatcggccacggcgtaatgttcgctaacgacatgtttcgtgaaggaaagcctgacccgaacaggcagaactgggggcgaattgagatcggcagcaatgtttccatcggcagcggcgcgaccatcctggccgtcagcatttgcgacggcacagtgatcggcgcgggaagcgtggtcactaaatcgatcaccgagaaaggcgtatatgccggaaacccggcaaaattattgcgtcgcctgtaa

SEQ ID NO: 74350 - DNA, 2097 bp, Citrobacter koseri
atgaaaaaaacacatctgctcagcttactggcgctgggcatcagcgcagcctgccatgccgaaacatatccggcccccattgggccgtcacaatctgacttcggcggcgtggggctgctgcaaacgccaacggcgcgaatggcgcgggaaggggagatgagcctgaactatcgtgataacgatcagtatcgctactactccgcgtcgatacagttgttcccgtggctggaaaccacgctgcgctataccgacgtgcgtaccagacaatacagcagtgtggagtcgttttccggcaaccagacctacaaagacaaagccttcgacctgaaactgcggttatgggaagagagctactggatgccgcaggtggcggtcggcgcaagggatatcggcgggacggggctgttcgatgcggaatacattgtggcgaacaaagcctgggggccgtttgatttctcgctcggtcttggctggggttatctgggcaccagcggcaacgtgagcaatccgttttgctcatacagcgataaattctgtcaccgcgataacagttataaacaggccggttccgtcaacggcagcgatatgttccacgggccagcgtcgctgtttggcggggtggagtatcaaacgccctggcagccgctgcgcctgaaactggagtatgaaggcaacaattatcagcaggatttcgcgggtaagctggagcagaagagcaagtttaacgtcggcgccatttaccgcgtcaccgattgggccgacgttaacctcagctatgaacgcggcaacacctttatgtttggcgtgacgctgcggacaaacttcaacgatttgcgcccatcgtataacgataacgcgcgaccgaaatatcagcctgaaccgcaggatgccatcctgcaacactcggtcgtcgctaaccagttgacgctgctgaaatacaacgccggactggcggaccctaaaattcaggtgaaaggcgatacgctgtacgtcaccggcgagcaggtgaaataccgtgactcgcgggaagggatcgaacgcgcgaatcggatcgtcatgaacgatctgccagaaggggttcgcacgatccgcgtgacggaaaaccgtctcaatatgccgcaggtcactacggaaaccgatgtcgccagcctgaaacgccatctggaaggcgagccattaggacacgagaccccactggcgcaaaaacgtgtggagccgatcgtgccggaaacaaccgagcagggttggtatatcgataaatcgcgctttgatttccatatcgatccggtgttgaaccagtctgtcggcggcccggaaaatttctatatgtaccagcttggcgtgatggggacggcggatctgtgggtaacggatcatctgcttaccaccggcagtctgtttgccaatatcgccaacaactacgacaaatttaactacaccaacccaccgaacgattcgcatcttccgcgtgtgcgtacccatgtgcgcgaatatgtgcagaacgatatctatgtgaataacctgcaagccaactacttccagtacctcggcaacggtttctacggccaggtttacggcggttatctggagaccatgtacggcggcgcaggggcggaagtgctgtatcgcccggtcgacagcaactgggcgtttggtcttgacgctaactacgtgaaacagcgtgactggcgtagcgcgcaggatatgatgaaattcaccgattacagcgtgaaaaccggccacttgaccgcctactggacgccgtcgttcgcgcaggatgtgctggtgaaagcgagcgtcggtcaatatctggctggcgacaagggcggtacgctggaaatcgcgaaacgctttgacagcggcgtggtggttggcggctatgccacgatcaccgatgtgtcgccggacgagtacggggaaggggatttcaccaaaggcgtgtacgtgtcggtgccgttggatctcttctcgtccagcccaacccgcagccgcgcagcgattggctggacgccgctgacgcgtgacggcggtcagcagcttggccggaagtttggtctgtacgatatgaccagcgaccgcaacgtgaatttccgctga

SEQ ID NO: 74351 - DNA, 738 bp, Citrobacter koseri
atgatgaaacagaccattgcagcgctggccctgagtttgtgcgcttcctcatcttttgccgcaggcaccgtgaaggtgtttgccgcaggcagcactgaaccgaagacgctcaccggcgcggaacatctgatcgatctggtcgggcagccgaaactggcgaacagctggtggcctggcgcggttatcagcgaagagcgggctaccgccacggcgcagcgccagcagcaggaattattgagccgcctggctgcgtttggcgcagagaaaagcggcgatgacgccgccgcaatcaatacgctgcgccagcaggtgcagacattgaaagtgactggcagacagctcgttaaccttgacccggataccgtacgcgtcagcgaacggggcaatccgccgttgcagggccattacacgctgtgggtcggcgggcagccgacagatatcacgctgtttggattggttagccagccgggtaaacgccccttcagcccggggcgggacgtggccagctaccttgatgagcaaagcctgctcagcggggcggatcgcagctatgcgtgggttgtctatcccgacggacgcacgcagaaagcgccggtcgcttactggaacaagcgtcacgttgagccgatgccaggcagcatcatttttgtcggtcttacggattctctatggagcaacacgccggatgcgcttaacgccgacattcttcgtactctgacgcagcggatacccgaataa

SEQ ID NO: 74352 - DNA, 639 bp, Citrobacter koseri
gtgaagcgacctggaattatcatcatttgcctgctgttacaggcttgctcagccaccactaaaggtctgggtaattcgctgtgggacagtctgttcggtacgccgggcgtacaactgacggacgatgacattcaaaacatgccttatgccagccagtacatgcagctcaatggcgggccgcagctgtttgtggtgcttgctttcgcagagaacgggcagcagaaatgggtgacgcaggatcaggccaccatcgtgacccagcatggtcgcctgattaaaaccctgctcggcggcgacaatctgatcggtgtgaataatctggcggctgacccattggccagaccgacacaaatcgtagatggcgcaacgtggacgcgcacgatgggctggacggaacataaacaggtgcgttacgccaccgcccgctcggccttcaaatgggatggcgctgacagcattaaggtcggtagcgatgtaaccgccgttcgcgtactggatgaagaagttacaaccgaccaggcgcgctggcataaccgctactggatcgacagcgaagggcaaatccgccagtcggaacagtatctgggggcggactacttcccggtgaaaaccacgctcattaaggcggcaaaacaatga

SEQ ID NO: 74353 - DNA, 243 bp, Citrobacter koseri
atgaaaaaagctctgtatggcatttttgccatatctgcgcttgcggcgacttctgtctgggccgcccccgttcaggtgggtgaagcagcagggtcggcggcgacgtcggtatcagcgggaagttcctccgcgaccagcgtcagcaccgtaagctcggcggtgggcgtcgctctggcggcgaccggcggtggcgatggttctaataccggaaccactaccaccacaaccaccagtacccagtaa

SEQ ID NO: 74354 - DNA, 1650 bp, Citrobacter koseri
atgaaaaacatcaatccgacgcagacttctgcctggcaggcactacaaaaacactacgacgacatgaaggacgttactatcgcggatcttttcgcgaaagatagcgaccgttttacccgattttccgcgacgtttgacgatttgatgctggtggatttctctaaaaaccgcatcaccgaagagacgctggcgaaattgcaggatctggcgaaagagaccgatctggccggtgcgattaagtccatgttctctggtgaaaaaatcaaccgtaccgaagaccgtgccgtgctgcacgttgcgctgcgtaaccgtagcaataccccgattatcgttgacggcaaagatgtgatgccggaagtgaatgcggtgctggagaagatgaaagccttctctgaagcgattatttcaggtcaatggaaaggttacaccggtaaagcgatcactgacgtggtcaacatcggtatcggtggttccgacctggggccgttcatggtgactgaagcgctgcgcccgtacaaaaaccatctgaatatgcactttgtgtctaacgtcgatggcacccacatcgccgaagtgctgaagaaagtaaacccggaaaccaccctgttcctggtggcgtctaaaaccttcacaacgcaggaaactatgaccaacgcccacagcgcgcgcgactggttcctgagcaccgcgaatgatgaaaaacacgtcgcgaaacactttgcggcgctttccactaatgcaaaagcggtgggtgagtttggtatcgacaccgccaacatgttcgagttctgggactgggtcggcggtcgttactctctgtggtcggcaattggcttgtctatcatcctgtctgtcggctttgacaacttcgttgaactgctgtccggcgcgcatgcgatggataaacacttctccacaacaccggctgagaaaaacctgccggtgctgctggcgctgatcggtatctggtacaacaacttctttggcgcagaaaccgaagcgattctgccgtacgaccagtatatgcaccgttttgcggcctacttccagcagggcaatatggagtccaacggcaagtatgttgaccgtaacggcaatgccgtagactaccagactggcccaatcatctggggtgaaccgggcaccaacggccagcacgcgttctaccagctgattcaccaggggacgaagatggtaccttgcgactttatcgccccggcgataacccataacccgttgtccgatcaccatcagaaactgctgtctaacttcttcgctcagaccgaagcgctggcgttcggcaaatcccgtgaggtggttgagcaggaatatcgcgatcaggggaaagatccgtctcagcttgagcatgtggtgccgttcaaagtgttcgaaggcaaccgcccgacgaactccatcctgctgcgtgaaatcacgccgtttagcctgggggcgttgattgcgctgtatgagcacaaaatcttcactcagggcgcgatcctgaacatcttcaccttcgaccagtggggcgttgagctgggcaaacagctggctaaccgtatcctgccggaactgggtgatgataaagcgatttccagccatgacagttcaactaacggtctgattaaccgttataaagcatggcgtgcctga

SEQ ID NO: 74355 - DNA, 1362 bp, Citrobacter koseri
atgacaactgctgtttccccgctcgtcgtcgccaaatttggcggaaccagcgtcgccgattttgacgccatgaaccgtagcgccgacgtggtgctttccgatgctaacgtacgcttagtggtgctttccgcctctgcgggcgtcaccaatctgctggtagcgctggcagaagggctggaaccgccagagcgcttcgaaaaactcgacgccatccgtaaaattcagttcgatattctggagcgtctgcgttacccgaacgttatccgcgaagagatcgagcgtctgctggaaaacattaccacgcttgccgaagcagcttcactggcgacgtcaatggccctgaccgacgagctggtgagccacggcgagctgatgtccaccctgctgtttgtggagatcctgcgcgagcgcaatattcaggcgcagtggtttgacgtgcgtaaggtgatgcgcaccagcgatcgttttggccgcgcggaaccggatatcgcagcgctgtcggagctggccacgctacagcttgccccacgcctggcagagggtctggtcatcacccagggatttatcggcagcgaaagcaaaggccgcacaacgacgctgggacgtggcggcagcgactacacggcggcgctgcttgcagaagcgctgcacgcggcgcgcgtcgatatctggacggatgtgccgggcatctacaccaccgacccgcgcgtggtgcctgccgcgcagcgtattgatgaaatcgcctttgaagaagcggcggaaatggcgacctttggcgcgaaggtgctgcaccctgcaacgctgctgcccgccgtacgcagcgatatcccggttttcgtcggctccagtaaagatccaaaagcgggcgggacgctggtatgcaataaaacccaaaacccaccgctcttccgcgcgctggcgctgcgtcgcaaacagacgctgttaacgctgcacagcctgaatatgctgcattcgcgtggtttcctggcggaagtgttcggcattctggcgcggcacaatatctccgtagatttaatcaccacctcggaagtgagcgtggcgctgacgctggataccaccggttccacttcaacgggcgacacgctgctgacgcagtctttgctgatggagctttccgcgctatgccgggtagaagtggaagaaaatctcgcgctggtcgcgctgattggcaacgatctgtctaaagcctgcggcgtcggtaaagaggtgttcggcgtactggaaccgttcaacatccgcatgatttgctatggcgcatccagccataacctctgtttcctggtgccaggcaccgaagcggagcaggtcgtgcagaagcttcatcataatttgtttgaataa

SEQ ID NO: 74356 - DNA, 939 bp, Citrobacter koseri
atgttatccgttatcacccggctgttcccgttatgggcgctgctgctctctgttattgcgtattacacgccatcgaccttcacccccattggctcgtgggtgaccacgctgctgatgctgattatgtccggcatgggcgtacaccttaagctcgactactttaaacgcgtgctttcccgcccggcacctgtcgctgccggtattttcctgcattatctggtgatgccgctcgccgcctggctactggcgatactgtttaacatgccgccggatctctctgccgggatggtactggtgggcagcgtcgccagcggaacggcatctaacgtcatgatctatctggcgaaaggggatgtggcgctttcggttactatctcatcggtttccacgctggttggcgtggtcgcgacaccgctactgacgcgcctgtatgtggatgcgcatattcaggtggatgtgatggggatgctgctcagcattttacagatcgtcgtggttccaatcgcgcttgggctggtcattcaccacctgtttcctcgcgtggtaaaaaccgtggagccttatctgcctgcgttctcaatggtgtgcattctggcgatcatcagcgcagtggtggccggttccgcctcgcatatcgcatccgttggttttgtggtgattgtggcggtgatcctgcacaacaccattggtctgctcggcggttactggggcggtcgcctgtttggctttgatgagtccacctgccgcacgctggcgattgaagttggaatgcagaactccggccttgcggcggcgctcggtaaaatttacttctctccgctggccgcgctccccggcgcgctgttctcggtctggcataacctctccggctcactgctggccggttactggtcaggcaagccgattgccgagaagccgcgtgatagggtgaaggtgtag

SEQ ID NO: 74357 - DNA, 273 bp, Citrobacter koseri
atggcactcccacgcatcacccaaaaagagatgaccgagcgcgagcagcgtgaactgaaaacgctgctcgaccgcgcgcgcattgcacatggccgtccgctcacgaatgcggaaaccaacagcgtgaaaaaggagtacattgataagttaatggcgctgcgcgaagcagaggccaaaaaagcccgccagttgaagaaaaagcaggcttataaaccagatactgaggcgtcgttttcctggtcggccaatacgccgacgcgcggcagacgttaa

SEQ ID NO: 74358 - DNA, 876 bp, Citrobacter koseri
atgctgcccgactcatctgtccgattaaataaatacatcagtgaaagcggaatttgctcgcgtcgcgaggcggatcgctacattgaacaagggaatgtcttcattaatggcaaacgcgccaccattggcgatcaggtgatgcctggcgatgtggtgaaggtgaatggtcggttgattgagccgcgcgaagcggaagatctggtctttatcgcgctgaacaagccagtagggattgtcagtaccacggaagacagcgaacgcgataacatcgtggacttcgtgaaccatagcaaacgtattttcccgattggccgtctggataaagactcccaggggcttatctttcttaccaatcacggcgatctggtcaacaaaatcctccgtgccggtaacgatcacgagaaagagtatctggtcacggttgataagccggtaacggatgactttattcgcggtatgggcgcaggcgtcccgatcctcggcacggtgaccaaaaagtgcaaggtgaagaaggaagcgccgtttgttttccgcattaccctgattcaggggctgaaccgccagatccgccgcatgtgcgagcactttggctatgaagtgacgaaactcgaacgcacgcgcattatgaacgtgagtttatccggtctgccgcccggcgagtggcgggatctgacggatgacgaactcatcgctctgtttaagctgatcgaaaactcttcatcagaagccaaaccgacgtcgaaggcgaaagcgaagccgaaaacggcgggcattaagcgtccggtggtgaaaatcgaaaaaaccaacgagaaagcgcgcccggcgtcaaacggaaaacgctttacctcgccggggcggaagaagaaagggcgttaa

SEQ ID NO: 74359 - DNA, 690 bp, Citrobacter koseri
atggaactgctgttattgagtaactccactctgccgggaaaagcctggctggaacacgcgctgccgctggtggcggaacaactgcatggccgccgttcagcggtgtttctcccgtttgctggcgtcacgcaaacctgggacgattacacagcgaaaaccgccgcagtccttgcgccgctcggcgtttcagtgaccggtattcatagcgttgccgatccggtcgcagcgattgccgatgcggaagtggtgattgtcggcggtgggaacactttccagttgctaaaagagagccgtgaacgtgggctgctggcgcccatcgtggctgccgttaagcgtggcgcgttgtatatcggctggagcgcgggcgcgaaccttgcctgtccgactattcgcaccaccaacgatatgctgatcgttgacccacaaggatttgatgcgctgggtctgttcccgttgcagattaacccgcacttcactaacgcgttgccggaaggtcacaaaggcgaaacccgcgaacagcgtattcgcgagctgctggtggtcgcgccagagttaacggtgattggcctgccggaaggcaactggattcaggtgagtaaggggcaggcgacgctcggcggcccgaacacgacgtatgtgttcaacgcgggtgaagaagcggttcctcttgaagccggtcatcgcttctga

SEQ ID NO: 74360 - DNA, 1632 bp, Citrobacter koseri
gtgttaactctgctacacctgctttctgctgttgccctgctggtgtggggcacccatattgtgcgtaccggcgtgatgcgcgttttcggcgcccgtctgcgtaccgttctcagccgcagtgttgaaaagaaaccgctcgccttctgcgcgggtatcggcgttactgcgctggtgcaaagcagtaacgccacgactatgctggtgacgtcatttgtcgcccaggatctggtcgccctgacgcctgcactggtgattgtgttgggggccgacgtggggaccgcgctgatggcgcgtatccttacctttgatttgtcatggttatcgccgctgctgattttcatcggcgttatcttctttttggggcgtaagcagtcacgcgccggacaactggggcgagtggggatcggtcttggcctgatactgctggcgctggagctgattgtgcaggcggtgacgccgattactcaggcgaatggcgtacaggtcatcttcgcctcgctgaccggcgacatcatgctggatgcgctgattggcgccatgtttgccatcatcagctattccagcctggcagccgtcctgctgacggccacgctgacggcggcgggcatcatatcgttcccggtcgcgttgtgcctggtcatcggcgccaacctcggttccggtctgctggcgatgctcaacaacagcgcagccaatgccgccgctcgccgcgtggcgctgggcagtctgctgtttaagctggtgggcagcctgattatcctgccgtttgtccatgtgctggccgatacgatggatgcgttaccgctgccaaaatccgaactggttatctacttccacgttttttacaacctggcgcggtgtctggtgatgattccgttcgccgaaccgatggcgcgtttctgtaaacgtattatccgcgatgaaccggagctggatgcccatctgaagcctaagcatctggatgtcagcgcgctggacacgccaacgctcgcgctggccaatgccgcccgggaagcgctgcgcattggtgatgcgatggagcagatgatggaaggtctgaaaaaggtgatgcacggcgagccgcgcgaagagaaagagctacgcaagctggcggatgatatcaacgtgctttacaccgccatcaaactctatctggcgcggatgccgaaagaggaactggcggaggaggagtcgcggcgctgggcggaaatcatcgagatgtccctgaacctggagcaggcctcggatatcgtcgaacggatgggcagcgagattgccgacaagtcgctggcggcgcggcgggcgttttccattgaagggctgaaagagctggatgcgctgtatgatcagttactcagcaacctgcaactggcgatgtcggtgtttttctccggcgacgtcaccagcgcccgacgtttgcgtcgcagcaaacatcgtttccgtattctcaatcgtcgttattcacatgcgcatgtggatcgcctgcaccagcagaacgtacagagcatcgaaaccagttcattgcatctgggactgctgggcgatatgcaacgcctgaattcgctgttttgttcggtggcttacagcgtgctggagcagccggatgaagacgacgagcgggatgactattaa

SEQ ID NO: 74361 - DNA, 3684 bp, Citrobacter koseri
gtgagcagcaaagttgaacaactgcgtgcgcagttagatgaacgtattctggttctggatggtggcatggggacaatgatccagagctatcgcctgagtgaagaggattttcgcggcgagcgttttgctgactggccctgcgatttgaaaggcaacaacgacctgctggtactcagcaagccggaggtgattaccgcgattcatcacgcttactttgaggcgggtgcggatatcatcgaaaccaacacgtttaactccacgacgattgcgatggcggattaccagatggaatccctgtcggcggaaatcaactttaccgctgcgaaactggcccgcgcctgcgccgatgaatggacggcgcgcacgccggaaaaaccgcgctacgttgcgggcgtgcttggcccaaccaaccgcaccgcatccatctcgccggacgtgaacgacccggcgtttcgtaatatctccttcgatcagctggtcgcggcctatcgcgaatccaccaaagcgctggtggaaggcgggtcagacctgattctgattgaaaccgtcttcgacacgctgaatgcgaaagctgccgtttttgcggtgaaagaagaatttgaagcgctgggcgtcgagctgccgattatgatctccggcacgattaccgatgcgtccgggcgcacgctctccggccagactaccgaagcgttttataactcgctgcgtcacgccgaagcgctcacctttggtcttaactgcgcgctggggccggatgaactgcgccagtatgtgcaggaactggcgcgcattgccgaatgctatgtcaccgcgcacccgaatgccggtctgcctaacgccttcggcgaatacgatcttgatgctgatacgatggcgaagcagatccgcgagtgggcggagtcgggctttctcaacattgtcggcggctgctgtgggacgacgccggaacacattgccgcgatgagccgcgcggttgatggtttagcgccgcgtaaactgcccgatattccggttgcctgtcgtctctctggccttgagccgttgaatattggcgatgacagcctgtttgtaaacgtgggggagcgtaccaacgtcaccggttccgctaaatttaagcggctgatcaaagaagagaaatacagcgaagcgctggatgttgcccgccagcaggtggagagcggcgcgcagattatcgatatcaacatggatgaggggatgctcgatgccgaagtcgcgatggtgcgcttcctcaacctgattgccggtgagccggatatcgcccgcgtaccgatcatgatcgactcctcaaaatgggaggtcatcgaaaaagggctgaaatgcattcagggtaaaggcatcgttaactccatttcgatgaaagagggcgtggaaacctttatccaccatgcgaagctgctgcgtcgctatggcgcggcggtagtggtgatggcctttgatgaacaagggcaggccgatacccgcgcgcgtaagatcgagatttgccgccgggcgtacaacattctcaccaaagaggtgggcttcccgccggaagacattatctttgacccgaacatttttgccgtagcgaccggtatcgacgaacacaacaactacgcgcaggactttatcggcgcctgtgaagatatcaaacgcgaactgccgcacgcgctgatctccggcggcgtctctaacgtctccttctcgtttcgcggcaacgatccggtgcgcgaagcgattcatgcggtgttcctctactacgccatccgtaacggcatggacatggggatcgtcaacgccgggcaactggcgatttatgacgacctgcccgccgaactgcgcgacgcggtggaagatgtgatcctcaatcgccgcgacgatagcaccgagcgtctgctggcgctggcggaaaaataccgtggtagcaaagccgatgattcagccaatgcgcaacaggcggaatggcgcagttgggaagtgaaaaaacgccttgagtattcgctggtaaaaggcattaccgagtttatcgaacaggataccgaagaagcccgtcagcaggcgacgcgtccgatcgaggttatcgaagggccgctgatggacggtatgaacgtggtgggcgatctgttcggcgaaggcaaaatgttcctgccgcaggtggtgaaatcggcccgcgtcatgaagcaggcggtggcgtatctggaaccgtttattgaagccagcaaagagcagggctccagcaacggtaaaatggttatcgccaccgtgaagggcgatgtgcatgacattggcaaaaacattgttggcgttgttttacagtgcaacaactatgaaatcatcgatcttggcgtcatggtgccggcagaaaaaatcctcaaaaccgcgaaagaagtgaatgcggatttgattggtctctccggcctgattaccccgtcgctggatgaaatggtcaacgtggcgaaggagatggaacgtcagggcttcaccatcccgctgctgattggcggcgcgaccacgtccaaagcgcacacggcggtgaagattgagcagaactacagcggcccgacggtctatgtccagaacgcctcgcgtaccgtgggcgtcgtggcggcgttgctgtctgaaacccagcacgatgagtttgtcgcccgtacccgtaaagagtatgaaaccgtgcgcatccagcatgcgcgtaagaaaccgcgcacgccgccggtgacgctggccgccgcgcgtgataatgacctggcatttgactgggaaagctatacaccgcctgtcgctcatcgtctgggcgtgcaggacgttgaggccagtatcgaaacgctgcgcaactacatcgactggacgccgttctttatgacctggtcgctggccgggaaatatccgcgcattctcgaagacgaggtggtgggcgaagaggcgaaacgcctgtttaaagacgccaacgacatgctggataaactgagtgcggagaagacgctcaacccgcgtggcgtggtgggtctgttcccggcaaaccgtgtgggtgatgatatcgaaatttatcgcgatgagacgcgtacccatgtgctggcagtcagccatcatctgcgtcagcaaacggagaaggtgggtttcgccaactattgcctgtctgactttgttgcgccgaaacagagcggcaaagaggattacatcggcgccttcgccgtcacgggcggtctggaagaggatgcgctggcagaggcattcgaggcgcagcatgatgattacaacaagattatggtcaaagcgatcgccgaccgtctggcggaagcctttgcggaatacctgcatgagcgggtgcgtaaagtttactggggctatgcggcgaatgagaacctcagcaacgaggagctgatccgcgaaaactatcaggggattcgtccggcgccaggctatccggcctgcccggagcacactgagaagggcaccatctggcaactgctggacgtggaaaaacataccggcatgaagctgaccgaatcctacgccatgtggccgggcgcttccgtttccggttggtacttcagccatcctgacagcaagtactacactgtcgcgcaaatacagcgcgatcaggtggaggattatgcgcagcgtaaagggatgacggtcgcggaggtggagcgctggttggcttccaacctgggctatgatgccgactag

SEQ ID NO: 74362 - DNA, 825 bp, Citrobacter koseri
atggttgcccctgtccccgcgaaacgcggtagaaaacccgccgctgccactgcgcccgcaaccgggcaggttcagtcgctgacccgtggcctgaagctgctggagtggattgccgaatccaacggcagcgtcgcgctgaccgaactggcgcagcaggcgggtctgccgaactccacgactcaccgtttgttaaccaccatgcagcagcagggctttgtgcggcaggtgggagatctgggccactgggccgtgggcgcccatgcgtttatcgtcggcagcagttttttgcagagccgtaacctgctggcgattgtccaccctatcctgcgtaaactgatggaagactccggtgagacggtcaatctggcggtgctggatcagagcgatcaccaggcgattattatcgaccaggtacagtgcacacagctgatgcgcatgtctgcgcccatcggcggcaaactgccaatgcacgcttccggcgccgggaaagcgtttctggcacaactcagcgaagagcaggtgactggcctgctgcaccgtaaagggctgcatgcctatacccacgccacgctggtgtcgccggtacatctgaaagacgacctcgcccagacgcgcaagcgcggttattcctttgatgatgaagagcacgcgcttggcctgcgttgcgttgcgtcgtgcatttacgacgagcaccgcgagccgtttgctgcgatctcaatttccgggccgatttcccgcatcactgacgatcgcgtcaccgagtttggcgcgatggtgattaaagcagcgaaagaagtcacgctggcatacggcgggtttagataa

SEQ ID NO: 74363 - DNA, 1350 bp, Citrobacter koseri
gtgccatttatctcacgtaaatgggcgcatttatcgcgcggcgcatcacgtattctcagcgatctaccgctgcgtttgccctggcaaaacaaaagccgtgatattcattacatcattgctcacctgacggaaacgttcggagcggaggctttgcaccgcagccatttgcaggtggcgaatgagctgttttatcgcaataaagccgcctggctggtggggaagttgctgaccccagccggcacgttgccgtttttgctgccgattcatcgcaccgatgaaggcgaactgtttgtcgatacctgcctgaccaccacggctgaggccagtatcgtgtttggttttgcccgttcctacttcatggtgtacgcgccgttgcctgccgcgctggttgagtggttgcgtgagatcctgccaggtaaaaccaccgctgagctgtacatggcgattggctgtcagaagcatgcgaaaaccgagagctatcgcgagtatttactgtatctggcgaacagcgatgagcagtttattgaagcgcccggtattcgcggcatggtgatgctggtgtttacgctgccgggctttgaccgggtgtttaagatcatcaaggataggtttgccccacaaaaagagatgtcggccgcccatgtgcgcgcctgctatcaactcgttaaagaacacgatcgcgtcgggcggatggccgatacgcaggagttcgagaactttgtgctggagaagcggcgaatcgcgccagcgctgatgacgctgttgcgccaggaggcgccggagaaaatcatcgaccttggcgatcagatagtgattcgccatctctacattgagcgtcgtatggtgccgctgaatatctggctggagcaggtggagggccagcaactgcgtgacgcgattgaagagtacggcaatgcgattcgccagcttgccgccgccaacatcttccccggcgacatgctgtttaaaaactttggcgtcacccgccacgggcgcgtggtgttctacgattacgatgaaatttgctacatgacggaagtgaatttccgcgacattccgcaagcgcgctacccggaagatgagctggccagcgagccctggtacagcgtttcgccaggggatgttttcccggaagagtttcgccactggctgtgcgctgacccaagaattgggccgttatttgaggagatgcacgccgacctgttccgcgccgactactggcgggcgttacagacgcgtatccgcgaaggacatgtggaagatgtttacgcctatcggcgcaaacagcggttttgcttcagatttgggcttgacgcccggtggcgctgcgcttaccgggcctacacgtga

SEQ ID NO: 74364 - DNA, 582 bp, Citrobacter koseri
atgacagtcattggttatatccgcgtatcaacaatcgaccagaacagcgatttacagcgtaatgcactcataagcgcaaactgtgaccgcatttttgaagaccgtatgagcggaaaagttgccagccgccccggtctgaaacgcgctttaaagtgcgttaatagcggtgacaccctggtcgtgtggaaactggacaggctgggacgcagcgttaagaacctgatcgcactgatatcagagttacatgaacgcggtgcccacttccgctctttaacagacagtattgataccagcactgccatggggcgtttctttttccatgtgatgtcggcactggcggaaatggaacgtgagttgatcgtcgaacgaacactggccgggttagcagcagccagagcacaaggacgcataggtggaaggcccaacgcattaaagcctcatgagcgagaacagattgggcggctattggctaaggggcatacccgccagcaactggccattatctacggggtggggttatcgacgctctaccggtattttccggtagatagtcagaggaaggatgacgcggtaggattgtaa

SEQ ID NO: 74365 - DNA, 1098 bp, Citrobacter koseri
atgaaaggacgttgggcaaattaccttcttatgggggcggtggttgcaatgcttgccgcctgttcctctaaaccgaccgatcgcggccagcagtataaagacgggaagtttacccagcctttctcactggtgaaccaacctgacgccattggggcgcctatcaacgcaggcgatttcgccgagcaggtcaaccaaatccgcagcgcgtcgccgcgtctgtatggcaaccagagcaacgtctataacgccgtgcaggagtggttacgttccggtggcgatacgcgaatgatgcgccagtttggtattgatgcctggcagatggaaggggcggataactacggtaacgtccagtttaccggctactacacgccggttattcaggcgcgccatacccgtcagggggagttccagtaccctatttatcgcatgccgccaaaacgcggccgcttaccgtctcgtgccgagatctattccggcgcgctgagcgacagctacattctggcgtacagcaactcgctgatggataacttcatcatggacgttcagggcagcggctatattgattttggcgacggcagcccgctgaatttcttcagctatgccgggaaaaacggccatgcttaccgcagtatcggcaaggtgctgatcgatcgcggtgaagtgaagaaagaagatatgtcgatgcaggccattcgccactggggagaaacccacagtgaagcggaagtgcgcgagctgctggagcaaaacccgtcattcgtcttctttaagccgcaatcttttgccccggtgaaaggcgccagcgccgtgccgcttatcggccgtgcgtctgtggcttccgatcgcagcattatcccggcaggaacaaccctgctggcggaagtcccgctgctggataacaacggcaagtttaacggccagtacgaactgcgcctgatggtggcgctggacgtgggcggcgcgattaaaggccagcactttgatatttatcaggggataggcccggacgccgggcaccgcgcaggctggtataatcactatgggcgcgtctgggtgctgaaaaacgccccgggaaccggtaacgtatttagcggttga

SEQ ID NO: 74366 - DNA, 807 bp, Citrobacter koseri
atgtctgttgtaattagtgatgcctggcgccagcgttttggcggcaccacccgtctgtatggtgaaaaagcgttgcagctgtttgccggtgcgcatatttgcgtagtcgggatcggcggcgtcggctcctgggcggcagaggcgctggcgcgtaccggcattggcgcgatcacgctcatcgatatggatgacgtatgcgtcaccaacaccaaccggcaaattcatgcgctgcgcgataacgtcggtctggcgaaagccgaggtgatggccgagcgtattcgtcagatcaacccggagtgccgggtgacggtggtggatgactttgtcacgccggataacgtcgcggagtatatgagcgcagggttttcgtatgtcattgatgccatcgacagcgtgcggccaaaagccgcgctgattgcctggtgccgccgaaataaggttccgttagtcaccaccggcggggcgggtgggcagatagacccgacccagattcaggtaacggatctggcgaaaaccatccaggacccgctggcggcgaaactgcgcgaacggttgaaaagcgactttggcgtggtgaaaaacagcaagggcaaactgggcgtggactgcgtgttctcaacggaagcactggtttatccgcaggctgatggttccgtatgtgcgatgagagcgacggcggaagggccgaaaagaatggattgcgcctctggattcggcgcagccacgatggtaactgcgacctttggctttgttgctgtgtctcatgcgctgaagaagatgatggtgaaggcggcgcgtcaggcttga

SEQ ID NO: 74367 - DNA, 447 bp, Citrobacter koseri
atgacaagccctctttttgccggacacccgtttggcacgaccgtaacggaagagacgttacgcgctctctttatcccgctctcgcagtgggaggacaagtatcgccagcttattctgttgggtaagcaactcccggcattgccggatgagctaaaaacgcaggcaaaagagatcgcaggatgtgagaaccgcgtctggctggggcataccctgtcagagaagggaacgctgcactttttcggtgacagcgaagggcgtattgtacgcggtttgctggcggttttactcacggcggtagagggaaagaccccggcggaactgctggcgcactcgccgctggggttgtttgatgagttaggcttaacaacacaacttagcgcatcgcgcagccaggggctgcatgcgctgaataacgcgattcttgaggctgcccagcaagccggatga

SEQ ID NO: 74368 - DNA, 1206 bp, Citrobacter koseri
atgaacgctttcaatcctgcgcagtttcgcgcgcaatttcctgcccttaccgatgcgggcgtttatctcgacagcgccgcgacggcgcttaagcctcaggccgtgatcgacgctacgcatcagttctacaacctgagcgccggaaacgtccatcgcagccagttcgccgaggcacagcggctaaccgcacgctatgaagcggcgcgcggcaaagtggcgcagtggctgaacgcacctgatgatgcttcgattgtctggacacgcggcaccacggaagccatcaatatggtggcgcaatgctatgcccgcccgcgcctgcaacccggcgatgagataatcgtcagtgaagcggagcatcacgcgaatctcgttccctggctgatggtcgctcagcagacgggcgcaaaaatcgtcaaactgcccctgaatgcccttttcctccccgacgtggagcgtctgcctgaactcatcacgccacgcagccggattctggccctgggacagatgtcgaacgtcacgggcggctgcccggacctggcgcgcgctatcacgctggcgcacgcggcagggatggtggtgatggttgacggcgcacaaggcgcggtgcatttccccgccgatgtacagcagttagatattgatttttatgccttctccgcccataagctgtacggcccgacgggcatcggcgcgctgtacggcaaaccggccttactggaagagatgtccccgtggctcggcggcggcaagatgatcgctgaagtcaattttgaaggattcacaacccaggccgttccctggcgtctggaagccggcacgccaaacgtggctggggttattggccttagcgccgcgctggagtggctggcggaagtggatatggcgcaggccgaaagctggagtcgcggtctggcgacgctggcggaagacgcgctggcgaagcgtccgggtttccgctctttccgttgccaggactccagcctgctggccttcgattttaccggcgttcatcacagcgatatggtgacattactggccgaatacggcatcgccctgcgcgccgggcagcactgcgcgcagccgctactggcggcgcttggcgtaacgggcaccctgcgcgcctcttttgcgccgtataatacaaagcatgatgtggatgcgttggtcagcgccgttgaccgcgcgctggaaatactggtggattaa

SEQ ID NO: 74369 - DNA, 234 bp, Citrobacter koseri
atgaaaatgaaaaagactgccgcaatgatctctgcatgtatgctgacttttgccctgagcgcctgttccggtccgaattatgtgatgcacacaaatgatggccgtactatcgtgtcagacggtaagccaaaaaccgatgatgaaaccggcatgatttcttataaagacgctaacggcaacaaacagcagatcaatcgtactgacgttaaagagatggtcgaactggatcagtaa

SEQ ID NO: 74370 - DNA, 777 bp, Citrobacter koseri
ttggggctaaaactgttccgtcgtcgcaatcgttcgcttttgctcacggaagaggggcagagctatttcctcgacatcaaagagattttttcgcaattaaccgaagcgacgcgtaaacttcaggcgcggagtgcaaaaggcgcgcttacggtcagtttattgcccagttttgcgatccagtggctggttcctcgactctcaagctttaactcaacttatccgggaatcgatgtcagaattcaggccgtggaccgtcaggaagataagctggctgatgatgtcgacgtcgctattttttatgggcgtggcaactggccaggcttgcgcgtcgaaaaattgtacgcagaatatttactgccggtgtgttcaccgttattactgacgggcgataagccgttaaagacgccggaagatctggcaaaacatacattactgcatgatgcttcgcgaagagactggcagacctatacgcgtcagttggggctgaatcatattaatgtgcagcagggacctattttcagccatagcgcaatggtgctacaggctgccatccacggacagggggttgcgctggcgaacaacgtcatggcgcaatcagaaattgaagccgggcgtcttgtctgtccctttaacgacgttctggtcagtaaaaatgctttttatctggtttgtcatgacagtcaggcagaactgggtaaaatagccgcctttcgtcagtggattctgaccaaagcggccgctgaacaagaaaaattccgctttcgttacgaacaataa

SEQ ID NO: 74371 - DNA, 396 bp, Citrobacter koseri
atgaccagccgttttatgctgatttttgccgcgataagcggctttatctatgttgctctgggtgcctttggggcgcatgtcctgagcaaaactcttggtgtggttgaaatgggctgggtccagaccggcctgcaatatcaggcgtttcatacgctggccatttttggcctggcggttgcgatgcagcgacgcattagcatctggttttactggagcagcgtttttctggcgttaggtacggtgctgtttagcggcagcctgtattgcctggcgctgtctcatttacgcctgtgggcgtttgttactcctgtcggcggcgtgagtttcctggcaggctgggtgctgatgttaattggcgccatccgtttgaaacgtaagggcgttggtcatgaataa

SEQ ID NO: 74372 - DNA, 1044 bp, Citrobacter koseri
atgacggataaggcggcgcgtcgggaaatctttggcttcgctcgtgttaaagacaatgccggatacgtcgtctttgagtgctatcagccggacgatgctgaaaaaatagtaaaagagttgcctttttcctcgctcatttttgcgcgtcagatgttcgtcgtcggcgagctgctgcgcgacctgccgccggacgatcgcattacgccgattgtcgggatgctacagggcgttgtggaaaaaggcggcgagctgcgtgttgaagtcgcagacaccaatgaaagcaaagagttgatgaagttttgccgtaaatttacggtgccgctgcgggccgcgctgcgcgacgcggggattctgacaaactatgaaacgccaaagcgtccggtggtgcatgttttcttcatcgcgccgggctgctgttataccgggtattcgtatcctgacaacaactcgccgttctatatggggattccgcggctgaaattcccggccgatgcgccaagccgttcgacgctgaagctggaagaagcgctgcatgtttttattccggccgatgagtgggatgaacgtctggcgaacgggatgtatgccgtggatttaggcgcctgccctggcggttggacctaccagttagtgaagcgcaacatgtgggtttactctgtcgataacggcccaatggcgcagagcctgatggataccgggcaggtgacctggctgcgcgaagatggattcagataccgtccgaaccgtaacaacatctcgtggatggtgtgcgacatggtggaaaagcctgctaaggttgccgcgctgatggcgcagtggttagtaaacggctggtgtcgcgagacgatcttcaatctcaagctgccgatgaaaaaacgctatgaagaggtgtcgcagaacctggcgtatattcaggcgcagcttgatgaacacggcattaacgcgcaaattcaggcgcgacagctgtatcacgatcgtgaagaagtgaccgtgcatgtccgtcggctgtgggccgccgtgggcgggcgtcgcgacgagcggtaa

SEQ ID NO: 74373 - DNA, 723 bp, Citrobacter koseri
atgaaagcggcacgccaacaagcgatagtagacctgctgatcaaccataaaagtctgaccaccgaggcgctgtcggtacagcttaacgtcagcaaagagaccattcgccgcgatctcagcgagctacaggcgcagggaaaagtgctgcgcaatcacgggcgcgccaagtatattcaccgggaaaaccaggacagcggcgacccgttccacatccggctgaaaagccactatgcgcataaggcggatatcgccagggaggcgctggcatggatagaaccgggcatggtgatcgctctggacgccagctcaacctgctggtatctggcccgccagttgccggacattgatattcacgtctttaccaacagtcacccgatttgccaggaactgggcaaacgcgagcatattcagctcatcagttccggcggccagcttgagcgtaaatatggctgctacgtcaatccgtcgcttatttctcagcttaagccgctcgacattgacctgtttattttttcctgcgaggggatcgaccgcggcggcgcgctctgggactcaaatacgatcaacgcggatttcaaatccacgctgcttaagcgcgcatcgcagtctttattgttgatcgacaagagtaagctcaaccgctcgggagaggcctgcatcgggcatctggatgatgtgacgcacatcatttccgatgagcgacagggggtaattcatgcctga

SEQ ID NO: 74374 - DNA, 423 bp, Citrobacter koseri
atgctaaaaactatttcgccattgatatcccctgagttactgaaagtgctggctgaaatggggcacggggatgagattattttttccgatgcccactttcccgcgcacagcatgggaccgcaggttattcgcgcagatggtctgaaagtcagcgatctgctccgggcgattatcccgctgtttgaactggacagctacgcgccgccgctggtgatgatggccgccgtagagggcgattcgctcgacccgacggttgaagcgcgttatcgcgatgcgctctcattgcagacgccgtgcccggagattgtccgcatcgaccgctatgcgttttatgagcgggcgcaaaaagcctttgcgatcgttatcacaggagagtgcgcgaagtacgggaatattcttttaaaaaaaggggtaacgccgtaa

SEQ ID NO: 74375 - DNA, 1419 bp, Citrobacter koseri
atgaaacaagacgtcattctggttctcgactgcggcgccaccaacgtacgggcaatggccgttgaccgtcagggaaacattgtcgcccgcgcatcaacagcgaatgccagcgacatcgccacggaaaatagcgcctggcatcagtggtcgctggcggccattctgcaacgcttcgcggactgctgtcagcaactaaagacggaactggcggcctgccgggttcgcggcatcaccgtcacgacgttcggcgtagacggcgcgctggttgatgaacagggtcagttacgctatccggtcatcagctggaaatgcccccgcacccttgccgtcatggaaaacatcggccgctttatgccgccgcagcagttgcaggcgatctccggcgtcggcgcattcgcctttaatacgctgtataaactggtgtggctgaaagagaaccacccgcagttgctcgaacaggcgcacgcctggctgtttatttcatcgctgatcaaccaccgtttaaccggtgaattcaccacggatatcaccatggcgggcaccagccagatgctggatatccaccagcgggatttcagcccggagattttacaggccacgggtttaccccgccgtctgtttccacggttagttgaagcgggcgaacggattggcacgctgcaaaacgacgccgcaaacctgcttgggcttgaggcgggtattccggtgatctccgccgggcatgacacgcagtttgccctttttggcgccggcgcagaacaggatgaaccggtactctcgtccggtacgtgggaaatcctgatggtacgcagcgcgcaggtgaacacgccgctgctcagccattacgccggctccacctgtgaactggacagccaggccgggctttataacccaggcatgcagtggctggcttccggcgtgctcgaatgggtacgcaaactgctctggacgccagaaacgccgtggcagacgctgattgacgaggcgcacgccattccgccgggtgctgaaggcgtgaagatgcagtgcgatctcctcacctgtcaaaacgcgggctggcagggggtgacgctgaacacaacgcgtggtcatttttaccgcgccgcgctggaagggctcacggcgcaactgcaacgtaatctgcaaacgctggaaaagattggtcacttccaggcaactgagcttctgctggttggtggcggaagccgcaacgcgctgtggaatcaaatcaaagccaatctgcttgatataccgattaaggtgctggatgacgcggaaaccaccgtcgccggggccgccatgttcggctggtatggcgtaggcgaatttgccagcccggaacaggcccgagcccaggtgcgctatcagtaccgctatttctggccgcaaactgaacccgaatttattgagggagtgtga

SEQ ID NO: 74376 - DNA, 1776 bp, Citrobacter koseri
atgaaaaaaatcagcttaccgaaaattggcattcgcccggttattgatggacgtcgcatgggggtacgcgagtcgctggaagaacagaccatgaatatggcgaaagccaccgctgcgcttatcaccgaaaaactccgccatgcctgcggcgcgcagattgagtgcgtgattgcggatacctgcattgccggaatggcggaatccgccgcctgtgaagagaaattcagcagccagaatgttggcgtaaccattaccgtgacaccgtgctggtgctacggcagcgaaaccatcgatatggacccaatgcgcccgaaagccatctggggcttcaacggtacggaacgtcccggcgccgtttatctggccgccgcgttggccgcgcacagccagaaaggcattccggcattctctatttatggtcatgacgtacaggatgccgacgacacctcgatccctgccgacgttgaagaaaaactgctgcgctttgcgcgcgctggtctggcggtcgccagcatgaaaggcagaagctacctctctgtgggtggtgtctcaatggggattgccggttccatcgtcgatcacaacttctttgagtcctggctggggatgaaagtgcaggcggtggacatgaccgagctgcgccgtcgcatcgaccagaaaatctatgacgaagccgagctggagatggcgctggcgtgggcggataaaaacttccgctatggcgaggatcagaacgcgcagcagtacaaacgtaatgaagaacaaagccgcgcggtgctgaaagagagcctgctgatggcgatgtgcattcgcgacatgatgcagggcaacaacaagctggcggaaaaagggctggtcgaagagtcgctgggatataacgccattgcggcaggcttccagggccagcgccactggaccgatcaatacccgaacggcgacaccgccgaagcgctgctgaacagctcctttgactggaacggcgtgcgcgaaccgtttgtcgtcgctaccgaaaacgacagcctcaacggcgtagcgatgctgctgggccatcaactcaccggaaccgcgcaggtctttgccgacgtgcgaacctactggtccccggaagcggtagagcgcgtcacaggccagccgctcaccggccttgcggagcacggcatcattcacctgatcaactccggctctgcggcgctggacggctcctgcaagcagcgcgatagcgaaggcaaaccaaccatgaagccgcactgggaaatcagccaacaggaagcggacgcctgcctggccgctaccgaatggtgcccggcgatccacgaatacttccgtggcggcggctactcctctcgcttcctgaccgaaggcggcgtgccgttcaccatgacccgcgtgaacatcatcaagggtctggggccggtactgcaaatcgctgaaggctggagcgtggaactgccgaaagagatgcacgatcagctcgacgcccgcaccaactcgacctggccgaccacctggtttgcgccgcgtcttaccggtaaaggcccgttcaccgacgtttactcggtgatggcgaactggggcgctaaccacggcgtactgaccatcggccacgtcggcgctgacttcatcacgctcgccgccatgctgcgtattccggtctgcatgcacaacgtggacgatgcgaaaatctaccgtccttccgcctgggctgcgcacggtatggatattgaaggccaggattatcgcgcctgccagaactacgggccgctgtacaaacgttaa

SEQ ID NO: 74377 - DNA, 1311 bp, Citrobacter koseri
atgggaaacacaacaatacagacgcagagttttcgtgcggtggatacagggcaaagcaaacgctatatcattccgttcgctttactctgctcactgtttttcctttgggcggttgccaataacctgaatgacattttattaccacaatttcagcaagcttttacgttaactaatttccaggcaggtttgattcagtctgctttttatttcggctattttgttattcccatccccgcgggtattttgatgaaaaagctgagttataaagcggggataattaccggactattcttatatgcttttggcgcggcattattctggccggctgctgaagtgatgaattacaccttgtttttgattggtctttttattattgccgcaggacttggttgtcttgaaaccgccgcgaacccttttgttacggtattagggccagaaagcggtggccatttccgtctcaatctggcgcaaacatttaactctttcggcgctattatcgccgtggtgttcgggcaaagtcttattttgtctaacgtcccacatcaatctcaggacgtgctcgataaaatgacgcctgagcaattgagtacgtataaacacagcctggttttgtcggtacagacgccttatatgatcatcgtggctatcgttttactggttgccctgctgatcatgctgaccaaattcccggcgctacagagcgacgatcacagtgacgcccaacaaagttcattcaccgcttcgcttgcccgcctggtgcgtattcgccactggcgctgggcggtgctggcgcagttctgctacgtcggcgcgcaaaccgcctgctggagctacctgatccgttacgctatcgaagagatccccggcatgacgcctggctttgccgccaactacctgaccggcacgatggtgtgcttctttattggccgcttctccggcacctggcttatcagccgctttgcgccgcataaagtgctggcggcctatgccctgctctccatgatcctgtgtctggtttcagcctttagcggcggccatatcggcctgctggccctgacgctgtgcagcgcatttatgtcgattcagtaccccactatcttctcgctgggtattaaaaatctgggacaggacaccaaatacggctcgtcgttcatcgtcatgaccatcattggcggcggcatcgtcacgccggtcatgggttttgtcagcgatgcggctggcaacatcccaacggctgaactggtcccggcgctctgctttgccgtcatcttcatctttgcccgtttccgttcacaagcggcaactaactga

SEQ ID NO: 74378 - DNA, 648 bp, Citrobacter koseri
atggaacgaaacacactggcccgccagattatcgacacctgcctggagatgacccggctggggttgaaccaggggaccgcaggcaatgtgagcgtgcgttatcagggcgggatgctgatcacgccaacgggcattccgtatgacaaactcaccgaatcacatatcgtctttattgatgcagagggccagcatgagcagggaaaattgccttccagcgagtggcgtttccatatggcggcctaccagacgcgcccggatgctaacgctgtcgtccataaccatgccgttcactgcacggcggtgtcgatcctcaatcgtcctattccagccattcattacatgattgcggcggcgggggggaactccattccgtgtgcgccttacgccacgttcggcacgcgtgaactttctgaatacgttgccgttgcgctcaaaaatcgcaaagcgaccctgctacagcatcatgggttgatcgcctgcgaagagaacctggaaaaagcgctgtggctggcgcatgaagtggaagtgctggcgcagctgtacctcagtacgctggcgattaccgatccggtgcctgtactggatgatgaggctatcgccattgtgctggaaaaattcaaaacctacggattacgtatcgaagagtaa

SEQ ID NO: 74379 - DNA, 1149 bp, Citrobacter koseri
atggcgaacagaatgatcctgaacgaaacggcatggtttggccggggggcggtggcggcgttaaccgatgaggttcaacgccggggctatcgcaaggcgctaattgtcagtgacaaaacgctggtgcagtgcggtgtggtcagaaacgtcacggagaagatggatgccgcagggctggcatgggcgatctacgatggcgtgatcccaaatccaaccatcggcgtggtgaaagaggggctgaacgtatttcaacaaagcggggcagactacctgattgccatcggcggcggctccccgcaggatacctgtaaggcgatcggtattatcagcaataaccctgagtttgctgacgtgcgcagtctggaaggtctgtcgccgacccgttatccgagcgtaccggtgatggcgatcccgaccactgcgggaaccgcagcggaagtgaccattaactatgtgatcaccgatgaagaaaagcggcgtaaatttgtttgtgtcgatccgcatgatatcccacaggtcgcgtttattgatgccgacatgatggacggcatgccgcccgcgctgaaggcggcaaccggggtggatgcgttaacccacgcgatcgaaggatacatcactcgtgccgcgtgggcgttgacggatgcgctgcatattaaggccattgagattatcgccggggcattgcgtggttcggttgcgggcgagcgtgaagcgggcgaagcgatggcgctggggcagtacgttgccgggatgggtttttccaacgtggggcttgggctggtgcacgggatggcgcatccgctgggcgcgttttataacaccccgcacggcgttgctaatgcgattcttctgccgcatatcatgcgctacaacgcggaatataccggtgagaagttccgtgatatcgcgcgtgcgatgggcgagaaggtcgaagggataagtttgagcgaggcgcgtaatgccgccgtggaagcggtatttaccctcaaccgggacgtcggtattccgttgcatttacgcgatgtcggcgtgcgtaaagaggatattccggcgctggcgcaggcggcatttgacgatgtttgcaccggtggtaatccgcgtgaagcgagtattgccgatatcgtcgagttgtatcataccgcctggtaa

SEQ ID NO: 74380 - DNA, 756 bp, Citrobacter koseri
gtggccgtccatctgcttatcgtcgatgcactgaatttaattcgccgtattcatgcggttcaaggctcgccctgcgcggagacctgcctgcatgcgcttgagcagttgattgtacacagtcagccgacgcacgccgtcgccgtatttgacgatgaagcgcgcaacagcggctggcgtcatcagcgtctcccggactacaaagccggtcgtcctcccatgcctgacgagttgcacaatgaaatgcccgcaatacgcgccgccttcgaacagcgcggcgtgcaatgctgggtttccagcggcaatgaggcggatgatttagccgccacgctggcggtcaaggtcacacaggccgggcatcaggccactatcgtttctaccgacaaaggctactgtcagttgctctccccgacgctgcgtatccgcgattatttccagaaacgctggctggatgcgccattcattgagaaagagttcggcgtcctttcccaacagttgccggactactggggactggcggggatcagcagttcaaaagtccccggcgtggcgggtatcggccccaaaagcgcgactcaattgttggttcagtttcagactctggaagggatttatgcgcacctcgacgaggtggcggaaaagtggcgcaagaagcttgaagcgcataaagagatggcatttttgtgccgcgatatcgcgcgcctgcaaacggatctccatatcgacgggaacttgcagcagctacggctgacgcggtag

SEQ ID NO: 74381 - DNA, 1368 bp, Citrobacter koseri
atgattagcgtattcgatattttcaaaatcggcattggcccttccagttctcacaccgtcgggccaatgaaagcaggcaaacaattcacggatgatctgattgcccgcaatatcctgaccgatgtcacccgcgtcgtggtggatgtttatggttcactgtcactgaccggtaaaggtcaccacactgacattgccattattatgggtctggcgggaaatctgccggataccgtcgacatcgacgccattccgttctttattcaggacgtgaatacccacggacgtttactgctggcgaatggtcagcatgaagtggagtttccggtcgataagtgcatgaatttccatgccgacaacctgtctctgcatgagaacgggatgcgtattagcgcgctggcgggcgataaggttctctacagccaaacttactactccattggcggtggtttcatcgttgatgaagaacatttcggtttgtcgaacagtgcgccggtcaacgtgccgtatccgtacaaatccgcagccgatctgcaaaaacactgccaggaaaccggtctgtcgctttccggcctgatgatgcaaaacgagctggcgctgcacagcaaagaagcgctggaacagcactttgccaacgtctgggaagtgatgcgcggcggtattgaacgcggcatcacgacggaaggcgtactgccgggtaaactgcgcgttccacgtcgtgccgcggcgctgcgtcgtatgctggtcagccaggataaaaccacgaccgacccgatggcggttgtcgactggatcaacatgttcgcgctggcggtcaacgaagagaacgcggcgggcgggcgtgtcgtgactgcgccaaccaacggcgcatgcggcatcgttccggcggtactggcgtactacgacaagtttatccgcgaagttaacgccaactcactggctcgctacatgctggtggccagcgcgatcggctctctgtacaagatgaacgcctccatttccggtgcggaagtgggctgtcagggtgaggtcggcgtggcctgctctatggcggcggcgggtctggcagagctgctgggcggcagtccgacgcaagtgtgtatcgctgcggaaatcggcatggagcacaacctgggtctgacctgcgacccggttgcgggccaggtacaggtgccgtgcattgagcgtaacgcgattgcctccgtgaaagcggtcaacgccgcgcgtatggcgctgcgtcgtaccagcgagccgcgcgtgtgcctcgataaagttattgagaccatgtacgaaaccggtaaagacatgaacgccaagtaccgtgaaacctctcgcggcggcctggcgatgaagattgtcgcctgcgattaa

SEQ ID NO: 74382 - DNA, 1290 bp, Citrobacter koseri
atggaaaccactcaaaccagcactattgcttcgattgattctcgaagcggatggcgcaagacggacaccatgtggatgctgggcctttacggcacggcaatcggcgcgggcgtactgttcctgccaattaacgcaggcgtcggcggtatgattccgctgatcatcatggcgattatcgctttcccgatgaccttcttcgcacaccgtggcctgactcgcttcgtgctgtccggtaaaaaccctggcgaagacatcactgaagtggttgaagagcacttcggtattggcgcgggtaaactgatcaccctgctctacttcttcgcgatttacccgattctgctggtttacagtgtggcgattaccaacaccgtggaaagcttcatgacccaccagttggccatcaccccgccgccgcgcgcgattctgtctctgatcctgattgtcggcatgatgaccatcgtgcgcttcggtgagcagatgatcgttaaagcgatgagtattctggtattcccgtttgttgcggccctgatgctgctggccctgtacctgatccctcagtggagcggcgcagcgctggaaacgctctcctttgattccgctgcctctaccggcaatggtctgtggatgacgctgtggctggcaattccggtaatggtgttctctttcaaccactctccgatcatctcctccttcgcggtcgcgaagcgtgaagagtacggcgatgcggctgagaagaaatgctctaagatcctggcattcgctcacatcatgatggtgctgaccgttatgttcttcgtcttcagttgcgtactgagcctgacgccggcggacctggcggcagcgaaagagcagaacatctctattctgtcttacctggcgaaccactttaacgcaccagttatcgcctggatggcgccgatcatcgcgattatcgccatcacgaaatccttcctcggccactacctgggcgctcgtgaaggtttcaacggaatggttatcaagtctctgcgcggcaaaggcaaatccatcgagatcaacaaactgaacaaaatcactgcgctgttcatgctggttacgacctggattgtcgccacgctgaacccaagcatcctggggatgattgaaaccctgggcggcccaatcatcgcaatgattctgttcctgatgccgatgtatgccatccagaaagtcccggcaatgcgtaagtacagcggccacatcagcaacgtattcgttgttgttatgggtctgatcgctatctccgctattttctactccctgttcagctaa

SEQ ID NO: 74383 - DNA, 1365 bp, Citrobacter koseri
ttgattacacatattagcccgcttggctcaatggacatgttgtcgcagctggaagtcgatatgcttaaacgcacggccagcagcgacttgtatcaactgtttcgtaactgttcgcttgccgtactgaactccggcagtctgactgataacagcaaggaattgctgtctcgttttgaaagtttcgacatcaacgtgctgcgtcgtgaacgcggcgtgaagctcgaactgattaacccgcctgaagacgcctttgtggacggacgcatcatccgcgccttgcaggctaacctgttcgccgtgttgcgcgacatcctgttcgtcaacggtcagattcacaatgcaggccgcttccagcatctggatctcgaaagctcggtgcatattaccaacctggtgttctcgatcctgcgcaacgcccgggcgctacatgtcggcgaagcgccaaacatggtcgtctgctggggcggtcactccattaacgaaaatgaatatctctatgcccgccgcgtcggcacccagctgggtctgcgtgaactgaacatttgcaccggctgcgggccaggcgcaatggaagcgccaatgaaaggcgcagcggtaggccacgcgcagcagcgttacaaagacagccgctttatcggtatgacggaaccttccatcatcgcggcagaaccgcctaacccgctggtcaatgaattgatcatcatgccggatatcgaaaaacgcctcgaagccttcgtgcgtatcgcccacggcatcatcatcttcccgggcggcgtcggtacggcggaagaacttctctatctgctggggatcctgatgaacccggcgaataaagatcaggtgctgccgctgatcctcaccgggccgaaagagagtgcggattacttccgcgtgctggacgaatttatcgtgcatacgctgggagaagacgcccgccgttactaccgcgtcatcattgatgacgccacggaagtggcgcggctgatgaaaaaagcgatgccgctggtgaaagagaatcgccgcgacactggcgacgcttacagcttcaactggtcgattcgcatcgcgccggacctgcaaattccgttcgaaccgtcgcatgagaatatggcgaatctgcaactttaccccgatcagccggttgaaattctggcggcggatctgcggcgcgccttctccggcatcgttgcgggtaacgtcaaggaggttggcatccgtgcgattgaggagttcgggccttataaaatccacggcgaccgcgagatgatgcgtcgcatggacgacctgctccagggctttgtcgcgcagcatcgtatgaaactgcccggctcggcttacattccctgctacgaaatctgcgcataa

SEQ ID NO: 74384 - DNA, 849 bp, Citrobacter koseri
atgtcttcttatgaaaaccatcaggcgcttgatggcctgactctcggaaaatcaacggattaccgggataattatgacgccagcctgctacagggcgttccgcgcagcctgaatcgcgatccgctggatttaaaagcggacaacctgccttttcacggcgccgatatctggacgctgtatgaactgtcatggctgaacgcgaaaggcgtgccgcaggtcgccgttggtcatgtggaactggactacaccagcgtcaatttgattgagtcgaaaagttttaagctgtacctgaacagctttaaccagacccgttttgactcctgggacgccgtgcgtcagacgctggaaaacgacctgcgcgcctgtgcgcaaggcgaagtcagcgtcgcgctgtaccgtctcgatgagctggaagggcaacctgtcgcccattttcacggcacctgcattgatgaccaggatatcaccatcgataactatcagttcagcaccgactatctggagaatgccgccagcggcgaaaaagtcgtggaagagacgctggtcagccatttgctgaagtcaaactgcctgatcacccaccagccggactggggctccatacaaatttgttatcgcgggcgcaaaattgaccgcgagaagctgctgcgttatctggtctcgttccgtcatcacaacgagttccacgagcagtgcgtagagcgcatttttaacgaccttctgcgtttctgccagccggaaaaactgagcgtgtacgcgcgctatacgcgtcgtggcggtctggatatcaacccgtggcgcagcaacaccgattttgtgcctgcgacgggcagactggtgcgtcagtaa

SEQ ID NO: 74385 - DNA, 546 bp, Citrobacter koseri
gtggacgaactgacatcgcaagccctgacggcatttacgacgcgttattgcgacgcatggcatgagaaacacaacagctggccgcttagcgaagagctgtatggcgtgccttccccgtgcattatctcttcgaccagcgatgccgtttactggcagccgcagccgtttgaaggcgaggcgaatgtaaacgcggttgaacgcgcatttgatattgtgatacaacctgcggtccatgctttttacaccacgcaatttgccggggatatgtacgcgcagttcgcggatgaaaagctgacgctgctgcaaacatggagcgcagatgacttcagacgcgttcaggaaaacctgatcggccatctggtcacgcagaagcgtctcaagttaccgcctacgctttttatcgccacgctggaaaatgaacttgaggtcatttcggtgtgtaatctctctggtgaagtttgcaaagagaccctgggaacgcgcaatcgtaccgttctggccgcctctcttgcggaattcctgactcagcttaagccgcttctgtaa

SEQ ID NO: 74386 - DNA, 330 bp, Citrobacter koseri
atgacgactcatgaccgtgtgcgccagcaactccacgcgctggaagccctgctgcgtgaacatcatcactggcggatggacgagccgcaggcccacctgtttaccagcacgcaacctttttgtatggatacgatggaaccgcttgaatggctgcaatgggtgctgatcccccgtatgcacgcgttgctcgataacgcgcagccgcttccgcaagcctttgctgtcgcgccgtattatgaaatggcgctgacggccgatcatcctcaacgcgaggtgatcctgacgacattgcaggatctggacgcgctgtttacgagcgataacgtctga

SEQ ID NO: 74387 - DNA, 783 bp, Citrobacter koseri
atgctggaaatcctctatcaggatgaatggctggtggcggtgaataaaccgtctggctggctggttcaccgcagctggctggatcgcgacgaaaaagtcgtggtgatgcaaaccgtacgcgaccagattggtcagcacgtctttactgcccaccggctcgacaggccgacttccggtgtcctgctgatgggactttccagcgaagcggggcgcctgctggcgcagcagtttgagcagcatcagattcagaaacgctaccatgcgattgtgcgcggctggttaatggatgaggccgttctggattatccgctggtggaagaactggataagattgccgataaatttgcccgcgaagataaaggcccgcagcctgccgtgacccattaccgggggctggcgacggtcgaaatgccggtggcgaccgggcgttatccgacaacccgctacggcctggtggaactggagccgaaaacgggccgtaaacaccagctcagacgtcatctcgcgcatttacgccatccgattatcggcgacagcaaacacggcgatttacgtcagaatcgcagcgccgcagagcattttggttgccagcgcttaatgttgcacgccagtcaactgacgcttacccacccctttaccggtgaaccgctgatcctgcgcgccggtctggacgacgtctggatgcaggcgttatcacagtttggctggcgcggacttctccctgagaatgaaagggttgagtttagtgcgttgtcccggcaggatgaaaataatcaggcttaa

SEQ ID NO: 74388 - DNA, 450 bp, Citrobacter koseri
atggcggaaattggtatttttgtcggcaccatgtatggaaactcgctgttggttgccgaagaggccgaggcgatccttaccgcgcaggggcataaagcaaccgtctttgaagatccgcaactgagcgactggcagccgtatctggataaagttgtgctggttgtgacgtcgacgacggggcagggcgatctcccggacagcattgtgccgctgttccagggaataaaggacaatctcggttttcagccaaatctgcgttacggcgtgattgcgctgggcgacagcagctacgtcaatttttgcaatggcggcaaacagttcgatgcgctgttgcaggagcaaagcgcgcagcgtgttggggagatgctgttgattgacgccagcgaacacccggagccggagagcgaatccaacccctgggtcgaaaactggggaacattgctctcctga

SEQ ID NO: 74389 - DNA, 1353 bp, Citrobacter koseri
atgagttcattaagtcacgcggtgagcggtgcggaaaaacgcaccaatgcccgctactggatagtggtgatgctgtttatcgtcacatccttcaactatggcgaccgcgccacattgtccattgccggatcggaaatggccaaagatattggtctcgacccggtaggcatggggtacgtgttctccgctttctcatgggcctacgtgatcgggcaaatccccggcggttggctgctcgaccgttttggttctaaacgtgtctacttctggtccatctttatctggtccatgtttaccctgttacagggctttgtggatatcttcagcggttttggcatcatcgtggcgctgtttaccctgcgattcctggtcgggttagccgaagcgccatctttccccggcaacagccgaatcgtcgcggcctggttcccggcgcaggagaggggaacggcggtggcgattttcaactccgcgcaatactttgccaccgttatctttgcgccaatcatgggctggctgacccatgaagtgggttggtcgcatgtcttcttctttatgggcggtctggggatcgtgatcagctttatctggctgaaagtgatccatgaaccaaaccagcatcccggcgttaacaaaaaagagctggagtacattgctgaaggcggcgcgctgatcaatatggatcagaaagatacgaaggtgaaagtcccgtttagcgtgaaatggggccaaatcaaacagctgctgggttcccgcatgatgatcggcgtctatatcggccagtactgcattaatgcgttgacctatttctttatcacctggttcccggtttatctggtgcaggcgcgtggcatgtcgattctgaaagcggggttcgtcgcttccgtcccggctatttgcggcttcgtgggcggcgtgctgggcggcattatttccgactggctgatgcgtcgtaccggctcgctgaacatcgcccgtaagacgccgatcgtgatggggatgctgctgtcgatggtgatggtgttctgtaattacgtcaacgtcgaatggatgattatcggcttcatggcgctggccttcttcggtaaaggcattggcgcgctgggctgggcagtcatggcggacaccgcgccgaaagagatcagcggcttgagcggcggcttattcaacatgtttggcaatatttccggcatcgtaacgccaattgcgattggctacatcgtcggcacgaccggctcgttcaatggcgcgctgatttacgttggcgtccatgcgctggtggcggtactgagttacctcgtgctggtcggggatattaaacgcatcgaactgaaacctgtagcaggacaataa

SEQ ID NO: 74390 - DNA, 1341 bp, Citrobacter koseri
atgacaacgcaatcaagtcccgtcattaccgatatgaaagtcattccggtggccggacatgacagtatgttactcaacatcggtggggcgcataacgcgtatttcacgcgcaatatcgtcgtcctcaccgataacgccggtaacaccggcgtgggtgaagcgcccggcggcgaggtgatttaccagacgctggtggatgcgattccgatggttttaggccaggaagtggcccgcctgaataaagtggtgcaacaggtgcataaaggtaatcaggctgccgactttgatacctttggtaaaggcgcctggactttcgaactgcgggtgaatgcggtagcggcgctggaagcggcgctgctggatctgctgggcaaagcgctgaatgtaccggtgtgcgaactgttagggccgggcaaacagcgcgatgcggtgactgtgctgggctaccttttctacgtgggcgatcgcaccaaaacggatttgccttatctcgaaaaaacgccgggcaatcatgactggtatcacctgcgccatcaggaagcgctcaccagcgacgcggttgtgcatctggcgcaggcggcgcaggatcgctacggctttaaagatttcaaactgaagggcggcgtgttgcccggcgagcaggagatcgacacggcccgcgcgctgaaaaaacgcttcccggatgcgcgaatcacggttgacccaaacggcgcctggctgctggatgaagccatcgcgctgtgtaaagggctgaacgatgtgctcacgtatgctgaagatccgtgtggcgcagaacaaggattctccgggcgtgaagtgatggcggagttccgtcgtgcgacggggctgccggtcgcgaccaacatgattgccaccaactggcgtgaaatgggccatgcggtgatgttaaacgcggtggatattccgctcgccgacccgcacttctggacgctctccggcgcggtgcgcgtggcgcaattatgcgatgactgggggctgacctggggctgccattcgaacaaccatttcgatatttccctggcgatgttcactcacgttggcgctgccgcgccgggtaaaccgacggcgattgacacccactggatctggcaggagggcgattgccgcctgacgaagcaaccgctggaaattaaagacggaaaaattgcagtgccggatgcgccgggtcttggcgtggagctggactgggagcaggtgcagaaagcgcatgacgcttacaagaaactgcccggcggcgcgcgcaatgacgcaggcccgatgcaatacttgatccccggctggacttttgatcgtaaacgccccgttttcggccgtcgctaa

SEQ ID NO: 74391 - DNA, 1341 bp, Citrobacter koseri
atgagtacacaatttacgacccctgttgttaccgctatgcaggttatcccggttgcggggcatgacagtatgctgatgaacctgagcggggcgcatgcgccgttcttcacccgtaatatcgtcattattaaagacaattctggtcacaccggcgtgggggaaatccctggcggcgagaaaatccgccagacgctggaagaggcgatcccgctggtggtgggtaaaacgctgggtgagtacaaaaacgtgctgaatgccgtacgtcatcagttcgccgatcgtgatgcgggcgggcgcggcttacaaaccttcgacttacgtaccaccattcatgtggtcaccggcattgaagcggcgctgcttgatctgttaggccagcacctgggggttaacgtggcatccctgctgggtgaggggcaacagcgtagcgaagtagaaatgcttggctatctgttctttgtcggcaaccgtaaagcgacgccgctgccgtaccagagccagccggatgagaaatgcgactggtatcgtctgcgtcacgaagaggcgatgactcctgatgcggtcgtccgcctggcggaagcggcatacgagaagtatggctttaacgactttaaactgaagggcggcgttctggcgggagatgaagaggcggaatccattgtagcactggcaaaacgcttcccgaatgcccgcgtgacgctggacccgaacggcgcctggtcgctgaacgaagcaatccaaatcggtaagtacctgaaaggctcgctggcctatgcggaagatccgtgcggggcggagcagggtttctctggccgcgaagtgatggcggagttccgtcgcgcgaccggcctgccgacggccaccaatatgatcgccactgactggcgtcagatggggcatacgctctccttgcagtctgtggacattccgctggctgacccgcatttttggacgatgcagggctctgtgcgcgtcgcgcagatgtgccatgagttcggcctgacctggggttcgcattccaataaccactttgatatttccctggcgatgttcacgcatgtggcggccgccgcgccaggcaagatcaccgcgatcgacacccactggatctggcaggaaggtaatcagcgtctgaccaaagagccgtttgaaatcaaaggcggtatggtgcaggtgcctgataaaccaggtcttggcgttgagattgacatggatcaggtgatgaaggcgcacgagttgtatcagcaacatggcctgggcgcgcgtgatgatgcgatgggaatgcagtatttgatcccgaactggacattcgacaataagcgcccgtgcatggtgcgctga

SEQ ID NO: 74392 - DNA, 1143 bp, Citrobacter koseri
atgaaaatagtgatcgcaccggactcttataaggaaagtttgagcgctcttgaggtagcgaccgccattgaggaggggtttcgtgaaatctggcctgatgcggattacgtaaaactcccggttgctgatggtggtgagggaacggttgaagcgatggtcgaggccacggcaggccggattgttgatgttgacgtgacgggcccgctcggtgacagcgtgcgggcattttatgggctttctggcgacgagcgttcggcctttatcgaaatggccgccgccagcgggctggagttggttccaccgcaattacgcgatccgctaaaaaccacctcgtggggaaccggcgagttaattcgccacgctctcgatgccggggtggaacatattattattggccttggcggtagcgcgacgaatgacggcggcgccggtatggtgcaggcgctgggggcgaaattgctggatgcgcagcaccaggagattacgcaaggcggcgcggcgctggaagcgctctcaaagattgatatcagcggtattgataaacgtcttgccgcgtgtcgtatcgaagtcgcctgcgatgttacgaatccgctgaccgggaaggagggggcatctgcggtatttggtccgcaaaaaggcgccacgccggagatgattcaacgcttagacgacgcgctgacgcactatgcccggctgatttcccgcgatctggatattaacgtattcgaactggcgggcggcggcgcggcgggcggtctgggggccgcattatatgcgttttgcggcgcggagttacggcgtggcattgagatcgtgaccgatgccttgcatctggaggagtgcgttgctgatgcggatctggttgttaccggagaagggcgcattgacagccaaacgattcacggcaaagtgcctgtcggcgtggcaaaggtcgcgaaacgacataataagcccgtgattggcattgcaggtagcctgacggcggatgtgggtgttgtacaccaacatgggctggatgctgttttcagcgtgatttataccatctgtacgctggatgaggcgctggagaatgccgcagaaaatgtgcgtatggctgcgcgcaatatcgccgccacccttaacgtggggcagcatttacgttaa

SEQ ID NO: 74393 - DNA, 2757 bp, Citrobacter koseri
atgaccaactacagcctgcgcgcacgcatgatgattctgatcctggccccgaccgtcctcattggtttactgctcagtatctttttcgttgtgcatcgctataacgacttgcagcgtcaactggaagatgctggcgccagcattatcgaacctcttgcggtctccagcgaatatggtatgaacctgcaaaaccgcgaatcaatcgggcagctcatcagcgttctccatcgccgccactccgacatcgtgcgcgccatttccgtttatgatgagaataaccggctgtttgtcacatccaatttccatctcgatccgtcagaaatgcagctcgccaccggggagccgtttccccgcaggctgagcgtgacccgccacggggacattatgatcctgcgaacgccgattatctccgaaaggtattcgccggacgaatcccccgtaacagacgccaaaacgccgagaaatatgttgggatatgtggcgcttgaactggatctcaagtccgtccgcctgcaacagtacaaagagattttcatctccagcgtgatgatgctgttctgtatcggcattgccttaatttttggctggcgtctgatgcgcgacgtcaccggccccattcgtaatatggtcaataccgttgaccgcattcgtcgtgggcagctcgacagccgcgtcgagggctttatgctgggcgagctggatatgctgaaaaacggcatcaactcgatggcgatgtcgcttgccgcttaccatgaagagatgcagcataatatcgatcaggccacttcggatctgcgcgaaacgctggaacagatggagatccagaacgttgagctggatctggcgaagaagcgcgctcaggaagcggcgcgtattaagtctgagtttttggccaacatgtcgcacgaactgcgcacgccgcttaacggcgtgattggctttacccgtctgacgctaaaaaccgaacttaatacaacccagcgcgatcacctcaatactatcgagcgttcggccaacaacctgctggcgatcatcaatgacgtgctcgatttttccaagctggaagcgggcaagctgattctggaaagcattcccttcccgctacgcagcacgctggatgaagtggtgacgctgctggcgcattcatcccatgacaaagggctggagctcacgttaaacatcaaaaatgacgtaccggataacgtcatcggcgacccgctgcgcttgcagcaggtcattaccaatctggtcggtaatgccattaaatttaccgaaagcggcaatatcgacattctggttgaaaagcgcgcgctcagtaataccaaagtacagattgaaatccagatccgcgataccggcatcggcattcccgagcgcgaccagtcgcgtctgttccaggctttccgccaggcggacgccagcatttcacgccgtcatggcggaaccggtctggggctggtaattacgcaaaaactggtcaatgagatgggcggcgatatctcgttccacagtcagcccaatcgcggttccactttctggttccacattaatctcgatctcaacccgaatgtgataagcgacgcgccgccaacgcgctgtctggtcggaaaacggctggcctacgtcgaaccgaacgccaccgccgcgcaatgcacgctggatatgctgagcgacacgccgctggaggtgatctacagcccgacgttctcagcgttgccgctggatcactacgatatcctgctcatcagcgttccggtgacctttaacgaaccgctcaccatgcagcaagaacggctggcaaaagccgccgccatgacggacttcctgctgctggcgctgccttgccatgcccagattaacgccgaaaaactcaagcaaggcggcgcggcggcctgtctgttaaaaccgctcacctcaacgcgtttactgcctgcgctgacggaatactgccatttgaatcagcatgttgaaccgctgctgacggatgagaataaaatcgccatgacggtaatggcggtcgacgataacccggctaacctgaagctgatcggcgcgctgctggaggacaaagtccagcatgtggagctttgcgacagcgggcatcaggcggtggaacgggccaaacagatgcagtttgatttgatcctgatggacattcagatgccggatatggacggtatccgcgcctgtgagctgattcatcagcttccgcatcagcagcaaacgccggtgatcgccgtgacggcacatgcgatggcgggtcagaaagagaagctgctgagcgcggggatgaatgactatctggccaagccgatagaagaagaaaagctgcacagtctgctgttacgctataagccgggggccgtggtagcaacccgattacccgccgctgaatcgacagagtttatcgtcaacccgaacgcaacgctcgactggcaactggcgctgcgccaggcggccggaaaatccgatctggcgcgggatctgctgcaaatgctcatcgacttcctgccggaagtgcgtaacaaaattgaagaacagctggtgggagaggcgcccgaagggctggtggatctcatccacacgctgcacggcagctgcggctacagcggggtgccgcgcatgaaaaacctgtgccagttaattgagcagcagttacgcagcggcaccaaagaagaggagcttgaacccgagttcctggagctgcttgatgagatggacaacgtcgcgcgcgaagcaaagaaaatattaggatga

SEQ ID NO: 74394 - DNA, 1299 bp, Citrobacter koseri
atggcgcaattctactctgcaaaacgacgcgtgacgacgcgtcagatcataaccgttacggtcaatgacctcgatccttttggtcagggcgtggctcgccataatggaaaggcgctgtttataccgggattactgccccaggaaaagggcgacgtcgtcattaccgaagataaaaaacagttcgcccgcgcgcaagttaagcgtcgcctgaatgatagcccggaacgggaaacgccgcgctgcccgcactttggcgtctgtggcggctgccagcagcagcatgccagcgtcgcgctgcaacaacgcagcaaaagcgccgcgctgtcgcgcttaatgaaatgcgatgtcgccgaggtgatcgccgatacgccgtggggctatcgacgtcgcgcgcgtttaagcctgaattatctgcctaaaactcagcaattgcagatgggatttcgcaaggcgggctccagcgatatcgtggatgtcaggcagtgccccattctggtgccccagcttgaggcgctgctgccccgcgtcagggcgtgtctggaaagtttgcaaggaaaccgccactttggccatgtcgagctggtacaggcggggaatggcaccctgatggtgctgcgtcatacggcgcccttgagcgcggcggacagagaaaaactggaacgcttttcgcattctgagggactgtctctgtttctggcccctcaaagcgacatacttgaaccgcttaccggggagacgccctggtatgattcaaacgggctacgcttaaccttcagcccgcgcgactttattcaggtcaacgaaggggtgaaccagaaaatggtcgcccgggcgctggaatggctggatattcaacctgacgaccgggttctggatctgttctgtggcatggggaattttactctgccgctggcgacgcgcgccgccagcgttgtgggcgttgaaggcgttccggcgctggtggaaaaaggccgggaaaacgcgcggcgtaacggattacagaatgtgacattctttcacgaaaatctcgaagaagatgtcacgaagcagcaatgggcgaaaaatggttttgacaaaattttgctcgatcccgctcgtgccggggcggcaggcgtgatgaaacacattataaagttaaaaccaattcgtattgtttatgtatcctgtaatcctgctacgctggcacgggatagcgacgccttgttgaatgccggataccaaattcagcggctggcgatgctcgacatgttcccacacactgggcatctggaatcaatggtgttgtttgagcgtttgtaa

SEQ ID NO: 74395 - DNA, 2235 bp, Citrobacter koseri
atggttgcggtaagaagtgcacatcttaataaagctggtgagtttgatccgaaaaaatggatcgcgagtctgagtatctccagccagcagtcgtgtgaacgcttagccgaaacctgggcgtattgcctgcaacagacacaaggacatcccgatgcggaactgttgctgtggcgtggcgtggagatggtggaaatcctctctacgttaagtatggatatcgacacgctgcgggcggcgctgctcttccctctggctgacgccaatgttgtcagcgaagatatcctgcgcgagagcgtggggacatcgatcgtcaatctgattcacggcgtgcgcgatatggcggcgattcgtcagttgaaagcgacgcataacgattccgtctcctccgagcaggtggataacgttcgtcggatgctgctggcgatggtggacgacttccgctgcgtggtcatcaagctggcggaacgcatcgcccatctgcgcgaggttaaagacgcgccggaagatgaacgcgtactggcggcgaaagagtgcaccaatatctatgccccgctggctaaccggctgggcatcgggcaactgaagtgggagctggaagattactgcttccgctatctgcacccggcggaatacaagcggatcgccaaactgctgcacgaacgccgcattgaccgcgagcattacattgaagagtttgtcgggcatctgcgttctgaaatgaaaaccgaaggtgtgaaggcggaggtctatggccgcccgaaacacatctacagcatctggcgcaaaatgcagaaaaagcatctggcgtttgacgagctgtttgacgtgcgagccgtgcgtattgtggccgaacgtttgcaggactgctatgccgcgctggggattgtgcatacgcactatcgccatctgccggacgagttcgatgattacgtcgccaacccgaaacctaatggctaccagtcaatccatacggtggtgcttggccctggcggtaaaaccgttgagatccagattcgtaccaaacagatgcacgaagatgccgaactgggcgtcgcggcgcactggaagtacaaagagggagcggtctccgggggggcgcgcacgggccatgaagacagaattgcgtggctgcgtaagctgatcgcctggcaggaagagatggcggattctggcgaaatgctggatgaagtgcgcagccaggtctttgacgaccgggtgtatgtctttacgccaaaaggcgatgtggtggatctgcccgcaggctccacgccgcttgactttgcctaccatatccacagcgatgtggggcatcgctgcatcggggcgaaaatcggcgggcgtatcgtgccgtttacctatcagttgcagatgggcgatcagattgaaatcatcacccagaaacagccaaaccctagccgggactggctcaacccgaacctgggctatgtgacgaccagccgtggccgttctaaaatccacgcctggttccgcaagcaggatcgggacaagaacattctcgccgggcggcaaatcctcgacgatgaactggcgcatttgggcatcagcctgaaagaggcggaaaaacacctgctgccgcgctacaacttcaatgagctggaggaactgctggcggcgattggcggcggggatattcgccttaaccagatggtgaacttcctgcaatcgcagtttaataagccgagcgccgccgaacaggatgccgccgcgctgaaacagcttcagcagaaaacatacgctccgcagaatcgccgtaaagacgatggccgcgtggtggtggaaggggtcggcaacctgatgcaccacattgcgcgctgctgccagccgattccaggagatgagattgtcgggtttatcacccaggggcgcggtatttccgtacaccgggcggactgcgaacagcttgtggaactgcgttctcatgcaccggaacgtatcgtggatgcggtgtggggcgagagctactctgcgggatattcgctggtggtacgcgttcaggccaacgatcgcagcggcttgttgcgggatatcaccaccattctggctaacgagaaggtgaacgtgctgggggtggccagccgcagcgacacccggcagcagctcgccaccatcgatatgaccatcgaaatttacaacctgcaagtgctggggcgcgttctcagtaaactcaaccaggtgccggatgtgatcgacgcgcgtcgtttgcacggcaattaa

SEQ ID NO: 74396 - DNA, 792 bp, Citrobacter koseri
atgaatcaaatcgatcgcctgcttggcatcatgcaacgcttgcgcgacccggaaaacggctgcccgtgggacaaagagcagacgtttgccaccattgcgccgtatacccttgaagaaacctatgaagtgctcgacgccattgcccgtgaggactttgacgacctgcgcggagagttgggcgatctgctgtttcaggtcgtgttttatgcgcagatggcgcaggaagaagggcgctttgactttaatgatatttgcgccgccatcagcgataaactggaacgtcgccatccgcatgtctttgcggacgttgccgctcacaacagtaccgaggtattagcccgctgggagcaaatcaaaaccgaagagcgcgcgcagaaagcgcagcattcggcgctggatgatattccccgcagcttaccggcgttaatgcgcgcgcaaaaaatccagaagcgctgttcgaacgtcggctttgactggacgacgttagggccggttgtcgataaggtgtatgaagagatcgacgaggtcatgttcgaggcgcggcaggctgtcgtagaccaggctaaactggaggaggaaatgggcgacctgctctttgccaccgtcaatatggcgcgtcatttagggacaaaagcagagaccgcgttacaaaaagccaatgaaaagttcgaacggcgttttcgtgaagttgagcggattgttgcggcgcgaggcctggaaatgacgggagttgatctggaaacaatggaagaagtctggcagcaggtaaaacgccaggaaattgatctctaa

SEQ ID NO: 74397 - DNA, 1638 bp, Citrobacter koseri
atgacaacgaactatatttttgtgaccggcggggtcgtatcctctctgggtaaaggcattgccgcagcctccctcgcagccattcttgaagcccgtggcctcaacgtgaccatcatgaaactggatccgtacatcaacgtcgatcctggtactatgagtccaatccaacacggggaagtgttcgttactgaagacggcgccgaaaccgatctggacctgggtcactatgagcgcttcattcgcaccaagatgagccgccgcaacaacttcaccacgggtcgtatttactccgacgttctgcgtaaagaacgccgtggcgactatctgggcgcaaccgtacaggttatcccgcacatcaccaacgcgattaaagagcgcatcatcgaaggcggcgaaggccacgacgtggtgctggtcgaaatcggcggtactgtcggtgatatcgagtccctgccgttcctggaagcgattcgtcaactggcggttgatatcggtcgtgagcacgcgctgtttatgcacctgacgctggtgccgtacatggccgcggcaggcgaagtcaaaacgaaaccgacacagcactccgttaaagaactgctctccatcggtatccagccggatattctgatctgccgttccgatcgcgccgttccggccaatgagcgtgcgaagattgcattgttctgtaacgttgctgaaaaggccgttatttctctgaaagacgtcgattctatttataaaattccgggcatgttgaaatctcagggcctggacgattatatttgtaaacgattcagcttagactgcccggaagcgaacctggccgaatgggaacaggttatctacgaagaagcgaacccggcgggcgaagtgactatcggtatggtcggcaagtacattgaactgccggatgcctataagtcggtgattgaagcgctgaaacacggtggcctgaagaaccgtgtcaccgtcaacatcaagctgatcgattcgcaggatgttgaaacgcgcggcgtcgaaattctgaaagatttggacgctatcctgatccctggcggcttcggctaccgtggcgttgaaggtaaggtcgcgacggcgcgttatgcgcgtgaaaacaatattccttatctgggtatttgcctgggtatgcaggttgcgctgattgaatttgcgcgcaacgtagcgggtatggaaaacgccaactcaacggaatttgtgccagactgtaagtaccctgttgtggcgctgattaccgagtggcgtgacgagaacggcaacgttgaagtccgtacggagaagagcgatctgggtggcaccatgcgtcttggcgcgcagatgtgtcagctttccgatgagagcctggttcgccagatgtacggtacgccgacaatcactgagcgccatcgtcaccgctatgaagtcaacaacatgttgttgaaccaaattgaagctgcgggtctgcgcattgcgggccgttccggggatgatcagttggtcgagatcatcgaagtgccgaaccatccgtggttcgttgcctgtcaattccacccggaatttacttcaacgccgcgtgacgggcatccgctgtttgcaggctttgtgaaagccgccagcgactatcagaagcgtcaggcgaagtaa

SEQ ID NO: 74398 - DNA, 1299 bp, Citrobacter koseri
atgtccaaaatcgttaaagtcatcggtcgtgaaatcatcgactcccgtggtaacccgactgttgaagccgaagtacacctggaaggtggtttcgttggtatggcagccgctccgtcaggtgcttctacgggttcccgcgaagcgctggaactgcgcgatggcgacaaatcccgtttcctgggtaaaggcgtaaccaaagctgttgcagcggttaacggcccgatcgctcaggcaatccttggcaaagacgccaaagatcaggctggcattgataaaatcatgatcgacctggacggtactgaaaacaaatctaacttcggtgcgaacgcgatcctggctgtgtctctggctaacgccaaagccgctgcggcctctaaaggtcagccgctgtacgagcacatcgctgaactgaacggcaccccgggtaaatactccatgccggttccgatgatgaacatcatcaacggcggcgagcacgctgacaacaacgttgatatccaggaattcatgattcagccggttggcgctaaaaccctgaaagaagcagtgcgtatgggttctgaagtgttccacaacctggctaaggttctgaaagctaaaggtatgaacactgctgttggtgacgaaggcggctatgcgccgaacctgggctccaacgctgaagcactggctgttatcgctgaagcggttaaagctgctggctacgagctgggcaaagacatcactctggcgatggactgcgcagcatctgaattctacaaagacggcaaatacgttctggctggcgaaggcaacaaagcgttcacttctgaagaattcactcacttcctggaagacttgaccaaacagtacccgatcgtttctatcgaagacggtctggacgagtctgactgggacggtttcgcataccagaccaaagtgctgggcgacaaaatccagctggttggtgacgacctgttcgtaaccaacaccaagatcctgaaagaaggtatcgacaaaggcatcgttaactccatcctgatcaaattcaaccagatcggttctctgaccgaaacgctggctgctatcaagatggcgaaagacgctggctacactgccgttatctctcaccgttctggcgaaactgaagacgcgaccatcgctgacctggctgttggtactgcggcaggccagatcaaaaccggttctatgagccgttctgaccgtgttgctaaatacaaccagctgattcgtatcgaagaagcgctgggcgaaaaagctccgtacaacggtcgtaaagagatcaaaggtcaggcgtaa

SEQ ID NO: 74399 - DNA, 672 bp, Citrobacter koseri
atgcagtacccgattaacgagatgttccagaccctgcaaggtgagggttactttaccggcgtccccgccatttttattcgtttacagggatgcccggttggctgtgcctggtgcgataccaaacacacctgggataagcttgaagatcgggaagtgtcgttgtacagcatcctggcgaagaccaaagagagcgacaagtggggcgcggcaagtagcgaagacctgctggcggtgataaaccgacaggggtataccgcgcgtcatgccgtgatcaccggcggtgagccctgcatccatgacctgatgccattgactgatttactcgagaagaatggattcagctgtcagattgaaaccagcggtacccacgaggtgcgctgtacgcccaatacctgggtgacggtctcgccgaaggtgaatatgcgcggtgggtatgacgtcctgtcgcaggcgctggagcgtgcgaatgaaatcaagcaccctgttggtcgcgtccgtgatattgaagcgctggatgagctattggcgacgctgagcgacgataagccgcgaatcattgccttgcagccaatcagccagaaagaagacgcgacgcgtctgtgcattgaaacctgtatcgcgcgtaactggcgcttatcaatgcagacgcacaaatatctgaatattgcgtga

SEQ ID NO: 74400 - DNA, 363 bp, Citrobacter koseri
atgtccaccaccttgtttaaagatttcacctttgaagccgctcaccgcctgccccacgtaccggaagggcataaatgtggccgcctgcatggtcattcatttatggtgcgccttgaaattaccggtgacgtcgatccgcataccggttggatcatggatttcgccgaactgaaagccgcgttcaaaccgacgtacgagcgtctggatcattattatctgaacgatattccaggtctggaaaatccaaccagcgaagtgctggcaaaatggatttgggatcaggttaaacctgccgtaccgctgctgagcgcagtaatggtgaaagagacctgcacagcaggctgcgtgtatcgcggcgagtga

SEQ ID NO: 74401 - DNA, 1806 bp, Citrobacter koseri
atgacaacacaggccccaccatctgctttgcttccgctaaacccggagcagctggcacgccttcaggcggccacaaccgatctttctcccacccagcttgcctgggtttccggctatttctggggaatgctgaaccagccgccgggcacgctcgccgccacgccagcgcctgtcgctgaaatgccgggtattacgctcatttctgcatcgcaaaccggcaatgcgcggcgcgtggcggaagccctgcgcgatgacctgctggcggcaaaactgagcgtcacgctggttaatgcgggcgactacaaattcaaacagatcgccaatgaaaaactgctggttgtggtcgcgtccacgcagggcgaaggcgaaccgccggaagaagccgttgcgctgcgtaagtttctgttctctaaaaaagcgccgaagctcgacaacaccgccttcgccgtctttggcctcggtgatacctcctatgaatttttctgccaggcgggtaaagatttcgacagcaagctggcggaactggggggtgagcgtctgctcgatcgcgtcgatgcggatgtggaataccaggcggcggcacaagaatggcgggctcgcgttgttgacgtactgaaagcgcgtgcgccgagcgcatcggcagcgcaggtcgctgtcgcggcaacgggggccgtgaatgacgtgcattccagcccttataccaaagaagcgccgctgagcgcctcgctcgccgtcaatcagaaaatcaccggccgcgactcggaaaaagatgtgcgccatatcgaaatcgatctgggtgattctggcctgcgctaccagccgggcgatgccctgggcgtctggtatcagaacgatcctgaactggtcaaagagatcgtcgaactggtctggctgaaaggcacggagccggtcaccgttaacggtaaggtgctgccgcttgccgaagccttgcagtggcattttgagctgacggtgaacaccgccaatatcgtggaaaactacgccacgctgacccgcagcgaatcgctgttgccgctggtgggtgataaagcccagttgcagcattacgccgcgacgacgcctgtcgttgatatgttgcgtttctctccggctcagctggatgctgacgcgctggtggggctgctgcgcccgctaacgccgcgtctttactcgatagcctcttcccaggcggaagtcgagagcgaagtacatatcaccgtaggcgccgtgcgttatgaaatagaaggccgggcgcgggcgggcggggcatcaagcttcctggccgaccgcgtggaagaagagggtgaagtgcgcgtatttatcgaacacaacgataatttccgtctgccggccaacccggaaacaccggtgatcatgattggtcctggcaccgggatcgcccctttccgcgcctttatgcagcagcgggcggcagatgaagcgccgggtaaaaactggttgttctttggcaacccgcactttaccgaagatttcctctaccaggtggaatggcagcgctacgtcaaagagggcgtcctgagccgcatcgatctggcctggtcccgcgatcaaaaagaaaaaatatacgtacaagacaaactgcgcgaacagggcgcagagctgtggcgctggattaatgacggcgcgcacatttatgtctgcggcgacgcgaatcgcatggcgaaagacgttgagcaggcactgctggaagtgattgccgaattcggcggtatggatgccgaagcggcggatgaatttttaagtgagctgcgcgttgagcgccgttatcagcgagatgtctactaa

SEQ ID NO: 74402 - DNA, 1713 bp, Citrobacter koseri
atgagcgaaaaacatccaggcccactggtggtcgaaggtaaactggcagatgccgagcgcatgaagcttgagagcaactacctgcgcggcaccattgctgaagatttgaatgacggcctgaccggcggttttaaaggcgacaactttctgctgatccgttttcacggtatgtaccagcaggatgaccgcgacattcgcgccgagcgcgccgagcagaagctggagccgcgtcatgcgatgctgctgcgttgccgtctgccgggtggggttatcaccaccagacagtggcaggcgatcgataaattcgccgctgaaaatacgatttacggcagcattcgcctgactaaccgtcagaccttccagttccacggcattctgaaaaagaacgtgaagccggtacatcagatgctgcactccgttgggctggacgcgctggcgaccgccaacgacatgaaccgtaacgtgctgtgcacctctaacccgtatgagtctgagctgcatgccgaagcctatgagtgggcgaaaaagatctccgagcatttgctgccgcgcacccgcgcttatgcggagatctggcttgatcaggaaaaggtcgccacaacggatgaggagccgatcctcggccagacctatctgccgcgtaagttcaaaacgaccgtggtgatcccgccgcaaaacgatatcgatctgcacgccaacgacatgaactttgtcgccgtggcggaaaacggcaagctggtgggctttaacctgctggtcggcggcgggctttccattgagcacgggaacaagaaaacgtatgcccgcaccgcgagcgagttcggctatctgccgctggagcataccctggcggtggcggaagcggtggtgacgactcagcgcgactggggtaatcgtaccgatcgtaaaaacgccaaaaccaaatacactctggagcgtgttggggtcgagacgttcaaggcggaagtcgagcgtcgtgcaggcatcaaatttgaaccgatccgcccgtatgaatttaccgggcgcggcgatcgtatcggttgggtgaaaggcatcgacaacaaatggcacctgacgctgtttattgagaatggccgtattctggattatccggggcgcccgctgaaaaccggtctgctggagatcgcgaagatccacaagggcgaattccgtattaccgccaaccagaacctgatcattgccggcgtgccggaaagccagaaagcgaagattgaaaaactggcgcgcaaccacggcctgatgaatgcggtcacgtcgcagcgtgaaaactcaatggcctgcgtatcgttcccgacctgcccgctggcgatggcggaagcggagcgtttcctgccgacttttgtcgataaagtggacgcgttgatgacccaccacggcgtgagcgatgagcatatcgtgctgcgcgtgacgggttgcccaaatggctgcggacgcgccatgctggcggaagtcggtctggtggggaaagcgccgggtcgttataacctgcatctgggcggcaatcgcatcggaacgcgtatcccgcgtatgttcaaagagaacattaccgagccggaaattctggcgtcgctggatgaactgattgggcgctgggtgaaagagcgcgaagcgggtgaaggcttcggcgactttacggtgcgtgcgggcatcattcgcccggtgctcgatcccgcccgggatttctgggaataa

SEQ ID NO: 74403 - DNA, 735 bp, Citrobacter koseri
atgtccgtactcgatctaaacgccctgaatgaattgccaaaagtcgagcgcgtcatggcgctggctgaaaccaacgcgcagctggaaaagcaggatgctgaaggacgcgtggcgtgggcgctggagaatctacccggtgaatacgtgctctcgtcgagctttggtattcaggcggcggtcagcctgcatctggttaaccagattcgcccggatattccggttatcctgaccgataccggctatctgttcccggaaacctaccagtttattgatgagctgacggaaaagctgaacctgaacctgaaagtctaccgtgcgacggaaagcgcggcctggcaggaagcccgctacggtaaactgtgggagcaaggcgttgagggcattgagaaatacaatgacatcaacaaagtcgagccgatgaaccgggcgttaaaagagcttaacgcgcaaacgtggtttgctggcctgcgccgcgaacaatccgggagccgggcgcatctgcctgtgctggcgattcagcgcggcgtttttaaagtgctgcccatcatcgactgggataaccggacggtgtaccagtatctgcaaaaacacggtctgaaataccatccgctatgggatcagggctatctgtcggttggcgatacccacaccacccgtaaatgggagcccggcatggcggaagaagagacgcgattcttcgggctgaagcgcgagtgcgggctgcacgaagggtga

SEQ ID NO: 74404 - DNA, 1044 bp, Citrobacter koseri
atgttttccgcatcgcgcctccgtgcagcgctcctggcgctcggcgtatgctttatccttcccgcgcaggcaacgtcaccgaagcctggcgatatcgccactattcaggcacgacacattgcaacattctttcccggcagaatgaccggaacaccggcggagatgctctctgccgattatttacgtcagcaatttgagctgatgggatatcgcagcgatatccgaacatttaatagccgctatatttataccgccaggaataatcgcaagaactggcataacgtgacgggcagtaccgttattgcggcgcacgaagggaaagcgccgcaacaaattattattatggcgcacctggatacctatgcgccgctgagcgatgccgataccgacgccaatctcggcggtttaaccttgcagggcattgacgataacgccgccgggctgggcgtgatgctggaactggctgaacgcctgaaagacatcccgacgcagtacggcatccgctttatcgccaccagcggtgaagaagagggaaaactgggcgcagaaaacctgcttaagcggatgagcgccgctgagaagaaaaatacgctgctggtaattaaccttgataacctgattgtcggcgacaaactctacttcaacagcgggcagcaaacgccggaagccgtacgcaaactgacgcgcgaccgggcgctggcgattgcgcgcagccacggtatcgccgccgcgaccaatccgggtctgaacaaggattacccgaaaggcacaggctgctgtaacgacgccgaagtcttcgataaagccggtatttccgtgctgtcggttgaagccaccaactggaatctggggaaaaaagacggctatcagcagcgtgcgaaaacgccttcatttccggccggaaacagttggcacgatgtgcgtctggataaccaacagcacatcgacaaggcgctaccaggaagaattgaacaccgcagtcgcgatgtcgtgcgcatcatgttgccactggtaaaagaactggcgaaagccggtaaagcctga

SEQ ID NO: 74405 - DNA, 909 bp, Citrobacter koseri
atggaccaaaaacgactcacccacctgcggcagctggaagcggaaagcatccatatcattcgcgaggtggccgccgaattttctaatccggtgatgatgtattccatcggtaaagattccagcgtcatgctgcatctggcgcgtaaagcgttttatccaggtacgttgccgtttccgctgctgcacgttgataccggctggaagtttcgtgagatgtacgaattccgcgatcgcaccgcgaaggcctacggctgtgaactgctggtgcataaaaacccggaaggggtggcgatggggattaacccgttcgttcacggcagcgctaaacacaccgatattatgaaaaccgaagggttgaaacaggcgttggataaatatggctttgacgccgcgttcggtggcgcgcgccgcgacgaagagaagtcgcgcgccaaagagcgtatttactccttccgcgaccgctttcaccgctgggacccgaaaaaccagcgcccggagctatggcacaactataacgggcagattaacaaaggcgaaagcatccgcgttttcccgctctctaactggaccgaacaggatatctggcagtacatctggctggaaaatatcgagatcgtgccgctgtacctggccgctgagcgcccggtgctggagcgcgacggcatgctgatgatgatcgatgacgatcgtattgacctgcaacccggcgaggtgatcaaaaaacgcatggtgcgtttccgtaccctcggctgctggccgctcacgggggcggtggaatccagcgcgcagacgctgccggaaattattgaagagatgctggtctcgaccaccagtgaacgtcaggggcgcgtgattgaccgcgaccaggcgggctcaatggagctgaagaaacgtcaggggtatttctaa

SEQ ID NO: 74406 - DNA, 1428 bp, Citrobacter koseri
atgaacaccacacttgcacaacaaatcgctaatgaaggcggcgtcgaagcctggatggttgcccagcaacacaaaagcctgctgcgttttctgacctgcggcagcgtcgatgacggtaaaagcacgctgattggccgactgctgcacgatacgcgtcagatttatgaagatcagctctcgtcgctgcataacgacagtaagcgtcatggcacccagggtgaaaaactcgatctggcgctgctggtcgacgggttgcaggctgagcgcgagcagggaattaccattgatgtggcgtaccgctatttctcgaccgagaaacgcaaatttattattgccgacacgccagggcacgagcagtacacgcgtaacatggcgaccggcgcatcgacctgcgatctggcgatcctgctgatcgacgcccgcaaaggcgtgctggatcagacccgccgccacagttttatctctacgctgctgggcatcaagcacctggtggtggcgatcaacaagatggatctggtggggttcagcgaggagacgttcgcccgtattcgcgaagactacctgacgtttgccgggcagttgccggggaacctggacatccgctttgtgccgctctctgcgctggaaggggataacgtcgcgacccagagcgccagtatgccgtggtacaacggcccgacgctgctggaagtgctggagacggttgagatccagcgggttgtcgacacccagccgatgcgcttcccggtacagtatgtgaaccgtccgaacctcgatttccgtggttatgccggaacgctggcctccggcagcgtgaaggtcgggcagcgtgtcaaagttctgccgtccggcgttgaatccaacgtggcgcgcatcgtcacctttgatggcgatctgcaagaggcgcacgccggtgaagcgattacgctggtgctgaaagatgaaatcgacatcagccgtggcgatttgttgctggatgcaggcgaaaacctgccagccgtacagagcgccgccgttgatgtggtatggatggcggaacaaccgctgtcggccgggcagagttatgacatcaagattgccggtaaaaagacccgtgcgcgcgttgatgccattcgccatcaggttgatatcaacaacctgacccagcgcgaggtggaaagcctgccgttgaacggtatcggcctggtcgaactgacttttgacgaaccgttagtgctggatacataccagcagaacccggtcactggcgggttaatcatcatcgaccggctgtccaacgtgaccgttggcgcggggctggtgcgtgagcctattgagcgcaccgccgcgacgccttccgggttcagcgcctttgagctggaactgaacgcgctgatccgtcgccacttcccgcactggggcgcgcgtgatttgctgggaggcaagtaa

SEQ ID NO: 74407 - DNA, 606 bp, Citrobacter koseri
atggcgctgcatgacgaaaacgtcgtctggcatgcccatgcggtaacgcgcgaagatcgtgaagcgctgcatgggcataaaggggcagtggtctggtttacgggactttccggttcggggaaatcgacgattgcaggcgcgctggaagaggccctgcataagctgggtgtcagcacctggctgctggatggcgataatgtccgtcacggcctgtgcagcgatcttggctttagcgacgcagaccgtaaagagaatatccgccgggtgggggaggttgcgaacctgatggtggatgccgggctggtggtgctgacggcgtttatttcgccgcatcgcgcggagcggcagatggtgcgcgagcgcatcggggaggggcggtttatcgaggtttttgtcgatacgccgctggcaacctgtgaagcgcgcgatcctaaagggctgtacaagaaggccagggcgggtgaactgcgtaatttcaccggcattgattcggtatatgaaacgcctgaatcgcctgaagttcatctggatggtgaacaattagtaacaaatttggttgcccaattattagatctactgagacagggcgatattatcagatcctga

SEQ ID NO: 74408 - DNA, 324 bp, Citrobacter koseri
atgcgtaatagccataacattactatcacaaggtcagatgccctcacgaccgacgacgacacaacctggtcactgccgggcgccgtggtcggttttgcctcgtggctgctggcgttgggaattccctttctcatctatggccctaacacgctgtttttcttcctctatacctggcccttcttcctggcgctcatgcccgttgcggttgtggtcggcgtggccctgcattcaatcatgagcggcaaactgttctacagcattacggctacgctattaacggtaggcgcgatgtttggcgcgctcttcatgtggctgttggggtag

SEQ ID NO: 74409 - DNA, 312 bp, Citrobacter koseri
atgggtaaactaacgctgctgctgctgactttactggtctggttgcagtattcgctgtggttcggtaagaacggcatacatgactacagccgcgtcaacgatgatgtggctgcgcagcaagctacgaatgcgaaacttaaagcgcgtaacgatcagcttttcgccgaaattgacgatctcaatggcggccaggaagcgatcgaggagcgcgcgcgtaatgaactcagcatgaccaaaccgggcgaaactttttaccgtctggtgcctgacgcgtctaaacgtgctcaggctgcggggcaaactaatcgataa

SEQ ID NO: 74410 - DNA, 696 bp, Citrobacter koseri
atggcagccactttattggacgtttgcgctgtggtaccggctgccggatttggccgccgaatgcaaacggaatgtcctaagcaatatctctctattggcaataaaaccattcttgaacactcggtgcatgcgctgctggcgcatccccgggtgacgcgcgtcgttatcgcaatcagccctggcgacagccgcttcgccgaacttcctctggcgcaacatccgcaggtcaccgtcgtggacgggggcgacgagcgcgccgattccgtactggcaggcttacgggcggccggtgacgcgcagtgggtgctggtgcatgacgccgcccggccttgtctgcatcaggatgacctggcgcgtctgctctcgcttagcgaaaccagccgcacgggaggaatcctcgccgctccggtacgcgacaccatgaaacgcgccgagccgggtaaagccgccattgcgcataccgtagagcgtaccgacctgtggcacgcgttaacgccgcaattcttcccacgcgagctgctgcacgattgcctgagccgtgcgctgaacgaaggcgcgaccattaccgatgaggcgtccgcgctggagtattgcggttttcatccccaactggttgaaggccgggctgataatataaaagtcacccgcccggaagatctggcgcttgcggaattttatctgacccgaacaatctag

SEQ ID NO: 74411 - DNA, 480 bp, Citrobacter koseri
atgcgaatcggacacggttttgacgtacacgcttttggcggagaaggcccaattatcattggtggcgtgcgcatcccgtatgacaaagggctgctggcgcattctgatggcgacgtggcgctgcatgcgctgactgatgcgctgctcggcgcggcggcgcttggcgatatcggcaaacttttcccggataccgatccggcctttaaaggcgcggacagccgcgaattgctgcgggaagcatggcgacgcattcaggccaaaggctatacccttggtaacgtggacgtgaccattatcgcccaggcgccgaagatgctgccgcatatcccgcaaatgcgcgtgtttatcgcggaagatcttggttgtcatatggatgatgtcaacgtcaaggcgaccaccacggagaaactcgggttcaccgggcgtggggaagggattgcctgcgaagcggtggcactactgattaaggccgcgaaatga

SEQ ID NO: 74412 - DNA, 1050 bp, Citrobacter koseri
atgaccgagtttgaaaacctgacgtacctccacggaaagccgcagggtgccgggctgcttaaagcgaacccggaagattttgtggtggttgaagatttaggttttgagccagatggcgaaggcgaacatattctggttcgcattctgaaaaacggttgtaacacccgttttgtggccgatgcgctggcgaaattccttaaaattcatgcccgtgaagtgagctttgccgggcagaaagacaagcatgccgtcactgaacagtggctgtgcgcgcgcgtgccgggcaaagagatgccagacctgagcgcattccagattgaaggatgtaaagtgctggagtacgcgcgtcacaaacgtaagctgcgtttaggcgcgctgaagggcaacgcgtttacgctggtgctgcgtgaagtcagccatcgtgatgatgtcgaagcccggctacaggctatcaatacgcgcggcgtaccaaactattttggcgcgcagcgattcggtattggcggcagcaacctgcaaggcgcgctgcgctgggcgcaaagcaatgcgccggtgcgcgatcgcaataaacgcagtttttggttgtcggcggcccgcagtgcgttgtttaatcagatcgtcaacgaacgcgtgaaaaaaccagactttaatcaagttgttgatggcgatgcgctacaattagcggggcgcgggagctggtttgtggccacgcaggaagaacaggcggaattgcagcgtcgcgttgacgaaaaagaactgatgattacggcggcgcttcccggtagcggcgagtggggaaccctgcgcgacgctctggcgtttgaagaggctgccattgcggatgagagcgaactgcaatcgttactgctgcgcgaaaaggttgaagcggcgcgcagagcgatgctgctctatccgcaacaattacgctggaactggtgggatgacgtcaccgttgagctgcgcttctggctaccggcaggcagtttcgccaccagcgtcgtaagggaactgattaacacaatgggtgattatgcgcatattgctgagtaa

SEQ ID NO: 74413 - DNA, 762 bp, Citrobacter koseri
atgcgcatattgctgagtaacgatgatggggtccacgcgcccggtatacaaacgctggcgaaagcgctgcgtgagtttgctgacgtacaggtcgtcgccccggatcgtaaccgcagtggcgcgtcaaactcgctgacgctggaatcctcgcttcgtacctttacttttgataacggcgatatcgccgtgcagatgggcacgccgaccgactgcgtctacctgggcgtgaacgcgctgatgcgtccgcgcccggatattgtggtttcaggcattaacgcgggccctaatctgggcgatgatgtcatctattccgggaccgtcgccgcagcgatggagggccgtcacctgggttttcccgcgctggcggtatcgcttgacggccatcagcactatgagacggcggcagcggtaacctgctctattttgcgtgcattacgtcgggagccgctgcgtaccggacgcattctgaatatcaatgtcccggatctgccgctggatcaaatcaaaggcattcgcgtaacccgctgcggcagccgccatccggccgatcaggttattccacagcaggacccgcgcggcaacacgctgtactggatcggcccgccgggcggcaaatgcgacgccgggccggacaccgattttgcagcggtggatgagggctatgtctccgttaccccgctgcatgtggatttaacggcgtatagcgcgcatgatgtggtttcggactggttagacagcgtgggagttgacgcgcaatggtaa

SEQ ID NO: 74414 - DNA, 627 bp, Citrobacter koseri
atggtaagcagacgcgtacacactcttcttgaacaattgcgcgctcagggcatcaaagatgagcaagtgctggatgcgcttgccgccgtcccgcgtgaaaaattcattgatgaagcgtttgaacataaagcctgggacaatatcgctttgccgattggccaggggcagaccatttcgcagccctatatggtggcgcgaatgacagaattgcttgagctgacgccgcaatccagagtgctggagatcggcactggctccgggtatcagacggcgattctcgcgcatctggtacagcatgtgtgctcggtggagcgcattaaagggctgcaatggcaggcgcgtcgtcgcctgaaacagcttgatttacacaatgtttcaactcgtcatggcgatggatggcaaggttggcaggctcgcgccccgtttgacgccatcatcgtgacggcagctccgccggaaattccgacggcgttaatgacgcaactggatgaaggcgggattctcgttttacccgtgggtgaggagcatcagttcttgaaacgggtgcgtcgccggggaggcgaatttattatcgataccgtggaggccgtccgctttgtgcctttagtgaaaggcgaactcgcttaa

SEQ ID NO: 74415 - DNA, 1128 bp, Citrobacter koseri
atgagcgcgggaagcccaaaattcaccgttagccgcattgcggcattgtcgctggtttcgctatggctggcaggttgttccaattcttcgaatcctcctgcgccggtaagctcagttaatggtaataccccgtcgagcaccagctccgggatgctgatcacgccgccgcccaaaatggggacaacggtgcaacaaacgccgcagattcagcccgtgcagcctgttcaaccggttgcccagtcccggcagatccagccggtcgctgagcagcctgtgcaaatggaaaatggccgtatcgtgtacaaccgccagtatgggaacattccgaaaggcagctacaccggcggcagcacatacaccgttaaaaaaggcgacacgcttttctatatcgcctggatcaccgggaacgatttccgcgaccttgctcagcgtaacaacgttccagccccatacggcctgaatgtggggcaaacgctccaggtcggcaatgcctcaggcacgccaattaccggcggcaacgcgattacgcaggcggatgcagtagagcaaggagttgtgaccaaacctgcacaaaattccaccgttgtagttgcgtcgaaaccgacaattacgtattctgaggattcaggtgaacaaagtgctaataaaatgttgccgaacaacaagcctgctgggaccgtggtcacagcgcctgtaacggcaccaacagcgagcacaaccgaaccgactgcaagcagtacgtcaaccagttcgccaatctccacatggcgctggccgactgagggcaaagtgatcgaaaacttcgcggctaccgaaggtggcaacaaagggatcgacattgcaggcagtaaaggacaggctattgtcgcgaccgcagatggacgcgtcgtatatgccggtaacgcgctgcgcggttacggtaatcttattatcatcaaacacaacgatgattacctgagtgcctacgcccataacgatacgatgctggtccgggaacaacaagaagttaaggcggggcaaaaaatcgctaccatgggtagcaccggaaccagttctacacgcttgcattttgaaattcgttacaaggggaaatccgtaaacccgctgcgctatttaccgcagcgataa

SEQ ID NO: 74416 - DNA, 993 bp, Citrobacter koseri
atgagtcagaatacgctgaaagttcatgatttaaatgaagacgcggaatttgatgagaacggagtagaggcttttgacgaaaaagccttgagtgaagaggaacccagtgataacgacctggctgaagaggagctgttatcgcaaggggccacacagcgtgtgttggacgcgactcagctttaccttggtgagattggttattcgccactgttaacggccgaagaagaagtttattttgcgcgtcgcgcactgcgtggagatgttgcctctcgccgtcgcatgattgagagtaacttgcgtctggtggtaaaaattgcccgccgttatggcaatcgtggactggcgttgctggacctgattgaagagggcaatctggggcttatccgtgccgtcgagaagtttgaccctgaacgtgggttccgtttctcaacatacgctacctggtggattcgccagacgatcgaacgggccattatgaaccaaacccgtacgattcgactgccgattcacattgttaaagagctgaacgtctatctgcgtaccgcacgagagttgtcgcataaactggaccacgaaccgagcgcggaagagatagcagagcaactggataaaccggttgatgacgtcagccgtatgcttcgtctcaacgagcgcataacctcggtagacaccccgttgggtggtgattccgaaaaagcgttgctggatatcctggccgatgaaaaagagaacggcccggaagacaccacgcaagatgatgatatgaaacagagtatcgtcaaatggctgttcgaactgaacgccaaacagcgtgaagtgctggcacgtcgtttcggtctgctggggtatgaagcggcgacactggaagatgtggggcgtgaaattggtctcacccgtgaacgtgttcgtcagattcaggttgaaggcctgcgtcgtctgcgcgaaattttgcagactcaggggctgaatatcgaagcgctgttccgtgagtaa

SEQ ID NO: 74417 - DNA, 405 bp, Citrobacter koseri
atggagttacgaaacacagcgtttcatctgttacgtcagctttttcaacagcatacggcccgctggcagcacgaattaccggaactgaccaagccacagtatgcggtaatgcgcgctattgctgagcatccaggcattgagcagattgccctaatggaggcggcggtcagtacaaaagcgacgctggcggagatgctaagccgaatggaaagccggggactggtgacgcgggaaagcgatccacaagataaacgccgccgctttgtttatcttactggcgaaggagaaacgctgctgaccggcgccatgccgttgggggatcgtgtggatgatgaatttttagggcgcctgagcgacgatgagcgtgagcagttcacgcagctggtgcgcaagatgatggggtaa

SEQ ID NO: 74418 - DNA, 594 bp, Citrobacter koseri
atgagactgattgtggggatgaccggcgcaacgggggcgccgctaggcattgcgctgctacaggcgctgcggcacatgccgacagtagaaacacacctggtaatgtctaagtgggccaaaacgaccattgagctggaaacgccttacagtgcgcgagatgttgccggactggctgattactgccataacccggcggatcaggcggcgacgatctcttccggctcatttcgcaccgacggcatgatcattattccttgcagtatgaaaacgctggcggggattcgcgcaggatatgccgaggggttagttggccgtgccgccgatgtggtgctgaaagaagggcgcaaactggtgctggtgccgcgtgaaatgccgctcagcacgatccatctggaaaacatgctcgccctttcccgcatgggggtcgcgatggtgccgcccatgcctgctttctacaaccatccgcaaaccattgatgatattacgcagcatattgtggcgcgtgtgctggatcagtttggtctggagcatccgcgtgcccggcgctggcaggggttgcagcaggcgcagaatttttcacaggagaatgaataa

SEQ ID NO: 74419 - DNA, 1428 bp, Citrobacter koseri
atggcatttgatgacttacgcagctttttgcaggcgcttgacgagcaggggcaactgctgaaaatcagtgaagaagtgaatgcagagccggatctggctgctgcggctaacgcaaccgggcgcattggcgacggcgcgccggcgctgtggttcgacaatatccgtggcttcacggatgcgcgcgtggcgatgaacaccattggttcctggcagaaccatgccatctctttaggcttgccgcctaatacgccagtaaaaaagcaaattgatgaatttatccgccgctgggacacgttccccgtcgcccccgagcgccgtgtcaacccggcgtgggcggaaaacaccgttgatggcgaggcgatcaacctgtttgatattctgccgctgtttcgcctcaacgatggcgatggcggcttctatctggataaagcctgtgtcgtctcccgcgatccgctcgacccggatcacttcggcaagcagaatgtgggtatctaccggatggaagtgaaaggcaagcgcaagctgggcctgcagccggtgccaatgcacgatatcgcgctgcatctgcataaggcggaagagcgtggcgaagatctgccgattgctattacgctcggtaacgatccgatcatcactctgatgggcgccacgccgctgaaatacgatcagtctgagtatgaaatggcgggcgcgctgcgcgaaagcccatacccgatcgccaccgcgccgctgaccggctttgatgtgccgtggggctcagaagtgatccttgaaggggtgatcgaaagccgtaagcgtgaaattgaagggccgtttggcgagttcaccggccactattctggtgggcgcaatatgacggtagtgcgcatcgacaaagtgtcttatcgcactaaaccgatttttgaatcgctctatctggggatgccgtggactgaaatcgactacctgatggggccagcgacctgtgtgccgctgtatcagcagttgaaagcggaattcccggaagtgcaggcggttaacgccatgtatacccacggtctgctggcgattatctcgaccaaaaaacgctacggcggatttgcccgcgcagtcggcctgcgggcaatgaccacgccgcatggtctgggctatgtgaagatggtgattatggttgatgaggatgtcgatccgttcaacctgccacaggtgatgtgggcgctgtcgtcgaaggtcaacccggcaggcgatctggtgcagctgccgaacatgtcggtgctggaactggacccaggctcaagcccggcggggatcactgacaaactgatcatcgacgccacaacgccggttgcgccggataatcgcggccactacagccagccggtatgtgatttaccggaaaccaaagcctgggctgaaaagctgactgccatgctggccaaccgtaaataa

SEQ ID NO: 74420 - DNA, 237 bp, Citrobacter koseri
atgatttgtccacgttgtgctgatgaacatattgaattgatggcgacctctccggtcaaagggatctggacggtgtatcagtgccagcattgtctgtacacctggcgtgataccgagccgctacgccgtaccagccgtgaacattatccgcaagcgtttcgcatgacgcagaaagatattgatcaagcgccgatggtgccgggcattccaccgctgctggcggaagataagcgttaa

SEQ ID NO: 74421 - DNA, 2562 bp, Citrobacter koseri
atgagtacaatcgataatctcgacgcccatacccccatgatgcagcagtatctcaagctgaaagctcagcacccggagatcctgctgttttaccgcatgggcgatttttacgaactgttttacgacgatgcacgccgcgcctcgcaattactcgatatttcgctgaccaaacgcggcgcatcggcgggcgaaccgattccgatggcgggcatcccgcatcacgccgtcgaaaactaccttgcgaagctggtcaatcaaggggagtccgtcgcaatctgtgaacagattggcgatccggccaccagcaaaggcccggttgaacgtaaggtcgtgcgcatcgttacgcctggcaccatcagcgatgaagcgctgttgcaggagcgccaggacaacctgctggccgccatctggcaggacagcaaaggctacggttacgccacgctggacattagctccgggcgttttcgcttaagcgaaccggttgaccgtgaaacgatggccgcagaattacagcgcactaacccggcagaactgctgtacgccgaagattttgccgaaatggcgctgatcgacggccgccgtggtttacgccgtcgcccgctgtgggaatttgaaatcgataccgctcgccagcagctaaacctgcaatttggtacgcgggacctgatcggctttggcgtagagaacgcaccacgcggactgtgcgccgcaggctgtctgttgcagtacgtcaaagacacccagcgcacttcactgccgcacattcgctccattacgatggaacgccagcaggacagcatcattatggatgccgccacgcgccgcaacctggagatcacccagaacctggcgggcggcgtggacaatacgctggcttcggtgctcgactgcaccgtcacgccaatgggcagccgtatgctcaaacgctggctgcatatgccggtgcgcgacacgaaaaccctgatcgaacgtcagcagaccattggcgcgttgcaggatgtgaccagtgaattgcaaccggtgctgcgtcaggtgggcgacctggagcgtatcctcgcccgtctggccttgcgtaccgcccgaccacgcgacctcgcccgtatgcgtcacgccttccagcagttaccggaactgcgcgcacagcttgaaaccgtaaccagcgcccccgtgcagaacctgcgcgagaaaatgggcgagtttaccgaactgcgcgatctgctggaacgcgccattatcgacgcgccgccggttctggtgcgcgacggcggcgttattgcgccgggctacaacgaagagctggacgaatggcgcgcgctggctgacggggcgaccgactatctcgatcgtctggaaatccgcgagcgtgaacgtaccgggctggatacgctgaaagtcggctttaacgccgtacacggttattacatccagatcagccgtgggcaaagccacctggcgcccattaactacgtccgccgtcagacgctgaaaaacgccgagcgctacattattcccgagctgaaagagtacgaagacaaagttctgacctctaaaggcaaagcgctggcgctggaaaaacagctttatgacgaactgtttgatctgctgctccctcacctggcagagctgcaacagagcgccaatgctctggctgagttggacgtgctggtcaacctggctgaacgcgcgtatacgctgaattatacctgtccgacctttagcgataagcccggcattcgtattaccgaaggtcgccatccggttgtcgagcaggtgctgaacgagccgtttatcgccaacccgctgaacctttccccacagcgccggatgctgattattaccgggccgaacatggggggtaaaagcacctatatgcgtcagaccgcgctgattgcgctgctggcgtatattggcagctacgtgcctgcgcaaagcgttgagattggcccaatcgaccgcatctttacccgcgtaggcgcggcggacgatctggcttccggtcgttcaaccttcatggtcgagatgaccgaaaccgccaatattttgcacaatgcgaccgaaaacagtctggttttgatggacgaaatcgggcgcggcacatcgacctatgacggcctgtcgctggcgtgggcatgtgcggaaaatctggcgaataagatcaaagcgctgacgctgttcgccacccactacttcgaactgacgcagttgccggagaaaatggaaggcgtcgcgaatgtgcatctggacgcgctggagcacggcgataccatcgcctttatgcacagcgtgcaggacggggcggcaagcaagagttacggtctggcggtagctgcgctggcgggcgtgccgaaagaggtgatcaaacgcgcgcggcagaagctgcgcgagctggaaagcctctcgccgaatgccgccgcgacccaggtggatggtacgcagatgtcgctgctgtcggttgcggaagagacctctcctgccgttgaagcgctggaaaacctcgaccctgactctctgacgccacgccaggcgctggagtggatctaccggttgaagagtctggtgtaa

SEQ ID NO: 74422 - DNA, 849 bp, Citrobacter koseri
atgcgcttaaccgccttactggaacccttccagtttgattttatgatcaacgcgctcatggtctcggcaattgtggcgatcccctgcgcgttattgtcggtgtttctggtgctgaaaggctgggcgttaatgggcgacgccatgagtcacgccgtgttccccggcattgtgctggcctatatcgccggtattccgctggccatcggcgcgtttattgccgggctattctgcgcggttgccaccggctatctcgacgataacagccgcattaagcgcgataccatcatgggaatcgtcttctcaggaatgtttggcgcagggctggtgctgtacgtttctatccagtctgaagtccatctggatcatattctgttcggcgatatgctgggcgtgtccatcagcgatattctgcaaacggcgctgattgcgctgggtattgcgctaattatcgggctgaaatggaaagactttttactgcatgccttcgatccgcaccaggcaaaagccagcggccttaatacctccctgctgcattatggtctgttgtgcatgatcgcgttgaccatcgtcgcaacgctgaaatcggtggggattattctttccatctcgctgttaatcgcccctggcgcgattgcgattttgctgacgcggcgttttgcccgcgcgctaatgctggcggtcacgctgtcggtcgtcacctcttttcttggcgtttatctgtcgtttttcctcgacagcgcccctgcgccaaccatcgtagtattgttcactgcgatcttcatcgtggcatttatttacgctacgttgcgggagcggcgttccgaaatgcagctcaaacagcagttataa

SEQ ID NO: 74423 - DNA, 861 bp, Citrobacter koseri
atgaactggcttgtggaaccgttcggctaccagtacatgctcaacgccatgtgggtctcggcaatggtcggcggcctgtgcgcctttctctcctgctatctgatgcttaaaggctggtcgctgattggcgacgcgctttcccactccatcgtccccggcgtggcgggcgcgtatatgctggggctgcccttctctctcggcgcgtttctctccggcggcctggcggcgggcagcatgctttttctcaaccagcgttcacgcctgaaagaagacgcaattatcggtcttatcttctcctctttctttggcatcgggctgtttatggtttcgctcaatccgatgtcggtcaacatccagaccattatcctcggcaacgtgctggctattgcgccggaagatattctgcaactggcgatcatcggtacggtctctctggtgattttgctgctgaagtggaaagatctgatggtgacttttttcgacgaaaaccatgcgcgatcgattgggcttaaccccgcccggctgaagctgctgtttttcacgttgctgtcggtctccaccgtcgccgctctgcaaaccgtcggcgcttttctggtgatctgtctggtggtcacgcctggcgccaccgcctggctgctgaccgatcgttttccgcgcctgttaaccatcgccgtcgccatcggcagcctgaccagctttttcggcgcctggctcagctactggctggatggtgcgaccggcgggatcatcgtcgtcctgcaaacgctattgtttctgctggcgtttatcttcgctccgaaacacggcctgcttgccaaccgccgtcgtgcgcgcctgaataaggagaccccatgcgcttaa

SEQ ID NO: 74424 - DNA, 822 bp, Citrobacter koseri
atgagtcaatctgcgattaccgttgatcgcgtcacggtgacgtatcgcaatggtcacactgccctgcgggacacaacgtttcaggtgcctggcggctcaattgccgcgctggttggcgtcaacggttcagggaaatcgacgctgtttaaagcattgatggggtttgtccgactggcgaagggagaaatcgccatcctgcaacagcccgtcaacaaagcgttgaaacagaatctgatcgcctatgtcccgcaatctgaagaggtggactggtcgtttccggtactggtggaagatgtggtgatgatggggcgctacggccatatggggtggctgcgccgccccagcgcgcgcgatcgtgagagcgtggacgccgcgctggcgcgggtggacatgctggaatatcgctatcgacagattggcgagctttccggcgggcagaaaaaacgcgtctttctggccagagccatcgcccaggacgggcaggttattcttctggatgagccttttaccggcgttgacgtaaaaaccgaagcccgcattattgccctgttgcgcgagctgcgcgatgaaggccgcaccatgctggtttcaacgcataacctcggctcggtaacggagttttgcgattacacggtgatgatcaaaggcaccgtgctggcgagcggcccgacggaaaccaccttcaccgctgaaaacctcgaactggcgttcagcggcgtattgcgtcatgtggcgctgagcggcggcgaggagcatatcatcaccgacgacgagcgtccctttatctcacggcgcgcggcaggcggaggagaatcatcatga

SEQ ID NO: 74425 - DNA, 918 bp, Citrobacter koseri
atgccgcacttgctccgtctgaaatccattctccttgccagcgcgctggcgatgcttgcgctgtcgtctgcttatgcaaaagataaatttaaggtcatcacaacgtttaccgtcatcgccgacatggcgaaaaacgtagcgggcgatgcggcggacgtcagttcaatcacgaagcctggcgcggagatccacgagtatcagccgacgcccggcgacattaagcgcgcgcagggcgcgcagctgatcctctctaacggcctgaacctggagctgtggttcgcccggttctaccagcacttatccggcgtgccggaagttacggtatccaacggcgtgaagccgatgggcattaccgaagggccgtataacggcaaacccaacccgcacgcctggatgtcggcggaaaatgcgctgatttacgtggataacattcgcgatgcgctggtgaaatacgatccagataacgccgcgacgtaccagaaaaacgccgaaaactataaagcccaaatccgccagacgctcgatccactacgcgacgcgctggcgaagattcctgccgacaagcgctggctggtgaccagtgaaggggcattttcctatctggcgcgcgataacgacctgaaagagctgtacctctggccgatcaacgccgatcagcaaggcacgcctaaacaggtgcgcaaagtgatcgacgcgatcagggaacatcacatcccggcggtgttcagcgaaagtaccgtttccgataaaccggcccgccaggtcgcgcgtgaatccggcgcgcactacggtggtgtgctatatgttgattctctgagcgctgccgacggtccggtgccgacgtatctggatctgctgcgcgtcacaactgaaaccatcgtcagcggcatcactgacgggctgaggagccagaaatga

SEQ ID NO: 74426 - DNA, 345 bp, Citrobacter koseri
atgtccggtaagcgtattgctcgtgaaaaactgacgattaaaaaaatgatcgcgctgtacgagagccagtgcccgcaggcctcaaacgagcaaggtcattacgatgcgctgtttgcctatgcgcaaaagcggctggataagtgcgtgtttggcgaggaaaaaccggcctgtaagcagtgtccggtgcactgttatcagcccgcgaagcgtgaggagatgaagcagatcatgcgttgggcaggcccaagaatgctctggcgccatccgattttgaccatccgtcaccttattgatgacaaacgccccgtcccggaattgccggaaaagtatcagcgcaagaaataa

SEQ ID NO: 74427 - DNA, 429 bp, Citrobacter koseri
atggcggtatcagcacgtaatcaactgaccggtacggttagcgcagtcgcaacgggtgcggtgaatgatgaagttgaactgacgctggcgggcggcgcaaaactggtggcgattgtcactcacagcagccagcaggcgctgggtctgacaaacggaaaagacgccattgctttgattaaagccccctgggttactctggcaagcgaagattgcggcctgaagttctccgcccgcaaccagtttgccggtagcgtatctcaggtgacggaaggcgcggtcaacgcgactgtacacatcaaaaccgacgctggttttgagattgtggccgttgtcaccaatgaaagtcaggaagagatgaaactggcgcagggcagtcgcgttattgcgctgattaaggcgtcagcgattctgattgcgaccaaagcgtaa

SEQ ID NO: 74428 - DNA, 2079 bp, Citrobacter koseri
atgtcgtatacaccgatgagcgatctcggacaacaaggtttgttcgacatcactcgtacattattgcagcagcccgacctggcgtcgctcagtgaagcgctttcgcaactggtcaagcgctcagcgctggccgacagcgcggctattgtgttatggcagccacagacacaacgcgcgcgttattatgcaactcgcgaaaatggtaaagctgtcgcgtatgaagacgaaaccgtgctggcacacggcccggttcggcgcattctctcgcgccccgatgcgctgcactgcaatcatcacgaattcagcgaaacctggccgcaactggcgacaaacgggctgtacggtgaatttggccactactgtttgctgccgctggccgctgaagggcgcatttttggcggctgcgaattcatccgccaaaacgaccagccgtggagcgagaaagagtacgaacgcctgcaaaccttcacccagattgtcgcagtggtcgctgagcaaattcagtgtcgggtcagcaataacgttgactacgatctcctgtgccgtgagcgcgacaacttccgcattctggtggcgatcaccaatgccgtgctttcacggctggacatcgacgaactggtgagcgaagtcgcgaaagagatccaccactactttaatatcgatgccattagcatcgtcctgcacagcgcccgcaaaaacaagctgagcatctattccacacattatctggatgaacataatcccgcgcatgaacaaagcgaagtggacgaagcgggaacgctctctgaacgggttttcaaaagcaaagagatgctgctgattaacctgaacgagcgggatacgcttgcgccgtacgaacgcatgctgttcgacacctggggcaaccagatacagaccctgtgtctgctgccgctgatgtccggcaatacaatgctcggcgtgctgaagctggcgcaatgcgaagagaaagtgtttaccaccgccaacctcaaactactgcgccagattgccgaacgcgtggcgattgccgtggacaacgccctcgcctatcaggaaattcaccgactgaaagagcgtctggtcgacgagaacctggcgcttaccgagcagctcaataacgtggatagcgaatttggcgagataatcggtcgcagcgaagccatgtacaacgtgctcaagcaggtggagatggtggcgcaaagcgacagcaccgtcctgatcctcggtgaaacaggaaccggcaaagagctgatcgccagggcgattcataatctgagcgggcgtaacgcacggcgaatggtgaagatgaattgcgcggcgatgcccgccgggctgctggaaagcgatctgtttggtcacgagcgcggcgcctttaccggcgccagcgcgcagcgtattggtcgctttgagctggcggataaaagctcgctgtttcttgatgaagtgggcgacatgccgctggagctacagccgaaactgctgcgcgtgctccaggagcaggaatttgaacgtctgggcagcaataaactgatccagacggacgtcaggctgatcgccgccaccaaccgcgatctgaaaaaaatggtggccgatcgtgagttccgcaacgatctctattaccgtctgaacgtctttccgatccagctcccgccgctgcgcgagcgcccggaggacattccgctgctggtcaaagccttcacctttaaaatcgcccgccggatggggcgcaacatcaacagtattcctgccgaaacgctacgcacgctgagcaatatggagtggccggggaacgtccgcgagctggaaaacgtcgtcgagcgcgccgttctgctgacgcggggcaacgtgctgcaactctcgctgccggacatgggaatgctcacgccgggcgcgccgtcggtcgccaccgaagtcgcccaggagggcgaggatgaatttcagctcattatgcgcgtgttgaaagagacaaatggcgtggtggcggggccaaaaggcgccgcgcagcgtctggggctgaagcgcaccaccctgctctctcgcatgaaacgattaggcattgataaagatgcattggtatag

SEQ ID NO: 74429 - DNA, 1011 bp, Citrobacter koseri
atgaacagcgtacaacttgcccacggcagcggcggtctggccatgcagcagctgattaacagcctgtttatggaggcctttgccaacccgtggttggctgagcaggaagatcaggcgcgtcttgaactggcgcaactggcggcggaaggcgaccgcctggccttctccaccgacagctacgttattgacccgctgtttttccccggcggtaatatcggcaaactggcgatttgcggcacggccaacgacgtggcggtcagcggtgcgatcccgcgttatctctcctgcggctttatcctcgaagaaggtctgccgatggagacgctgaaaagcgtggtgaacagcatggcggcaaccgcgcgcgaagccggtatcgccattgtgaccggtgataccaaagtcgttcagcgcggcgcggcggataagctgttcatcaacaccgccgggatgggggcgattcccgccaatattcactggggggcgcaaacattaagcgtgggagatgtgctgctggtcagcggcacactcggcgatcatggcgcaacgatcctcaatttgcgtgaacaactggggctggatggcgagctggtcagcgactgcgcggtattaaccccgcttattcagccgctgcgcgatattccaggcgtgaaagccttacgcgatgcgacgcgcggcggcgtgaatgctgtcgcccatgagtttgccgccgcctgcggcttcggtattgagttgtctgaatccgcgctgccggtcaaaccggcggtgcgcggcgtctgcgaactgctggggctggatgcgcttaactttgccaatgaaggaaaactggtgatcgccgttgaacgccaggccgcagacgcggtgcttgacgcgctgcgcgcgcacccgctgggccgcgatgcggcgccgatcggcgaggtggttgaacgcagaggcgttcgcctggccggtctgtatggcgtgaaacgtacccttgatttaccccacgccgaaccgttgccgcgtatatgctag

SEQ ID NO: 74430 - DNA, 1122 bp, Citrobacter koseri
atgcgttttgttgacgaatatcgcgcgccggaacaggtgatgcagttgattgatcacctgcgtgaacgtgccgcgcatctcccttataccgccgaacgtccgctacgcattatggaagtgtgcggcggtcatacgcacgccatcttcaagttcggcctcgaccagctgctgcccgacaacgtggagtttatccacggccccggctgcccggtgtgcgtgctgccaatgggcagaattgacagctgcgtggagatcgccagccatcctgaggtgattttctgcacctttggcgatgccatacgcgtaccggggaaacagggttcgctattgcaggccaaagcccgtggcgcagatatccgcattgtttattcgccaatggatgccctgaaactggcgcaggaaaacccaacgcgcaaagtcgttttcttcggtctgggatttgaaaccaccatgccgaccaccgccatcatgctgcaacaggcgaagcttcgcaacgtgcagaacttttactttttctgccagcacatcacgcttattccaacgctgcgcagcctgctggagcagccggataacggaattgacgcgtttctcgcgccgggtcacgtcagcatggtgatcggcaccgacgcctatagcttcatcgcgacggatttccatcgtccgctggtggtggcgggattcgaaccgcttgatctactgcaaggcgtcgttatgctggttgagcagaaaatagcctctcatagccaggttgagaaccagtaccgtcgcgtggtgccggatgccggtaatctactggcgcaacaggctatcgccgaggtgttttgcgtcaacggcgacagcgaatggcgcgggctgggcgtgattgaatcgtctggtgtccacctgacgccagactaccagcggtttgacgccgaagcgcacttccgcccggcgccgcaacaggtatgcgacgatccgcgtgcgcgctgcggagaagtgctcaccggcaagtgcaaaccgcaccagtgcccgttgtttggcacgacctgtaacccgcagacggcgttcggcgcgttaatggtctcctccgagggggcatgcgccgcctggtatcaatatcgtcagcaggagtgtgaagcatga

SEQ ID NO: 74431 - DNA, 273 bp, Citrobacter koseri
atgtgcataggcgttccggggcaaattcgctccattgacggcaatcaggcgaaagtcgatgtctgcggcatccagcgcgatgtcgacctgacgctggttggcagttgcgatgagagcggtgagccgcgtctgggccagtgggtgctggttcacgttggttttgccatgagtgtgattaacgaagcggaagcgcgcgacaccctcgacgcgctgcaaaacatgtttgatgtcgaaccagacgtcggcgctttgttgtatggcgaggaaaaataa

SEQ ID NO: 74432 - DNA, 873 bp, Citrobacter koseri
atgtgtacgacatgcggttgcggtgaaggcaacctttatatagagggagatgagcataatccccattcggcgtttcgtagcgcgccttttgccccggcggctcgcccggcgctgaacatcaccggcgtgaagacatccgcctttaccccgagccagaccgcagaaggcgatctgcactacggtcacggtgaagcgggaacccatgcgccgggtatgagccagcgccggatgctggaagtcgaaattgacgtgctggacaaaaacaaccgtctggccgagcgcaaccgcgcccgcttcgccgcccgccagcatctggtgctcaaccttgtctccagccccggttccggtaaaaccaccctgctgaccgaaacgctgatgaagttaaaagacagtgtgccgtgcgcggtgattgaaggcgaccagcagacggtcaacgacgccgcccgcatccgcgcgaccggtacgcccgctattcaggtcaacaccggcaaaggctgccatcttgatgcgcaaatgattgccgatgccgctccgcgtctgccgctggccgacaacggtattctgtttatcgaaaacgtcggcaaccttgtctgcccggccagctttgacctcggcgagcgccataaagtggcggtgctttccgtcacggaaggcgaagacaagccgctgaaatacccgcatatgttcgccgccgcttcgctcatgctcctgaacaaagtcgatctgctgccgtacctcaattttgacgttgagaagtgcatcgccagcgcccgggaagtcaatcctgacattgagatcatcctcatctccgccaccagcggcgaagggatggatcggtggctgaactggctggaggcacagcgatgtgcatag

SEQ ID NO: 74433 - DNA, 372 bp, Citrobacter koseri
atgcacgaaataactctctgccaacgggcactggaattaattgaacaacaggccgcagcgcacggtgcaaaacgggtaactggggtctggctcaaaattggcgcattttcttgcgtagaaaccagcgctctcgccttttgttttgatctggtatgccgtggcaccctggcggaaggttgtaaactccacctcgaagaacaagaagccgaatgctggtgcgagtcttgtcagcagtacgtcacgttactgacgcagcgcgtgcgccgttgtccgcaatgccagagcgacacgctacgcattgtggccgatgacggattgcagattcgccgaattgaaatagacagtaatccaacgccggatagcgacgcctga

SEQ ID NO: 74434 - DNA, 462 bp, Citrobacter koseri
atgactatttgggaaataagcgaaaaggctgattacatcgcgcagcggcatcatcgcctgctggaccagtggcgaatctactgcaactcactggttcaggggatcaccttatcaaaagcgcgtctgcatcacgccatgagctgtgcgccggacaaagatctgtgctttgtgcttttcgagcacttcacgatttacgtcaccctggcggacggttttaacagccacaccatcgagtattacgtcgaaaccaaagacggtgaagataagcagttgattgcacaagcgcaattgaccatcgacggcctcgttgatgagaaggtcagtaaccgcgatcgcgagcaggtgctggagcactatctcgaaaaaatcgccagcgtttacgacagcttatacaccgccgtggaaaacaatcgcccggtgaatttacgtcaactggtaaagggaaatagcccggcggcataa

SEQ ID NO: 74435 - DNA, 612 bp, Citrobacter koseri
gtgaatcgttttgtaattgctgactccacgctctgtattggctgccacacctgtgaagcagcctgttcagagacgcatcgccagcacggcctgcaatcaatgccgcggctgaaagtgatgctcaatgaaaaagaatccgcgccgcagctgtgtcaccactgtgaagatgcgccctgtgccgtggtgtgcccggtgaacgccatcaatcgggtagacggcgccgtacagctgaatgaaagcctgtgcgtaagctgcaagctgtgtggcattgcctgcccgttcggcgcgattgaattttccggcagccgtccgctgcatattccggcgaatgccaattcaccgaaagccccgccggcgcctcccgcgccggcacgcgtcagcacgctgctggactgggtgccgggcgtgcgcgccatcgcggtcaaatgcgatctgtgcagcttcgacgaacaaggcccggcctgcgtgcggatgtgtccgaccaacgcgttacacctggtgaataacatggatatcgcccgcgccagcaagcgcaaacgtgagctgaccttcaacaccgattttggcgatctcaccttgtttcagcaggcgcaaagtggggaggcaaaatga

SEQ ID NO: 74436 - DNA, 1827 bp, Citrobacter koseri
atgaacgcaatttcactgatcaatagcggtgtggcctggttcgcggcggcggccgtactggcatttctgttttcctttcataaagcgctgagcggctgggtcgccggtgtcggcggcgcggtcggcagtctgtataccgcggcggcgggtgtttccgtcctggtgaatgcgacagcggtcagcggcgtgatgccgttgatcggtcatggtttacaaatcaccccgctgaacgccatctggctgattacgctggggctgtgcgggctgttcgtcagcctgtacaacatcgactggcatcgtcacccgctggtgttagccaacgggctgctggtaaacctgctgatggcggcggcagtttgcgcggtcgtcgccagcaatcttggtacgctggtggtgatggcggaaatcatggcgctgtgcgcggtgtttcttaccggttgcagcaaagagggcaaactgtggtttgcgctggggcgtatcggtacgctgctgctggctgtcgcctgctggctggtgtggcagcgttacggcacgctggaactgcgtctgctcgatctgcgcgcccaggcgttgccgcttggttctgacatctggctgctcggcgtagtcggttttggtctgctggccgggattatcccgctgcacggttgggtgccgcaggcgcatgccaacgccagcgcgccggcggcggccctgttctctaccgtggtgatgaaaatgggtctgctgggcattctctctttatcgctgattggcggcaatgcgccgctgtggtggggcgttctgctgctggtgctcggcatgatcaccgcgtttgtcggcggtctgtatgcgctgatggaacataacattcagcgtctgctggcgtaccacaccctggaaaacatcggcattatcctgctcggtctgggcgcgggcgtcaccggtattgccctcaatcaaccggcgctgattgcgctcggcctgaccggtggtctctatcatctggttaaccatagcctgttcaaaagcgtgctgtttttgggcgcgggcagcatttggttccgtaccgggcaccgcgacatcgaaaaactgggcggtattggtaaacgtatgccggtgatttctgtcgcgatgttgattggcctgatggcgatggccgcgctgccgccgctgaacgggtttgccggtgagtgggttatctatcagtccttcttcaaactgggcaacagcggcgcgttcattggccgtctgttagggccgttgctggccgtcgggctggcgattaccggtgcgctggcggtgatgtgtatggcgaaagtctatggcgttacgttcctcggcgcgccgcgtaccaaagaggcggaaaacgcctgctgcgcgccaatcctgatgggggtgagcgtcgtcgcgctggccatttgctgcgtgctgggcggcgttgccgcgccgtggctgctgccgctgatctccgctgccgtgcctctgccgctggagacggcgaataccaccgtttctcagccgatgatcgcgctgctgctgatcgcctgtccgctgctgccgttcatcatcatggcgattttcaaaggcaaccgtctgccgtcgcgttcacgcggcgcggcctgggtctgtggctacgaccacgagcagtcgatggtgattaccgcccacggtttcgccatgccggtgaaagaggcctttgccccggtactcaagttgcgtaaatggcttaacccggtatcgctggttccgggctggcagaatgcggcggcaccggttctgttccgccgcctggcgctgattgagctggcggtgctggtggtgattgtggtttcacgaggagcctga

SEQ ID NO: 74437 - DNA, 924 bp, Citrobacter koseri
atgagtgtgttatatccgttaattcaggcgctggtgttattcgccgcagcgccgctgctgtccggtattacccgcgtggcgcgtgcccggttgcacaaccgtcgcgggccgggcgttttgcaggagtatcgtgacctgatcaagctgttggggcgccagagcgttgcgcctgccgattccggctgggtctttcgcctgacgccgtttgtgatggtcggcgtcatgctgactatcgcgaccgcgctgccggtggtgacggttggttcaccgttgccgcagttgggcgatctgatcaccctgatctacctctttgcgatcgcccgtttcttcttttctattgccggtctggataccgggagtccgtttaccgcgatcggcgcaagccgcgaagcgatgctcggcgtactggtggagccaatcctgctgctcggcctgtgggtggcggcgcaggtggccggttccacgcacatcagcaatatcaccgacacgatttaccactggccggcagcgcgcagcattccgctgatgctggcgctgtgcgcttgcgcgttcgccacctttatcgagatgggcaaactgccgttcgatctggcggaagcggagcaggagttgcaggaaggcccgctgaccgaatacagcggcagcggcttcgcggtgctgaagtggggcatcagcctgaaacaactggtggtgctgcaaatgtttgtcggcgtattcctgccgtggggacagatggagaccttcagcgcgggtgggctgctgctggcgctggtgattgccatcgtcaagctgatcgctggcgtactggtgattgccctgttcgaaaacagcatggcgcgcctgcgtttttgcgccacttcacgcgtgacctgggccggttttgggtttgcgtttttagcattcgtctccttgctggtggcgtga

SEQ ID NO: 74438 - DNA, 1710 bp, Citrobacter koseri
atgtctgaagaaaaattaggtcaacaataccttgcggcgctgcaccaggcttttccgggcgtggtgctggacgaagcctggcagaccaaagatcagctgaccctcaccgtgaaggtgaactacctgccggaagtggtggagtttctctactacaaacagggcggatggctctcggtactgtttggcaacgacgaacgccagctgtgcggccactatgccgtttactacgtgctgtcgatggagcaggggacgaagtgctggattaccgtgcgcgttgaagtcgatgccaacaaactggagtttccgtccgtgacgccgcgcgtgcctgctgcggtgtggggtgagcgcgaagtgcgcgacatgtacggtttaattccggtcggcctgcctgacgaacgccgcctggtgctgccggatgactggccggatgaactctatccgctgcgtaaagacagcatggattaccgtcaacgtccggcgccgaccaccgatgccgaaacctacgaatttatcaacgagctgggtgacaagaaaaacaacgtggtgccgatcggcccgctgcacgtcacctctgatgaaccgggccactttcgtctgtttgttgatggcgaaaacattatcgacgccgattaccgcctgttctacgtccatcgcggcatggagaaactggcggaaacccgcatgggctacaacgaagtcaccttcctgtcggaccgcgtgtgcggcatttgcggctttgctcacagcaccgcctataccacctccgtcgagaatgcgatgggcatcgtggtgccggaacgcgcgcagatgatccgtgccattctgctggaggtggagcgcctgcattcacacctgctgaacctcggcctggcctgccactttaccggttttgactccggctttatgcagttcttccgcgtgcgtgaaacgtcgatgaagatggcggagatccttaccggggcgcgtaaaacctacggtctgaacctgatcggcgggattcgtcgcgatctgctgaaagaggacatgatccagacccgtcaactggcgcagcagatgcgccgcgaggtgcaggaactggtggatatgctgctcagcacgccgaacatggagcagcgcaccgtcggcattgggcgcctcgacccggaaatcgcccgcgacttcagtaacgtggggccgatggtgcgcgccagcggccacgcccgcgatacccgcgccgatcacccgtttgtcggttacggcctgctgccgatggaagtgcatagcgagcagggctgtgacgtcatctcccgtctgaaagtgcgcatcaacgaagtgtacaccgcgctgaacatgatcgatttcggcctggacaacctgccgggcggcccgctgatggtggaaggctttacctatatcccacaccgttttgcgctgggctttgccgaagcgccgcgcggggatgacatccactggagcatgaccggcgacaaccagaagctgtatcgctggcgctgccgtgcggcgacctacgccaactggccgaccctgcgctatatgctgcgcggtaacacggtctccgacgcgccgctgatcatcggtagcctcgacccttgctactcctgtaccgaccgcatgaccgtggtggatgtgcgtaagaagaagagcaaagtcgtgccgtacaaagaacttgagcgctacagcattgagcgtaaaaactcgccgctgaaataa

SEQ ID NO: 74439 - DNA, 543 bp, Citrobacter koseri
atgtttacctttatcaaaaaagttatcaaaaccggcgcgccgacgtcgtcgtatccgctggagccgattgcggtcgataaaaacttccgtggcaaaccggagcataatccgcagcagtgtattggctgcgcagcctgcgtcaatgcctgcccgtcgaatgcgctgacggttgaaacctgccttgttaccggcgagctggcctggcagttcaacctcgggcgctgcatcttttgcgcccgctgcgaagaagtgtgcccgacagcggcgattaaactctcgcaggagtatgagctggcggtgtggaagaaagcggactttctgcaacagtcccgctttacgctgtgcaattgccgcgtgtgcaaccgtcctttcgcggtgcagaaagagattgattacgccatcgcgctgctgaaacacaatggcgacagccgcgcggagcatcaccgtgaaagctttgagacctgcccggactgcaagcgtcagaaatgcctggtgccgtccgaccgtattgaactgactcgccatatgaaagaggccagctga

SEQ ID NO: 74440 - DNA, 768 bp, Citrobacter koseri
atgagcaatttattaggcccacgcgacgccaacggcattccgctgccgatgacggtggatgaatccatcgccagcatgaaggcgtctttgctgaaaaacattaagcgttcggcgtatgtctaccgcgtggactgcggtggctgcaacggctgcgaaatcgaaatttttgccaccctttctccgctgtttgacgccgaacgttttggcatcaaagtcgtcccgtcgccgcgtcatgcggatattctgctgttcaccggggcggtgacgcgcgcaatgcgttctccggcgctgcgcgcctggcagtccgcgccggacccaaaaatctgtatctcttacggcgcctgcggcaacagcggcggtatcttccacgacctgtactgcgtctggggcggcaccgacaaaatcgtaccggtggatgtctacattccgggctgcccgccgacgcctgcggcaacgttgtacggtttcgcgatggcgctgggtttgctggaacagaaaattcacgcccgcgcgccgggtgaactggacgagcaggcggcagagattctgcatcccgatatggtgcagccgctgcgcgtgaaggtggatcgcgcggcgcgtcgtctggcgggttatcgctatggccgtcagatcgccgatgattacctgacccaactggggcagggtgaacatcaggtggcgcgctggctggaagcggaaaacgatccgcgtctgaccgagatcgtcacccacctgaatcatgtggttgaagaggcgcgtatccgatga

SEQ ID NO: 74441 - DNA, 411 bp, Citrobacter koseri
atgagtgaaacggtggtgttcagtcaactgagccgtaagtttattgatgagaacgatgcgacgcccgccgaggcgcagcaggttgtctattacagcctggcgattggccaccaccttggggtcatcgactgcctggaagcggcgttaacctgcccgtgggaggattatctggcgtggattgcgactctggaagagggaagcgaggccagacgtaaaatggaaggcgtgccgaagtacggcgagatcgtcatcgattttaaccatgtgcaaatgctggcgcgcgctttcgacagcgcgctcgctgcgcaaagcccgcaacagcaggcgtggagcaagctgatgctgagtatgctccacgatattcatcaggaaagcgccatctatctgatggtgaggagacaccgtgactga

SEQ ID NO: 74442 - DNA, 456 bp, Citrobacter koseri
gtgactgacgttttattgtgcgtcggcaacagtatgatgggcgatgacggcgccgggccactgctggccgagatgtgcgccacacagcctaaaggtaactgggttgttattgacggtggcagcgcgccggagaacgatattgtcgcgatccgcgaactgcgtccggatcgtctgctgattgtcgatgcgaccgacatggggctgaatccgggcgagatccgcatcatcgacccggatgacatcgccgaaatgtttatgatgaccacccacaatatgccgttgaattacctggtggatcagctgaaagaggacgttggcgacgtgattttcctcggcatccagccggatatcgttggcttttattatccgatgacgcaagcgattaaagacgcggtggaagtggtttattcaaggcttgcagagtgggttggcgacgggggattttctccgctctga

SEQ ID NO: 74443 - DNA, 1425 bp, Citrobacter koseri
atgtctgtatttccgcaaggatttttatggggcggcgcactggccgccaaccagtctgaaggggcataccgggaaggcggcaaagggctgagcaccgtcgatatgatcccgcacggcgagcaccggatgccggtcaaactggggctggagaaacgctttcaactgcgggatgacgaattttatcctagccatgacgcgattgatttttaccatcgctataaagacgatatcgccctgatggcggagatgggctttacagtgtttcgcacctcgatcgcctggagccgtctctaccctgacggcgatgagctgacgccgaacgaagaaggcatcgcgttttatcgcgcggtgtttgaagagtgtaaaaagtacggtattgagccgctggtcacgctgtgccacttcgatgtgccgatgcacctggtgacggagtacggctcctggcgcaatcgcaaaatggtggaattctttacccgctacgcgcgaacctgctttgaagcctttgacggtctggtgaaatactggctgacgttcaacgaaatcaacatcatgctgcacagcccattctccggcgcgggcctggtgtttgaggaaggtgaaaatcaggatcaggtgaagtatcaggccgcgcatcacgagctgattgccagcgcgctggcgacccaaatcgcccatgaggtcaacccgcaaaaccaggtcggctgtatgctggcgggcggcaatttttatccgtactcctgtaaaccgcaggacgtctggaccgcgctggagaaagaccgcgaaaacctgttctttatcgatgtgcaggcgcgcggcgcttacccggcctattccgcccgcgtctttcgcgagaaaggcgtggtgattgaaaaagccccggaagacgacgctatcctgaagaacaccgtcgatttcgtctcgtttagctactacgcgtcacgctgcgcttcagcggagatgaacgctaataacaccaacgccgccaacgtggtgaaatcgctgcgcaatccgcaccttgacgtcagcgaatggggctgggggattgacccgcttggtctgcgcatcaccatgaatatgatgtatgaccgctaccagaagccgctgtttctggtggaaaacggcctcggcgcgaaagatgagccggacgcgaaaggtgagatccatgatgattaccgcatccgctatctgcgtgagcatattcgggcgatggccgacgccattgaagacggcgtgccgctgatgggctacaccacctggggctgcatcgatctggtgtccgcctcgacaggcgaaatgagcaaacgctacgggtttgtgtatgtcgaccgtgacgacgctggcaacggcacgctggcgcgtacccgcaaaaaatcattctggtggtacaagaaagtgattgcgagtaacggggaagatctggcgtag

SEQ ID NO: 74444 - DNA, 1455 bp, Citrobacter koseri
atgtctaagaattatgcggcactggcgcgctccgtggtgacggcgctgggcggtgtggataacatcaccgccgtgacacactgcatgacgcgtctacgtttcgttctcaaagatgacgcgcaggtcgacagcgcgacgttgaaaaccctcagcggcgttctcggcgtggttcgcagcgacaaccagtgtcaggtaattatcggcaacaccgtttcacaggcgtatcgcgaagtcgtcagtctgctgccgaccgatatgcagcccgcagcgcccgtcggcaaacctaaactcacctttaaacgcatcggcgcggggatccttgacgcgctgatcggcactatgtccccgctgatcccggcgattatcggcggatcgatgctgaaactgctggccatgatcctcgaaatgacgggactgctggaaaaaggcgcctccacgctgaccatcctgacggtgattggcgacggcgcgttcttcttcctgccgctgatggtggcggcgtcagcggcaatcaagttcaaaacaaacatgtcgctggcgattgccatcgcaggcgtgctggttcacccgagttttatcgacctgatggcgaaagccgccgaaggtgaacacgttgaatttgccctgatcccggtgacggcggtgaaatacacctacacggtgatcccggcgctggtgatgacatggtgtctttcatacatcgaacgctgggtggatcgcattaccccggccgtcacgaaaaacttcctgaaaccaatgctgatcgtcctgatcgccgccccgctcgccattgttttaatcggcccaatcgggatctggatcggtagcgccatctccgcgctggtttacaccattcacggctatctgggctggctttccgtcgccatcatgggcgcgctgtggccgctgctggtcatgaccgggatgcaccgcgtctttaccccaaccatcatccagaccattgctgaaaccggcaaagaaggcatggtcatgccgtctgaaattggcgctaacctgtcgctgggcggttcctctctggccgtcgcatggaaaaccaaaaacccggaactgcgccagacggcgcttgccgccgccgcttccgcaattatggcggggatctccgaaccggcgctgtacggcgtggcggtacgtctgaagcgtccgctgattgcgagcctgattagcggctttatctgcggcgcggtggcaggtatggcggggcttgccagccactcgatggcggcgccgggcctgttcaccagcgtccagttcttcgacccggcaaacccgatgaccatcgcctgggtgtttggcgtgatggcgctggccgtggtgctctcttttgttctgacgctgctcctcggctttgaagatatccccgtggaagacgcagccgcgcaggcaagaaaaaaccaggccgcgcaaccgactactgcaaaagaagccagcatctga

SEQ ID NO: 74445 - DNA, 1023 bp, Citrobacter koseri
atgagtaatatgacgacgatgctggaggtggctaagcgcgccggggtgtcgaaagcgacggtttcccgggtgctttcaggtaacggctacgtcagccaggagaccaaagaccgcgtgtttcaggccattgaagagagcggctatcgacccaatttgttagcgcgcagtctggcggcgaagaaaacgcagaccctcggtctggtggtgacgaacaccctttaccacggcgtttattttagcgagctgctgtttcatacggcgcgaatggcagaggataaggggcgtcagcttctgctcgcggacggcaaacacagcgcggaagaagagcgtcaggcgattcagtatctgctcgatctgcgctgcgacgccattatgatttatccccgttttctcagcgtggatgagattgacgacattatcgactcacacgcccagcccattatggtgcttaaccgtcggctgcgaagaaacagcagccactgcgtttattgcgaccagaagcagaccagttttaacgcggtggaacagttgatcgccggggggcatcgcgagattgcgtttatcaccggttcgatggattcccctaccggcgtggagcgtctctcagggtataaagacgcattgacgcgacacggcatcgctatcaataacgaattgattgtcaacggaaagtggacgcccgccagcggtgctgaaggggtggatacgcttctggcgcgcaaggtgagttttaccgcgctggtagccagtaatgacgatatggcgattggcgccatcaaacagttacacgagcgtggcatgagcgtgcctgcgcagacctcggtcatcggattcgacgacatcgcgatggcgccctataccatcccggcgctttccagcgttaaaattccggtcacggagatgattcaggagacgattggacgtcttatcttcatgctggacggcggtgaatttacgccgccaaaaacctttaccggtgcgctgatcctgcgcgattcggcagcgccgctgcctgtccgctga

SEQ ID NO: 74446 - DNA, 546 bp, Citrobacter koseri
atgaaccgtttcatcattgccgacgccaataaatgcattggttgccgtacctgtgaagtggcctgtgtggtgtctcatcaggaaaaccaggactgcgcgtcgctgacccctgaaactttcttaccccgcatccatgtgatcaaaggtgtaaatgtctccacggcgacgctgtgccgccagtgtgaagacgcgccgtgcgccaacgtctgcccgaacggcgccatcagccgtgataaaggtttcgtacatgtgatgcaggagcgttgcattggctgtaaaacctgcgtggtcgcttgcccatacggcgcgatggaagtggttgtgcgtccggtgattcgcaacagcggcgcgggcctgaatgtccgggcggaaaaagcggaggccaacaaatgcgacctttgccaccaccgcgaggccggccctgcctgtatggaggcctgtccgacccacgcgctgatttgcgtcgatcgcaacaaacttgaacaactgagcgcggaaaaacgtcgccgtgcggcgctggactcctccgcgtctttgcttttctga

SEQ ID NO: 74447 - DNA, 2241 bp, Citrobacter koseri
atgacaataaacaaccactccggcgtacagttgcgtattcgtggcaaggtgcagggcgttggttttcggccttttgtctggcaactggcgcagcggttacaactgcatggcgacgtgtgtaacgacggtgacggtgtggttgtgtgcttacaggaagatccggcggagtttattgtgcagttacatcaacattgcccgccgctggcccgtattgacagcgtcgagagcgagccgtttgcctggtctcaactgcctgccgatttctccatccgccagagcgcgggcggaatgatgaatacgcaaattgtgcccgacgcggccacatgcccggcctgtctcgccgaaatgaatacgcccggcgagcggcgctaccgttacccttttatcaactgcacccactgcggcccgcgttttacgatcattcgtgcgatgccttacgaccgtccgtttaccgtgatggcatcgtttccgttgtgcaggaagtgtgcgacggaataccgcgatccgtacgaccgccgtttccacgcccagcctgttgcctgcccggcctgcggcccgcatctggcgtggcgctctggcagcgctcgggcggaaaaagacgccgcgctacaggctgccgtcgcgatgttaaaagcggggggcattgtcgccatcaaaggcattggcggctttcatctggcctgcgatgcgcaaaacgatgaggcagtggcgatgctgcgggcgcgtaaacgccgccccgcgaaaccgctggcggtaatgttgccggatgcggaaggcttgccggatgcggcgcgccgactgctgactacgccggccgcccccatcgtgctggtggataaacagcatgtcgcgtcgctgtgcgaggggatcgcgccggggctggcggaagtaggggtaatgctgcccgcgaatccgctccagcatctgcttttacaggcgctgaattgtccgctggtgatgacctccggcaaccttagcggtaaaccgccagccatcactaaccaacaggcgctggacgacctgaaggcgatcgccgacggttttctgttgcacaaccgcgatatcgtgcagcgaatggatgactcggtagtgcgtgacagcggcgaaatgctacgccgttcgcggggctatgtgccggatgcgatcgcgctgccgccgggatttcgcgatgtgccgccgatgctttgtctgggcgccgatctgaaaaataccttctgcctggtgcgcggcgagcaggcggtggtaagccagcatctgggggatctcagcgatgacggtattcaaacgcagtggcgtgacgcgctgcgtttgattcagaacatttacgattttacgccgcaacgcgttgtctgcgacgcgcatccgggctacgtttccagtcagtgggccagcgagatgacgcttccgaccgaaacggtattgcaccaccatgcgcatgcggcggcatgcatggtcgagcacggctggccgttgaacggcggcgatgtgattgccctgacgctcgacggcatcggtatgggagagggcggcgcgctgtggggcggagagtgtttacgcgttaattaccgtgaatgcgagcatcttggcggcctgcccgccgtcgcgctggcgggcggcgatctcgccgcgaagcagccctggcgcaacctgctggcgcagtgtctgcgcttcgttcctgactggcgggactatccagaaacggctgcgctgcaacgacagcagtggaacgtgctggcgcgggccattgagcgcggaatcaacgccccgctggcgtcgtcgtgcggacgcctgttcgatgccgtcgccgccgcatcaggctgcgcgcctgacacgctcagttatgaaggggaagcggcctgtgcgctggaggcgctggcttcgcgatgcaatcgcgttgaacatccggtgacgatgccggttaaaaacaaccagctggatttagccacgttctggcggcagtggttgaactggcaggctgctcccgaggagcgcgcctgggcctttcacgacgcgctggcacatgggttcgccgcgctgctgcgtcaggaagcgaccgcacgcgggatcaccacgctggtattcggcggcggcgtgctgcataaccgcttgctgtgcaggcgtctggcgttctgtcttgctgattttaccttactgttcccgcagcgtttaccggccggggatgggggagtgtcgttagggcagggagcgattgccgcagcgcgcgagctggcgcagaaataa

SEQ ID NO: 74448 - DNA, 1134 bp, Citrobacter koseri
atgagccggggaattgtcattattggttcgggcttcgccgcccgccagttagtcaaaaacatccgtaaacaggacgcgaccgtagcgctgaccctgattgccgctgacagtatggacgagtacaacaaacccgacctcagtcacgtcatcagccaggcgcagcgcgccgacgacctcacccgccagtcggcgggggagtttgccgaacagtttaatctgcgtctgttcccacacacctggattacggacattgatgccgacgcccatgtggtaaaaagccaggacaagcaatggcagttcgacaaactggtactggcgacaggggcatcagcctttgttccgccggttgccggacgtgagttaatgctcacactgaacagccaacaggagtatcgcgcctgtgaaacgcaactgcgtgacgcacagcgcgtactgatcgtcggcggcggtctgattggtagcgagctggcaatggatttctgccgtgcgggtaaagccgtcacgctgattgacaatgccgccagcattctggcctcgctgatgccgccggaagtgagcagccgcttgcagcatcgtctgaccgatatgggcgtacatctgctgctgaaatcgcagttgcagggtctggagaaaaccgctaccggtattcgcgccacgctggatcgcgatcgtcaggtagaggtggatgcggtcatcgccgcgaccggcctgcgcccggaaaccgcgctggcgcgccgtgccgggttgaccatcaaccgtggcgtctgcgttgacagctatctgcaaaccagccacccggatatttatgcgctgggagactgcgcggaaattaacggccaggttctgcctttcctgcaaccgattcagttaagcgccatgtatctggcgaaaaatctgctcggcgggaacgcgccgctgaagctgcccgccatgctggtgaaaatcaaaacgccggaattgccgttacatcttgcaggcgaaacccagcgttgcgacctgaactggcacattgcggcggagtccgaagggatggtcgcccgaggcatgaataccgaaggtcagctttgcgcctttgtggtgagcgaagaccgcatgaaggaggcctttgcgctgctgaaaacgctgcccgcgtaa

SEQ ID NO: 74449 - DNA, 1449 bp, Citrobacter koseri
atgtctattctggttaaaaataacattcattgggttggccaacgtgactgggaagttcgtgattttcacgggaccgaatataaaacgctgcgcggcagcagctacaacagctatctcatccgtgaagaaaaaaatgttctgatcgataccgtagatcataaattcagccgcgaattcgtgcaaaacctgcgtagcgaaatcgacctggccgacattgattacatcattattaaccacgcggaagaagaccacgcgggcgcgctgaccgaactgatggcgcaaatcccggatacaccgatctactgcaccgcaaacgccattgactccattaccggtcaccaccatcacccggaatggaactttaacgtcgtaaaaacaggcgacacgctggatatcggcaacggcaagcagctgatttttgttgaaaccccgatgctgcactggccggacagcatgatgacctacatgacgggcgacgcggtactgttcagtaacgacgcctttggtcagcactattgtgacgaacgtctgttcaacgatgaagtcgatcagaccgagctgttcgagcagtgccagcgttactacgccaacatcctgacgccgttcagccgtctggtcacgccaaaaatcaccgaaatcctcggcttcaacctgccggtagatatgattgccacctctcacggcgtggtatggcgcgacaacccaacccagatcgttgaactgtatctgaaatgggcggcagattatcaggaagatcgcatcaccattttctacgacaccatgtccaacaacacccgcatgatggccgacgcgattgcgcaaggcatcaacgaagttgacccgaacgtggcggtgaaaatctttaacgtcgcacgcagcgataaaaacgaaattctgaccaacgtgttccgctccaaaggcgtgctggtcggtacttctacgatgaacaacgtgatgatgccgaaaatcgccggtctcgttgaagagatgactggcctgcgctttcgtaacaaacgcgccagcgccttcggttcccacggctggagcggcggcgcggtagaccgtctgtccacccgtctgcaagatgccggcttcgagatgtcactgagtctgaaagcgaaatggcgtcctgatattgatgctctggaactttgccgccagcacggccgcgatattgcccgtcagtgggcgctcgctccgctgccggaaacaaatgtgaaagcgacaacccaggaagaagagtgcgcctgtgccgccgccgctgcggctgacctcggcccaagcatgcagtgcagcgtgtgccagtggatttacgaccctgcaaaaggtgaaccgttgcaggatgtcgcgccgggtacgccgtggagcgacgtaccggataacttcctgtgcccggaatgttcattaggtaaagacgtctttgatgtgttggcaacggaggcaaaatga

SEQ ID NO: 74450 - DNA, 1521 bp, Citrobacter koseri
atgagcttttcagttgatgtcctggcgggcatcgccattgaattacaaagtggtatcgggcatcaggaccgctttcagcgcctgatcaccacgctgcgtcaggtgctggagtgcgatgcgtcggcgctgctgcgctatgaggggcggcagtttattccgctggcgatcgacggcctggcgcaggatgtactgggcaggcgcttcactctggaagggcatccgcgactggaagccattgcccgtgccggggatgtggtgcgttttccggccgacagcgacctgccggacccgtatgacggactgatcccggatcaggagagcctgaaggtacacgcctgtatcgggctgccgctgttcgccgggcaaaccctgattggcgcactcacgcttgacggcatggaacccgatcagtttgatgttttcagcgatgaagagctgcggctcatcgcagcgctggcggcgggggcgctgagcaatgcgctgcttattgagcaattagaaagccagaatatgttgccggggtcttccgcctctttcgaacaggtgaaagaaacgcagatgatcggcctgtcgccaaatatgatgcagttgaaaaaagagattgagattgtggcggggtcggatctcaacgtgctgatcagcggcgaaacgggaaccgggaaagagctggtggcgaaagcgattcacgaaggctcgccacgggcggtgaacccgctggtgtatctgaactgcgccgcgctgccggaaagcgtggcggagagcgagcttttcggccacgttaaaggggcttttaccggggcaatcagcaaccgtagcggtaagttcgaaatggccgataacggcacgctgtttcttgatgagatcggcgagctgtcgctggcgttgcaggcgaaactgctgcgcgttttgcagtatggcgatattcaacgcgtcggggacgatcgcagcctgcgcgttgacgtgcgcgtgctggcggcgactaaccgcgacttacgcgaagaggtgctggccgggcgttttcgcgccgacctgtttcaccgtttgagcgtgttcccgctctccgtgccgccgctgcgtgagcgtggtgaggatgtggtcttgctggccgggtatttttgcgaacagtgccgcctgcggctggggctttcccgcgtggtgctgagcccaggggcgcgtagccatctgctgagctatggctggccggggaacgttcgcgagctggaacatgcgatccaccgtgcggtggttctggcaagagcgacccgggcgggggatgaggtggtgctggaagcgcagcattttgccttacaggaggaggtttctcccgctctgcctgacgacagtacgccgacgctaccggcaaatcacaatctgcgcgacgctaccgaggctttccagcgggagatgattcgccgtgcgctggcgcaaaataaccacaactgggccgcctgcgcgcgggcgctggagacagacgtcgccaacctgcatcggctggcgaagcgtctggggctgaaaagttag

SEQ ID NO: 74451 - DNA, 966 bp, Citrobacter koseri
atgagtgatgcattactgaacgcgggtcgccagacattactgctggagttacaggaagcaagccgtctgccggaacgcctgggcgatgattttgtccgtgccgccaatactatcctccactgcgaaggcaaagtgattgtctccggtattggcaagtcaggccatatcggcaaaaaaatcgccgcgactctcgccagtacaggaacgcccgcgttctttgtccacccggcagaagcgttacatggcgatctcggcatgatcgaaagccgggacgtgatgctgttcatctcctattccggcggagcgaaagagctggatctcattattcctcgcctggaagataaatcgataaccctgctggcgatgaccggaaagccaacctccccgctgggtctggcggcaaaggcagtgctggatatctccgttgagcgtgaagcctgcccgatgcacctggcgccgacctccagcaccgtcaacaccctgatgatgggcgacgcgctggctatggcggtgatgcaggcgcgcggtttcaatgaagaggatttcgcccgttcacaccctgccggggcgctgggcgcgcgtctgctcaacaaagtccatcacctgatgcgccgtgacgatgcggtgccgcaggttcagctcaccaccagcgtgatggacgccatgctggagctgagccgtaccgggttaggtctggttgcggtatgcgacgcgcagcgcgttgtaaaaggcgtctttaccgacggcgacctgcgccgctggctggttggcggcggcacgctggctacgccggtcagcgaagcgatgacccacaacggcattacgttgcaggaacagagccgcgccatcgatgccaaagaacttctgatgaagcgcaagatcaccgccgcgccggtggtggatgaaaacggtaaactcaccggcgcaatcaacctgcaagacttctaccaggcaggcatcatctaa

SEQ ID NO: 74452 - DNA, 774 bp, Citrobacter koseri
atgaaaccacgtcagcgtcaggctgctattctggagcatctgcaaaagcagggaaaatgctcggttgaggagttggcccagtactttgacaccacgggcaccaccattcgcaaagacctggtcattctggaaaatgccggaaccgttattcgcacgtatggcggcgtggtgttgaataaagatgaatccgacccgcctatcgatcacaaaacgttgatcaacacccataaaaaggcgttgatcgcacaagcggccgtccagtttatccacgatggcgactccatcatccttgatgccggaagcaccgtgttgcagatggtgccgatgcttacccgctttagcaatatcaccgtcatgaccaacagcctgcacattgttaacgccctttcggagctggacaacgagcagaccatcctgatgcccggcggcacattccgcaaaaaatctgcgtcatttcacggtcagctggcagaaaacgcctttgagcagttcagttttgataaactgttcatgggcaccgacggcatcgatctcaatgccggagtgaccacctttaatgaggtctataccgtcagcaaagcgatgtgcaatgccgcacgcgaagtgattctgatggcggactcctcaaaatttgggcgtaaaagccccaacgttgtgtgcagtctggaaagcgtcgacaaactggttaccgacgcgggtatcgaccccgcgtttcgtcaggcgctggaagcaaaagggattgaagtgatcataaccggagaaaccaatgagtga

SEQ ID NO: 74453 - DNA, 360 bp, Citrobacter koseri
atggtttccgcactgatcaccgtcgccgttatcgcctggtgtgcgcaactggcgctgggcggctggcaaatctcccgctttaaccgggcgtttgacaaactttgccaacgagggcgagtgggcgtcgggcgctccggcggacgctttaaaccgcgagtggtggtcgccatcgctctggatgaccagcagcgcgttacggataccttattcatgaaaggtctcaccgtctttgcccgaccggttaaaattcccgcaatacagggcaaacatcttgatgaattacagcctgatgtgatctttccccatgattcgctctcacagaatgcactatcattagcgcttaaactgaaacatgggtaa

SEQ ID NO: 74454 - DNA, 780 bp, Citrobacter koseri
atgaatcaggttgccgttgtcattggtggaggccagaccctgggggccttcctctgccgtgggcttgcagaggttggttatcgcgtcgccgttgtcgatattcagagtgataaagccgcaaatgtggcgcaggagattaacgccgcgtttggcgaaggcatggcgtacggttttggcgccgatgccaccagcgagcagagcgttctggcgctctctcgcggagtcgatgaaatttttggtcgggttgatctgctggtctacagcgcgggcatcgccaaagcggcgtttatcagcgattttcaactcggcgatttcgaccgctcgctacaggtgaatctggtggggtatttcctctgcgctcgcgaattctcccgcctgatgatccgcgacggcattcagggacgcattatccagatcaactccaagtccgggaaagtgggcagtaaacacaactccggctatagcgcggcgaagttcggcggcgtgggcttaacccagtcgctggcgctggatctggcagaatacggcattaccgtgcattcgctgatgcttggcaacctgctgaaatcaccgatgttccagtcgctgctgccgcaatacgccgccaagcttggcatcaagccggacgaagtggagcagtattacattgacaaagttccgttaaaacgcggctgtgattatcaggacgtactggacatgctgctgttttacgccagcgcgaaggcgtcgtactgcaccggacagtccatcaatgtaaccggcggtcaggtgatgttttaa

SEQ ID NO: 74455 - DNA, 363 bp, Citrobacter koseri
atgaccgtgatttaccagaccaccatcacccgtatcggcgagagcgcaccggacgcgctctgcgacaggatgctgattacctttcgtgaaggcgcgccggcggatatcgaagcgttttgctttatccactgccacggcgagctgaacggcacgctgcaacccggcgcacagtttcagctgggtgagcatcgctatccggtgactgctgtgggcagcgtggccgagcagaatctgcgtgaactggggcatatcaccctgcgcttcgacgggctgaacgaggcggaatttcccggcaccgtacacgttgcggggccagtaccggacgacatcgcgccgggctgtattttgaagtttgtggcttaa

SEQ ID NO: 74456 - DNA, 972 bp, Citrobacter koseri
atgacgcgtattcgtattgagaaaggcaccggcggctggggcggcccgcttgaactggatgcaacccccggaaagaaaatcgtctacatcactgccgggacgcgtccggggattgtcgacaaactggcgcaactgacaggctggcaggcggtggatggctttaaagagggcgaaccgcctgaggaagagatcggcgcggcgatcatcgactgcggcggcacgctgcgctgcgggatttacccgaagcggcgcattccaaccatcaacatccactctaccgggaagtcggggccgctggcgcaatacatcgtggaagatatttacgtctccggggtaaaagaagagaacatcacgctgagcggcgaggcgcctgcaaacgcgcagcctgtcgcctcacctgcgggccgcgattacgacgccagcaaaaagatcaccgaacagagcgatggcctgctggcgaaagtcggtatggggatgggctcagcggtagcggtgctgttccagtccgggcgcgacaccatcgatacggtgctgaaaaccattctgccgtttatggcgttcgtctcggcgctgatcggcatcattatggcctccggtctcggcgactggatcgctcacggcctggcgccgcttgccagccatccgctggggctggtcacgctggcgctcatctgttcattcccgctgctgtcgcccttcctcggccctggcgcggtgatcgcccaggttatcggggtgctgattggcgtgcagattggtctgggtaatatccctccccatctggcgctgcccgcgctgttcgcgattaacgctcaggccgcgtgcgactttattccggtcggtttatcgctggcggaggcccgtcaggacaccgttcgcgtcggcgtgccttccgtactggtgagccgcttcctgaccggcgcgcctaccgttctcatcgcctggtttgtttccggctttatttatcaataa

SEQ ID NO: 74457 - DNA, 564 bp, Citrobacter koseri
atgatcgaaaccattacacatggtgcggagtggtttatcgggctgttccagaaaggcggagaggtgttcaccagtatggtgaccggcatccttccgcttttgataagcctgctggtcatcatgaatgccttaataaacttcattggccagcagcgtattgaacgttttgcccagcgctgcgccgggaacccgttatcccgttacctgctgttgccgtgcatcggtacgtttgtgttttgtaacccgatgacgctgagtctgggccgctttatgccagaaaaatacaagcccagttactacgcggcggcttcctacagctgccactcgatgaacggactgttcccgcacatcaaccccggcgaactgtttgtttacctgggcatcgccagcggcctgacgacactcggcctcccgcttggcccgctcgccgtcagctatctgctggtcggtctggtcaccaacttcttccgtggctgggtgactgacctcaccacatccatctttgagaaaaaaatgggcattcaacttgagcagaaagtccacctggctggagcaacatcatga

SEQ ID NO: 74458 - DNA, 1101 bp, Citrobacter koseri
atgttcaagcgtcgttatgtagcactacttcctctctttgcgttgcttgctgcctgtagcagcaaaccacagtcttcagaaattcaaacgacaacgggagcgccgtccggcggtttcctgcttgagccgcagcacaatgtcatggtgatgggcggtgatttcgccaataatccgaacgcgcagcagttcattgagaagatggtgaacaagcacggttttaatcgccagcagttgcaggagatcctgtcgcaggcgaagcgcctggactacgttctgcgactgatggacagacaggcgccgaccacgcaaccgccagcggggccgaatggcgcatggttgcgctatcgcaagcagtttattaccccggacaatgtgcaaaacggcgtggcgttctggaaccaatatgaggatgcgttgaaccgtgcatggcaggtttatggcgtcccgccggagattatcgtcggcattattggcgtggaaacccgctggggccgcatcatgggtaaaacgcgaattctggatgcgctggcgacgctgtcgtttaactatccgcgtcgggcggagtatttctccggcgagctggaaacgttcctgctgatggcgcgtgatgaacaggacgacccgctggatctgaaagggtcttttgccggtgcgatggggtacggacagtttatgccgtcgtcctataagcagtacgcggtggactttaacggcgacgggcacatcaacctgtgggacccggttgacgccatcggcagcgtggcgaactatttcaaagcccacggttgggtgaaaggcgatgtggtcgccgttccggccaacggtcaggcgtcggggctggcgaacggctttaaaactcagtacagcatttctcagcttgcggccgccgggctgacgccgcagcagtcgctgggcaatcatcagcaggccagcctgctgcgtctggatgtgggtacgggctatcagtactggtacgggttgccgaacttctatgtcatcacgcgctataaccacagcactcactatgcgatggcggtctggcagcttggtcaggccgtcgcgctggcgcgtgtacctgcggcgtcgccgtttagtcagtag

SEQ ID NO: 74459 - DNA, 654 bp, Citrobacter koseri
atgattatcctgaatcaactggtggctggttacgagcgacagccggtcacgtcgccgctgaccggcacgctggaacgcggcagcatgacggcgattatcggcgctaacggctgcggcaaatcaacgctgctgaaaacgctggccggttttcttcctccggtgagcggcgcatttcgctggcgcggacgccgcccggtaattggctggctggcgcaacgtcacgcgctggagacacagtttccgcttaccgttcaggacgtggtgagcatggggtgctggcctgatatttccctgctggggggatttcaacgcaaaacccgtctgcgtattgcccacgctattgagcgcgtggggctggaggcaatggcgacgatgaccattgatgaactctctggcggccagtttcaacgcatgctgtttgcccgtgtgctggtgcaggaagcgccgctggtcatgctggatgaaccctttaccggcgtggatgaggagacctgcaacgtactgatggggctgatgctggagatgtatcagcgagggcaaacggtgctggcggtgctgcacgacagcgaacgggtggcgcgctattttccgcagacgttacggctggatacggacgtgtctcactggatgaccgagcgggtgagagtggcatga

SEQ ID NO: 74460 - DNA, 861 bp, Citrobacter koseri
atgatctggcatatcttctttcagccgtttattgaatacggctttatgcggcgggcgctggtggtctgtctggcgctttcggtcagcacgacggcgcttggcgtctttttactgctgcgacgtatgagcctgatgggagacgcgctgtcgcatgcggtgttgcccggcgtggcggtgggctatctgctcagtggaatgtcattgctggcaatgagcatcggcgggtttatcgccgggattacggtagcgctggtggcgggaatggtgagtcgccgtacgccgctaaaagaagacgccagcttcgccgggttctacctgggatcgctggcgctgggggttacgctggtgtcgctgcgcgggtcaaatgtcgatctgctgcatcttctgtttggttccattctggcggtcgatcgcgattccgcgctgttcgtggcgggggtatgcgcattcacattgatcatgctggcgattttctatcgtggtctggtgagtgaagcgtttgataccgcatggttgcaggttaacgcgcgctggctgccttcgctgctgcacgggctgtttctctcgttgctggtgttgaatctggtggctggctttcaggtactcggcacgctgatggcggtagggctgatgatgcttcctgccgttgcggcccgctgctgggcgcgcacgttaccggggctgttattgctcgccggcggcagcggcgtcgtctgtgcatggctggggctaagcctttcctgggcggtgagtttacccgccgggccgtcgattgtactgaccgccagcgcgctgttctttatttccattttattcggcacgcgcagcaggctggctgacagtctgcgcgcgcttttttaa

SEQ ID NO: 74461 - DNA, 879 bp, Citrobacter koseri
atgaaacgtacaggggtaatgattgcgctcgcgttggggttgatgacgcaaggcgcgctggcgaaaacgctgaatgtggtgacgagtttttctattctcggcgacatcacccaggaggtcggcggcaagaatgtcaacgtcactacgctggttgggccggatggcgatccgcataccttcgagccttcgccgaaagacagcgcggcgttgagcaaagcggatgtggtggtagtgaacgggctggggctggaggggtggcttgaccggctggtaaaagcctccggcttcaaaggtacgctggtggtggcttccgacggggtgaagacgcatacgctggatgaagacggcgaaaccgtcaccgatccgcatgcctggaatagcgcagcgaacggcgcgctgtatgcgcagaatattctttccgggctggtcaacgccgacccgcaggataaagccgtgctggaggcttccggcaaaccttatatcgcacagttgactgaactggacgcgtgggcgaaagcgcgctttagccagatcccgcaggagaaacgcaaggtgctgaccagccacgacgccttcggttatttcggtcgcgcctacggcgttgagtttttggcgccgcaggggctgtcgtcggaaagtgaagcctctgccgcgcaggtcgccgcgctcattaagcagattaaagcggatggggtgaacacctggtttatggagaatcagctcgatccgcgtctggtaaaacagatcgccagcgcgacgggcgcgcagccgggcggcgagctgtatcctgaagccttgtcggcaaaaggcggcgtggcggatagctacgtaaaagcatttcgccacaatgttgagaccatcgccaacagcatgaagtaa

SEQ ID NO: 74462 - DNA, 501 bp, Citrobacter koseri
atgatgactgaccatgaattgatgcagttaagcgaagtggtagggctggcgctgaaacagcgcggcgcaacgctgacgacagcggagtcctgcacgggcggttgggtagcgaaagtgattaccgatatcgccgggagttccgcctggtttgaacgcggttttgttacctacagtaatgaagcgaaagcgcaaatgattggcgtgcgcgaaccgacgcttgagcagcacggcgcggtcagcgaaccggtggtgattgagatggcgattggcgcgctcagagcggcccgcgcggattatgccgtttctatcagcggcattgccgggccggacggcggcagcgacgtgaagcccgtcggcactgtctggtttggtttcgcaaccgcgcagggcgaggggatcacccgccgggagtgctttagcggcgaccgtgacagcgtacgtcgccaggcgacggaatatgcgctcaaaacgctctggcaacaatttctacaaaacacttga

SEQ ID NO: 74463 - DNA, 1065 bp, Citrobacter koseri
atggctatcgacgaaaacaaacagaaagcgttggcggcagcgctgggccagatcgaaaaacaattcggtaaaggctccatcatgcgcctgggtgaagaccgttccatggatgtggaaaccatctccaccggttcgctttctctggatatcgcgctgggcgcgggtggcctgccgatggggcgtatcgtagaaatctacgggccggaatcctccggtaaaaccaccctgacgcttcaggtgattgccgctgcacagcgtgaaggcaaaacctgtgcgtttatcgacgccgaacatgcgctggaccctatctatgcccgcaaactgggcgtcgatatcgacaacctgctgtgctcccagccggacaccggcgagcaggcgctggaaatctgtgatgcgctggcgcgttcaggcgctgtagacgttatcgttgttgactccgtggcggcgttgacgccgaaagcggaaatcgaaggtgaaatcggcgactctcatatgggcctcgcggcgcgtatgatgagccaggcgatgcgtaagctggccggtaacctgaaacagtccaacaccctgctgatcttcatcaaccagatccgtatgaaaattggcgtcatgttcggcaacccggaaaccactaccggggggaacgcgctgaaattctacgcgtccgttcgtctggatatccgccgtatcggcgcagtgaaagagggcgaaaacgtcgtgggtagcgaaacccgcgtgaaggttgtgaagaacaaaatcgccgcgccgtttaaacaggctgagttccagatcctctacggcgaaggcatcaacttctatggcgaactggttgacctgggcgtgaaagagaagctgatcgagaaagccggtgcatggtacagctataacggcgagaaaatcggtcagggtaaagcgaatgccactacctggctgaaagagaacccggcgaccgccaaagagatcgagaaaaaagtgcgtgagctgctgctgagcaatcaggactcgacgccagacttctccgttgatgacaacggtgaaggtgtgaaagaaaccaacgaagatttctaa

SEQ ID NO: 74464 - DNA, 501 bp, Citrobacter koseri
atgagtgaatccacaccgcgacgccccgcatataaccgtctgctggatcgcgcggtacgtattctggcggtacgcgatcacagtgaacaggaactgcggcgtaaactctctgcaccggttatgggaaaaaacgggccggaagagatcgatgcggcaccggaagactatgaacgggttatcgcctggtgccatgagcacaactaccttgatgatcatcgttttgtttcgcgctttatcgccagccgcagccgtaaaggttatggtccggcacgtattcggcaggagctgaatcaaaaaggcattgcgcgtgaggcgattgagcgcgcaatgcgtgaatgcgagattgagtggttgcgtcttgcacgcgaacaggcgatccgcaaatatggcgaacccttaccagccgcattttcggaaaaggtcaaagtccagcgtttcctgctttatcgtggctatctgatggaggatattcaggagatatggcgaaattttgacgattga

SEQ ID NO: 74465 - DNA, 2628 bp, Citrobacter koseri
atgagcaagagcaccgctgagatccgtcaggcgtttctcgattttttccacagtaagggacatcaggtagttgccagcagctccctggtgccaaacaatgacccaactttgttgtttaccaacgccgggatgaaccagttcaaggatgttttccttgggctcgacaagcgtaattattcccgcgccaccacttcgcagcgttgcgtacgtgcgggtggtaaacacaacgatctggaaaacgtcggttacactgcacgtcaccacaccttcttcgaaatgctgggtaacttcagcttcggcgactatttcaaacacgacgcgattcagtttgcgtgggaactgctgaccggtgaaaactggtttgccctgccaaaagagcgtctgtgggtgaccgtctatgaaactgacgatgaagcctacgagatctgggaaaaagaagtcggcattccgcgcgaacgtatcatccgaattggtgataacaaaggcgcggcgtacgcgtccgacaacttctggcagatgggcgatacagggccatgcggtccatgtaccgagatcttttacgaccacggcgatcacatctggggcggccctccgggaagcccggaagaagatggcgatcgctatattgagatctggaacatcgtcttcatgcagttcaaccgtcaggctgacggcacgatggaaccgctgccgaagccgtccgtcgataccggtatgggtctggagcgtatcgccgctgtgttgcaacacgttaactccaactatgaaattgacctgttccgcacgttgattgaagccgttgcgaaggtgactggcgcgaccgatctgagcaacaagtcgctgcgcgtgattgccgaccacatccgttcctgcgctttcctgatcgccgacggcgtggttccgtcgaatgaaaaccgtggctatgtgctgcgccgtatcattcgtcgtgcggttcgtcatggcaacatgctgggcgcgaaagagaccttcttctacaagctggttgggccgctgattgacgttatgggctctgccggtgaagagctgaagcgccagcaggcgcaggttgagcaggttctgaaaacggaagaagagcagtttgcccgtacgctggaacgtggtctggcgctgctggacgaagagctggcgaagctttccggcgacacgctggatggcgaaaccgctttccgtctgtatgacacctacggcttcccggttgacctgacggcggacgtttgccgcgagcgcaacatcaaagttgatgaagcgggatttgaagccgcgatggaagaacagcgtcgtcgcgcgcgtgaggccagcggttttggcgcagactataacgcgatgatccgcgttgacggcgcgtcagaatttaaaggttatgaccatctggaactgaacggtaaagtgaccgcgctgtttgtggatggtaaagcggtagatgcgattagcgcgggtcaggaagccgttgtcgtgctggatcagacgccgttctatgcggaatccggcggtcaggttggcgataaaggcgaactgaaaggcgcaggcttcgcgtttgcggttagcgatacgcaaaaatatggccaggcgattggacatatcggtacgctttcgaccggttccctgaaagtgggtgatgcggtgcaggctgatgtggatgacgctcgccgggcgcgtattcgcctgaatcactctgcgacgcacctgatgcacgcggcgctgcgccagattctgggcacgcacgtagcgcagaaaggctcgctggttaacgacaaagtcctgcgtttcgacttctcgcataatgaagcgatgaaaccgtctgaaatccgtgcggtggaagatctggtgaatgcgcaaatccgtcgcaacctgccggtcgaaaccaacatcatggaccttgaagcggcgaaagctaaaggcgcaatggcgctgtttggcgagaagtatgacgatcgcgttcgtgtgctgagcatgggcgatttctccaccgaactgtgtggcggtacgcacgccagccgtacgggggatatcggtctgttccgcatcgtttctgaatctggtactgcggcaggcgttcgtcgtattgaagcggttacgggcgaaggcgcgattgctacgctgcacgctgaaagcgatcgcttaagcgatatcgcacagttgctgaagggcgacagccagaatctgggcgaaaaagtccgttctgtactggaacgtacgcgtcagcttgaaaaagagttgcagcagttgaaagaacaggctgccgcgcaggaaagtgcgaacctttccagcaaagcggttgatatcaacggcgtgaagctgctggttagcgagcttgcgggcgttgagccaaaaatgctgcgtacgatggttgatgatctgaaaaatcaactgggttctaccgttatcgttcttgcaacggtagcggaaggtaaggtttctctgattgcgggcgtgtcgaaggatgtgaccgaccgcgtgaaagcaggggagctggtcggcatggtcgctcagcaggtgggcggcaagggcggcggacgtccagacatggcgcaagccggtggtacggatgcggctgctctgccagcagcgttagccagtgtgaaaggctgggttagcgcaaaactgtaa

SEQ ID NO: 74466 - DNA, 186 bp, Citrobacter koseri
atgctgattctgactcgtcgagttggtgagaccctcatgattggagatgaggtcaccgtgacagttttaggggtaaagggcaaccaggtgcgcattggcgtaaacgccccgaaagaagtctctgtccatcgtgaggagatctaccagcgtatccaggctgaaaaatcccagcagtccagttactaa

SEQ ID NO: 74467 - DNA, 567 bp, Citrobacter koseri
atgtacgaacgttatgcgggtttgatttttgatatggatggcaccatcctggataccgagccgacgcaccgtaaggcgtgggacgaggtattagggcgctatggtcttcgctttgatctgcaagcgatggtggcgcttaacggttctccaacctggcgtatcgcgcagtcgattatcgaactgaatcacgcggatcttgaccctcatgcgctggcgcaagaaaaaactgatgcagtgaaaagcatgttgctggatagcgtagagcctctgccgctggttgaggtggtcaaagcctggtatggccgtcgacctctgtcggtgggaacgggtagcgaaagcgcaattgccgaagcgctattgacccatctggggctgcgtcgttattttgatgcggttgtcgctgcggatcatgttctgcaccacaaacccgcgccggatacgttcctgctgtgtgcggagcgtatgggcgttgtgccgacgcaatgcgtcgtgtttgaggatgctgatttcggcttgcaggcagcacgcgcggcgggaatggatgccgtggacgttcgactattgtga

SEQ ID NO: 74468 - DNA, 429 bp, Citrobacter koseri
gtgagtgacgggctgtcgctcctgtcactgtttgccagcagttttctcagcgccacgctgttgcccggtaattccgaagttgttttagttgccatgttagtctccggggtaagtcatccttgggtcttagtcttaacagcaacaatgggtaatagccttggagggttaactaacgttatccttgggcgtttttttccgttgcgcaaaacatcgcgctggcaggaaaaagccactggctggcttaagcgctacggtgcagtcacactattattaagctgggcgccggttatcggtgatttgctgtgcctgttagcgggatggatgcgcatctcgtgggggccagtgctcttttttttatgccttggtaaagcgttgcgttacgttatcgtcgcaaccgctacggttcagggcattatgtggtggcactaa

SEQ ID NO: 74469 - DNA, 1557 bp, Citrobacter koseri
ttgatcccggacgtatcacaggctctgacctggctggaaaggcatcctcaggcactaaaggggattcaacgcgggctggagcgcgaaacgctgcgtgttaacgctgatggcacgctggcaaccacaggtcatcctgacgcgttaggctcggcgctgacgcacaaatgggtcacgacagattttgctgaagccctgctggagtttattaccccggtagacggcgatattcagcatatgctcacattgatgcgcgatctgcatcgctatacggccagaaatttgggtgatgagcggatgtggccgctgagtatgccttgctatattgctgaagggcaggatattgagctggcgcagtacggtacgtcaaatattggtcgtttgaaaacgctttaccgggaagggttgaaaaaccgttacggcgcgttgatgcaaaccatctccggcgtacactacaatttttcgctgccgatggcattctggcaggcgaagtgtggcgtcgtggacggggaagatgcgaaagagaaaatttccgcaggctatttccgcctgatccgtaactattaccgttttgggtgggtcattccgtatctgtttggcgcctctccggctatttgttcctcattcttgcagggcaaacccaccacgctgccgtttgaaaaaacggactgcggtatgtactacctgccgtatgcaacgtcgctgcgtttgagcgacctgggttataccaataagtcgcaaagcaatcttggaattacgtttaacgatctgcatgaatatgtggcaggattgaagcgcgcgatcaaaacgccgtccacggagtatgcggagatcggtctggagaaggacggtaaacgcctgcaaatcaacagcaacgtgctacagattgagaacgagctgtatgcgccgatccgccctaaacgcgtgacgcgtagcggagaaacgccgtcagatgcgcttctgcgcggcgggattgaatatatcgaagtgcgttcgctggatattaacccgttctcgcctattggcgtggacgagcagcaggtgcgtttcctggatctgtttatggtctggtgcgtactggccgatgcgccggaaatgagcagcgacgagctgctgtgtacgcgcacgaactggaatcgggtgattctggaagggcgtaaaccagggctgacgttagggattggctgtgaaaccgcgcagttcccgctgccgaaagtgggtaaagatctgttccgcgacctgaaacgtgtggcgcaaacgctggacagcatccacgggggagaggattatcagaaggtatgtgatgaactggttgcctgtttcgacaacccggagctgacgttctcagcgcgtattctgcgctcgatgattgataccgggattggcggcaccggcaaagcgctgggcgaggcttatcgcaatctgctgcgcgaagaaccgctggaaattttgcgtgaagaggacttcattgctgaacgtgaggcgtcaacgcgtcgtcagcttgaggttgaagcggcggataccgaaccgtttgatgcgtggctggaaaagcacgcctga

SEQ ID NO: 74470 - DNA, 516 bp, Citrobacter koseri
atgccgttgttagatagcttcacagtcgatcatacccggatggaagcaccagcagtccgggtcgcgaaaacgatgaacaccccgcatggcgataccattaccgtgtttgacctgcgtttctgcatcccgaataaagaagtgatgcctgagaagggtatccatacgctggagcacctgttcgctggctttatgcgtaatcatctgaacggcaacggtgttgagattatcgatatctccccgatgggctgccgtaccggtttctacatgagcctgatcggtacgcctgacgaacaacgtgtggcagacgcctggaaagccgcgatggctgacgtgctgaaagtgaaggagcagaatcagatcccggagctgaacgtttatcagtgcggtacgtatcagatgcactctctgagcgaagcgcaggatattgcacgtcatattctggaacacgacgttcgcatcaacagcaacgaagagctggccctgccgaaagataaattgcaggaactgcatatctag

SEQ ID NO: 74471 - DNA, 1539 bp, Citrobacter koseri
atgcaacagcaaaaaccgctggaaggcgcgcagctggtcattatgacgattgcgctgtcgctggcgacattcatgcaggtgctggactccaccattgctaacgtggcgatccccaccatcgccgggaaccttggctcatcgttgagccaggggacatgggttatcacctcattcggggtggcgaacgcgatctccatcccgattaccggctggctggcgaaacgcgtcggggaagtgaagctgttcatgtggtcaaccgtcgcctttgccattgcgtcatgggcgtgcggggtctccaacagtctgaacatgctgatcttcttccgcgtggttcagggtgtcgtcgcagggccgttaatcccgctctcacagagcctgttgctgaataactatcctcccgcaaaacgttctatcgcgctggcgctatggtcgatgacggtgattgtcgcgccgatctgcggcccgatactgggcggctacatcagcgataactatcactggggctggattttcttcatcaacgtgccgattggggttgcggtcgtgctgatgacgctgcaaaccctgcgcggtcgcgagactcgcaccgagcagcggcgtatcgacgctatcggcctggcgctgctggtgattggtatcggcagtctacagatcatgcttgaccgcgggaaagagctggactggttcgcctcgcaagagattatcatcctgaccgtggtcgccgtcattgccatcagtttcctgattgtctgggagctgaccgacgataacccaatcgttgacctctccttgttcaagtcgcgtaactttacgattggctgtttgtgtatcagtctcgcctatatgctctatttcggcgcgattgtgttgttaccgcagctgttgcaggaggtatacggctataccgcgacgtgggccggcctggcctcagcgccggtcggggtaatcccggtgatcctgtcgccgattatcggacgtttcgcccacaagctggatatgcgcaggctggtcacgttcagctttatcatgtatgccgtctgcttttactggcgtgcgtggacgtttgaaccgggtatggatttcggcgcatcggcctggccgcagtttattcagggcttcgccgtagcctgcttctttatgccgctcaccaccatcacgctctccggcttgccgcctgagcgtctggcggcggcgtcgagtctgtctaactttacgcgaacgctggcggggtcaattggtacatcaatcaccaccaccatgtggaccaaccgtgaagcgatgcaccattcgcaattgaccgagtcggtgaatccgtacaaccccaatgcccaggcgatgtacgatcagctacaggggctggggatgacgcagcagcaggcgtcaggctggatcgcccagcagattaccaatcaggggctgattatttccgccaatgagatcttctggatgtcggccgggatcttcctcgtgctgcttgggctggtctggttcgccaaaccacctttcggcgcgggcggcggcggtggaggcgcgcattaa

SEQ ID NO: 74472 - DNA, 1173 bp, Citrobacter koseri
atgagcgcaaatgcggagactcaaaccccgcagcaaccggttaagaagaatggcaaacgtaaaagcgcgctaatccttttaaccttgctctttatcgcaattgccgtggcatatgggatttattggtttttagtactgcgtcatatcgaagaaacggatgatgcgtacgtggcagggaaccaggttcaaatcatggcgcaggtatcaggcagcgtgacgaaagtctgggctgataacactgactttgtaaaacagggcgacgtgctggtcacgctcgaccagacggatgccagacaggcattcgaaaaagcgaaaacggcgctggcctccagcgttcgccagacgcaccagttgatgatcaatagcaagcagctccaggccagcattgaagtgcagaaaaccgcactggcgcaggcgcaaagcgactttaatcgtcgcgtgccgctgggcaatgcgaacctgatcggtcgcgaagagctgcaacacgcgcgtgatgccgtcgccagcgcgcaggcgcagttggatgtggcaattcaacaatataacgcaaaccaggcgatgatcctcggcagcaagctggaagatcagcctgccgtgcaacaggcggctacggaagtgcgcaacgcctggctggcgctggagcgtaccaaaatcgtcagcccgatgactggctacgtctcccgccgcgccgtacagcctggcgcgcagattagcccgaccacgccgctgatggcggtcgtgcctgccaccaacctgtgggtggacgcgaacttcaaagagacgcagctcgcccatatgcgtatcggccaaccggcaacggtcatcagcgatatttacggcgatgacgtgaaatacaccggtaaggttgtcggcctggatatggggacaggcagcgccttctccctgcttccggcgcaaaacgcgaccggcaactggatcaaggtcgtgcagcgcttgcctgtacgtattgaactggatgcgcagcaactggcgcagcatccactgcgtatcggcttatcaaccctcgtcaccgtggatacgtcgaatcgcgacggacaggtgctggcaagccaggttcgtagtaccccggtttctgagagtaacgcacgagaaattaatcttgctccggtcaataagctgatcgaagagattgtgcaggccaacgcgggataa

SEQ ID NO: 74473 - DNA, 531 bp, Citrobacter koseri
atggatagttcgtttacgcccattgaacaaatgctaaaatttcgcgccagccgccacgaagagtttccttaccaggagatccttctgacccgcctttgcatgcatatgcaaggcaaactgctggaaaaccgcaataagatgctgaaagctcaagggattaacgagacgttgtttatggcgttgattacgctggagtctcaggaaaaccacagtattcagccatctgaactgagttgcgcgctgggctcgtcccgtaccaacgcaacacgtatcgcagatgagttagagaaacgcggctggatcgaacgtcgtgaaagcgataacgatcgtcgctgcctgcatctgcaactgacggagaaaggtcacgcgtttttgcgcgaggtgttaccgcctcagcatcactgcctgcaccagctatggtcctctctcagcaccgccgaaaaagatcaacttgagcacatcactcgtaagctcctgacgcgtctcgatcagatggatcaggatggcgccgttcttgaggcgctacgctaa

SEQ ID NO: 74474 - DNA, 336 bp, Citrobacter koseri
atgagttatgaggttttgctgctggggctgctggttggctgcgccaattattgttttcgttatttaccgcttcgtctgcgaatgggaaacacccgtcccgccaggcgcggggcaacgggcgtgttgctcgacaccattggcatcgcatccatctgcgccctgctggtggtgtctacggctcccgaagtgatgcacgacgccagccggttcattccgacgctggtcgggtttgccgtcctgggcgtcagtttctacaagacgcgcagcatcatcatcccaacgctactgagcgctctgggctatggactcgcctggaagataggggtcattttataa

SEQ ID NO: 74475 - DNA, 738 bp, Citrobacter koseri
atggaaagccctgcaccccagtctgagccccgtccggcaacattaacggaaggattcaaagacagtttaccgatagtcataagttatattccggtggcgtttgcgtttggccttaacgccacccgtctgggctttactcccctcgaaagcgtttttttctcctgtattatttacgcaggcgccagccagttcgtcatcaccaccatgctcgcggcgggcagcacattatgggtcgccgcgctgaccgtgatggcgatggacgtacgccatgtgctgtacggcccttccctgcgtagtcgcatcagccaacggctcagtaaacctaaaaccgccctgtgggcatttggtctcaccgatgaagtgtttgctgccgccacggccaaactggtgcgggataaccgccgctggagtgaaaactggatgatcggcatcgcgttctgctcctgggcctcctgggtgctcggcacggtcattggcgcattttccgggagcggattgctgaaaggcttccccgccgttgaggcggcattaggttttatgctaccagccctgtttatgagctttttgctcgcctcttttcaacgcaaacaaacgctgtgcgtcacggcggcgttaatcggcgcgctggcaggcgtcacgctgttttccattcctgcggctatcctggcgggtatcgccagcgggtgtctgaccgccttgatccagtcgttctggcaaggagcgcccgatgagttatga

SEQ ID NO: 74476 - DNA, 1185 bp, Citrobacter koseri
atgaccaaatccactcacgggcttagcccggcgctgattgttttaatgtccgtggcaaccggtctggccgtcgccagtaactattacgcccagccgctgctcgatactatcgcaaacaatttctcgctttccgccagctcggcgggctttatcgttaccgccgctcagttgggctatgccgccggattgctctttctggtgccgctgggcgatatgttcgagcgccggacgctcatcgtctccatgacgctgctggccgcaggcggcatgctgattaccgccagcagtcagtcgctcggtatgatgattctcggcacggcgctcaccgggctgttctccgtcgtggcgcaaatcctggtgccgctggcggcgacgctcgccacgccggataagcgcggcaaagtggtcggcaccatcatgagcggcctgctgctggggattttactggcgcgtaccgttgccggattgctggcgaatcttggcggctggcgcaccgtcttctgggtcgcttctgtgctgatggcgctgatggccgtcgcgctgtggcgcggtttaccaaaggtgaaatcagaaacgcatcttaactatccgcagctattgggttccgtgttcagcctgtttatccacgacggcctcctgcgcacccgcgcgttgttaggctgcctgacgttcgccaacttcagcattctctggacatcgatggcctttttactggccgcgccgccgtttaactattccgaagggatgattgggctgtttggtctggcgggagccgctggcgcgctgggcgcacgtccggcgggcggttttgccgataaagggaagtcccatctcaccacgactttcggcctgctgttgctgttgctctcctggctggctatctggtacggacacagctccgtgctggcgctgattattggcatcctggtgctggatctcaccgtgcagggcgtacacatcaccaatcagacggtgatttaccgcgtccacccggatgcgcgtaaccggctcaccgccgggtatatgaccagctactttatcggcggcgccgccggttcgttgatttcggcatcggcctggcagcatgccggctgggccggcgtttgtctggccggtaccaccgtcgccgcgctcaatctgctggtctggtggcgaggttttcaccgacaagaagccgcaaattaa

SEQ ID NO: 74477 - DNA, 996 bp, Citrobacter koseri
atgcgacataacattctatttgccacagcgtttgccacccttgtctctaccagcgcattcgctgccgacctgccgggcaaaggcgttaccgtacagccggtgcagagcaccatcaccgaagaaaccttccagacgctgctggtcagccgcgcgctggagaaactgggttataccgtcaataagccaagcgaagttgattacaacgtcggttacacctccattgcctctggcgatgcaacttttaccgccgtgaactggcagccgctgcatgatgatatgtacgccgctgcgggcggagacaaaaagttctatcgcgagggggtattcgtgacgggcgccgcgcagggttatctgatcgacaagaaaaccgctgagcagtacaagatcactaacctcgcccagttgaaagacccaaaaatcgccaaaatctttgataccaacggcgacggcaaagctgacatgatgggttgttcgccaggctggggctgtgaagcggtgattaaccaccagaacaaagcgttcgatctggaaaaaaccgtcgacgtcagccacggtaactatgcagcgatgatggccgacaccatcacccgcttcaaagaaggcaagccgattctgtactacacctggacgccgtactgggtgagcgacgtgatgaagccgggtaaagatgttgtctggttacaggtgccgttctcttccctgccgggcgagcagaaagacattgatactaaactgccgaacggcgcgaactatggcttcccggtgaacaccatgcacattgtcgccaacaaagcctgggcagagaaaaacccggcggcggcgaagctgttcgccatcatgaaggtgccgctggcggatatcaacgcgcagaacgcgatgatgcatgaaggcaaatcgtccgaggccgatgttcagggtcacgttgacggctggatcaaagcccaccagcagcagtttgacggctgggtaaaagaagcgctggccgcgcagaaataa

SEQ ID NO: 74478 - DNA, 1065 bp, Citrobacter koseri
atggctgaacaaactaatccgtgggataccgcgccagcggcggatagcgccgcgcaatccgccgacgcctggggaacgccttcgggcgcgcctgccgatggcggcggcgcagactggctgaccagcgcgcctgcgcctgcgccagaacattttaatattatggacccgttccataagacgctgatcccgctggacagctgggtcactgaagggatcgactgggtcgttacgcatttccgccccgttttccagggcatccgtgtaccggtggattacattctcaatggcttccagcagctgttgctgggtatgccagctccggtggcgattatcattttcgcactgatcgcctggcagatctccggcctggggatgggggccgccacgctggtatccctgattgccatcggcgcgattggcgcctggtcacaggcgatgattaccctggcgctggtgctgaccgccctgctgttctgcgtggtcatcggtttgccactggggatatggctggcgcgcagtccgcgtgcggcgaaaattgtccgcccgctgctggatgcgatgcaaacaacgcctgcgttcgtctatctggtgccgatcgtgatgctgttcggtatcggtaacgtgccgggggtggtagtgaccattatctttgccctgccgccgattgtgcgtctgaccattctggggattaaccaggttccggcggatttgatcgaagcctcacgctcatttggcgccagtccgcgtcagatgctgtttaaagtacagctaccgctggccatgcccaccattatggcgggtgttaaccagacgctcatgcttgccctctccatggtagtgatcgcctctatgattgccgtcggcgggcttggtcagatggtgctgcgtggcattggccgcctcgacatggggctggcgaccgtcggcggggtcggtattgtgatcctcgctatcattctggaccgcctgacccaggccgttggtcgcgactcgcgcagccgtggcaaccgccgctggtataccaccggtcccgttgggcttatcactcgccctttcgttaagtaa

SEQ ID NO: 74479 - DNA, 1203 bp, Citrobacter koseri
atggcaattaaattagaagttaagaatctctataagatatttggtgagcatccgcagcgagctttcaaatatattgaaaaaggactttcgaaagagcaaattctggataaaacagggctatcgcttggcgttaaagacgccagtctggccattgaagaaggcgagatttttgtcatcatgggattatccggttcgggtaaatccacaatggtacgccttctcaatcgcctgattgaacccacccgcgggcaagtgctgatcgacggcgttgatattgcaaaaatatctgacgccgagcttcgcgaggtgcgcagaaagaaaattgcgatggttttccagtcatttgcattaatgccgcacatgaccgtactggataatacggcattcggcatggaattagccggcgttgccgctgaagagcgccgtgaaaaagcgctggatgccttacgccaggtggggctggagaattatgcgcacggctacccggatgaactctccggcggtatgcgccagcgtgtcggtctggcccgcgcattagcgatcaaccctgacattctgttaatggatgaggccttctcggcgctcgatcctttaattcgtaccgagatgcaggatgagctggtaaaactacaggcaaaacatcagcgtaccgtcgtttttatttcccacgatctcgatgaagcgatgcgtattggcgatcgtattgccattatgcaaaacggcgaagtcgttcaggtgggaacgccagatgaaattctgaataacccggcgaatgattatgtccgcaccttcttccgtggggtcgatattagccaggtgttcagcgccaaagatattgcccgccgcagcccggtgggattaattcgtaaaacgccaggttttggtccgcgttccgcactgaaattattgcaggatgaagaccgtgaatttggttatgtgattgaacgcggtaataagtttgtcggcattgtttccatcgactcattaaaagcggcattaagccaggcgcaaggtattgaagcagcgcttattgacgagtcactggcggtggatgcgcaaacacctcttagcgagttgctctctcatgttggccaggcgccttgtgcggtgccggttgtcgacgaggaacaacagtatgtcggcattatttcaaaacgcatgctgctacaggctttagatcgcgagggggcaaacaatggctga

SEQ ID NO: 74480 - DNA, 960 bp, Citrobacter koseri
atgaaactatcacgcgtgagcgccatcaactggaacaagattcaggatgataaagacctggaagtgtggaaccgcctgaccagcaacttctggctgccggaaaaggtgccgctttccaatgatatccccgcctggcagacgctaagcgccgccgagcagcagcttaccatccgcgtgtttaccggattaacgctgctcgacaccattcagaatatcgccggggcccccgcgttgatgcaggacgcgctgacgccgcatgaagaggcggtgctgtcaaacatcagctttatggaagcggtacatgcccgctcgtacagctcgattttctctacgctttgccagacgaaagacgtagacgcggcctatgcctggagtgaggaaaatgcgccgctgcaacgcaaggcgcagattatcctgcaacattacaccgccgacaatccgctgaaaaagaaaatcgccagcgtattcctggaatctttcctgttctattccggcttctggctgccaatgtatttttccagccggggcaagctgaccaacaccgccgacctgattcgtctgattattcgtgacgaagcggtacatgggtattacatcggctataaataccaaaaagggctggagaaactgtcggaatccgaacgcgacgaattgaagcatttcgcccttgatttgctgatggagctgtatgacaacgagtctcgctatacggaagaactgtatgccgaaaccggttgggtggcagacgttaacgcctttctctgttacaacgccaataaagcgttgatgaacctgggctacgaagcgttattccccgcagaaatggcggaggtcaatcctgccatacttgctgcgctgtcaccgaatgcggatgaaaaccatgatttcttctccggttcaggctcctcctatgtgatgggaaaagccatcgaaaccgaagacgaagactggaatttttga

SEQ ID NO: 74481 - DNA, 2145 bp, Citrobacter koseri
ttggcaacgacaaccgcagaacgtgtgaagcaagaaacgatggattatcacgcgctgaatgccatgctgaatctgtacgataaagcaggccatattcagttcgacaaggatcggcaggcggtagaggtgttctttgccacccatgtccgccccaattccgtctcctttgccagccaggacgagcgcctggagtatctgcttcgcgaaggctattacgacgaaagcgttttaacccgctacgatcgcgctttcgtggtgaagctgtttgctcacgcccacgccagcggttttcgcttccagacgttccttggcgcgtggaaatattacaccagctatacgctgaaaacgttcgacggcaaacgctaccttgaagactttgaagaccgggtgacaatggtggcgctgacgctggcgcagggcaatgaagcgctggcgatgcagcttaccgatgaaatcctctccgggcgctttcagccggccacgccgaccttcttaaactgcggcaaacaacagcgcggcgagctggtctcctgcttcctgttacgcattgaagacaatatggagtccattggtcgggcggttaactcggcgctacagctttccaagcgcggcggcggcgtggcgtttttgctctcgaatcttcgtgaagcgggcgcgccgatcaagcgtattgagaaccagtcctcaggcgtgatcccggtaatgaagatgctggaagacgccttttcttacgccaatcagttaggggctcgtcagggggcgggcgccgtgtatctgcatgcgcaccacccggatatcctgcgttttctcgacacgaaacgcgaaaacgccgatgaaaaaatccgcattaaaacgctgtcgctgggcgtggtgatcccggacgtaacgttccgtctggcgaaagaaaacgcgcagatggcgctgttctcgccttacgatgtcgaacgcatttacggcaaaccgttcggagatatcgccattagcgaacggtacgatgaactgctcgccgacgaacgcgtacgcaagcagtacatcaacgcgcgcgaatttttccagcggctcgcggaaatccagtttgagtcaggctatccctacatcatgtatgaggatacggtaaaccgcgcgaatccgattgccggtcgcatcaacatgagcaacctgtgctcggagattttgcaggtcaacagcgcctccacctatgatgaaaatctggattacgcgcagaccgggcatgatatctcctgcaacctcggttcgctgaacatcgcccatacgatggactccccgaattttggccgcacggtggaaacggcgattcgcggcctgacggcggtgtcggatatgagccatatccgcagcgtaccgtcaattgaagccggaaacgccgcatcacacgcgattggcctggggcagatgaacctgcacggttatctggcgcgagaaggcattgcctacggcagcccggaggcgctggatttcaccaacctctatttctataccgtgacctggcacgcgctgaatacctcaatgatgatggcgcgtgaacgcggtaaaaccttcgccggattcaaacaatcgcgctatgccagcggcgagtatttcgaacaatatttacagggcgactggcagccgaaaaccgacacggttcgtgcgctctttgcccgtagcggcattacgcttccgggccgcgaaatgtgggcgcggttgcgggatgaggtgatgcgctacggtatctataaccagaatttacaggcggtgccgccgaccggttccatttcctatatcaaccacgcgacgtcaagcattcacccgatcgtgtcaaagatagagatccgcaaagaaggaaaaaccggacgcgtttactacccggccccgtttatgaccaatgagaacctggacatgtaccaggacgcctatgaaatcggcccggaaaaaatcattgatacctatgccgaagccacacgccacgttgatcagggactgtcgctgacgctgttcttcccggataccgcgacaacccgcgatatcaacaaagcccagatttacgcgtggcgaaaagggatcaaaacgctgtattacatccgtctgcgtcagctggcgctggaaggtactgaaatagaaggctgcgtatcatgcgcgctataa

SEQ ID NO: 74482 - DNA, 411 bp, Citrobacter koseri
atgagccaactcgtctacttttccagcagctccgaaaatacgcaccgctttatgcagcgtctggggctgcccgctattcgcattccgcttaatgaacgcgagcgaatcagggtagacgaaccttacattctggtcgtcccctcttacggcggcggcggtacggcaggcgcggttccacgacaggtgatccgctttttaaatgatgaacataaccgggcgttaattcgcggcgtgatcgcctccggcaaccgtaactttggcgaggcttacggtcgcgctggcgaggtcatttcacaaaaatgcggcgtcccctggctgtaccgctttgaactgatgggaacgcaaagcgacatcgacaacgtccgaaaaggagtgagcgaattttggcaacgacaaccgcagaacgtgtga

SEQ ID NO: 74483 - DNA, 246 bp, Citrobacter koseri
atgctcattactatttacactcgtaacgactgtgttcagtgccacgccaccaaacgggcgatggaaagccgtggatttgactttgagatggtgaacgtcgatctggttcccgacgcggcagacaccctgcgggaaaaaggttttcgccagctgccggtggtcatcgcgggcgataccagttggtcaggcttccgcccggatatgatcaaccgtctgcatcctgatgcgcgcgtggccagcgcatga

SEQ ID NO: 74484 - DNA, 432 bp, Citrobacter koseri
atgacgacattacgtcagccctattatgaacttagccctgaagtctatagtgcgctgggccaggccaaaaaagcgttggaaaacagcgcgctggacaccacgctgatggaactgatttatctgcgtatctcacagatcaacggttgcgcattttgtctggagatgcacagcaaagccctgcgtaaatccggcgtggcgcaaagcaaactggatgcgctggccgggtggcgggtaagccatcacttcagcgaacaggagcgtgcggcgctggcctgggcggaatccgtcacggatatcgcaagaacgcatgccgaagatgacgcgtatctgccgctactcgaaagtttcagcgcccgtgaaatcagcgatctgacttttgctatcagtctgatgaactgcttcaaccgtctggctgttgggatgcggatgtaa

SEQ ID NO: 74485 - DNA, 1353 bp, Citrobacter koseri
gtgccacgctatcagcaaatcgcccgtcagttaaaaaacgccattgagcatggcgaactcaaggccggggcgcgtttgccgtccagccggacatggtcgcaagagttaggcgtttcacgctcgacggtcgaaaacgcgtacggcgagctggtggcgcaaggctggctggagcggcgcgggcaggccggtacgtttgtcagccggcatgtacgtccagaaaaaacggtcgctacgcctgccgttttcgccggagaaagccagacgcccgatccatttcaaatgggattgcctgcgctggatcttttcccgcgtgagatttgggcgcgggtgatggggcgacgcctgcgtacgcagacccgttttgatctcgcgttgggcgacgtctgcggcgaagcgattttgcgcgaagccattgtcgattatctgcgggtgtcgcgcagtattgaatgcctgccggaacaggtgtttatcacttccggctatgcgtcctcaatgacccttatcctgcgcgcgctggcgaaacctggagaaggcatgtgggttgaagatcccgggtttccccttattcgcccggtgattgcccaggaaaatgtcgggctgatgccggttccggtcgatgatcatggactgaatgtggcggcaggcattcacgattacccgcaggcgcgttttgtgttgttaacgccggcccaccaaagcccgctcggcgtggcgctctctttaacccgtcgccgccagttacttgaatgggcggcgagcgcgcagacatggattatcgaagacgattatgacagtgaatttcgttaccacggcaagccgcttccgccgctgaaaagcctcgatgcgccgcagcgggtgatctatgccggaacgttcagcaagtcgctgtttccggcgctgcgtaccgcatggctggtggttccgcttaatcaggtggcgcgttttcgtcagctggcggggctgatggcctgtagtgtgccggtgctgtggcagcagacgctggcggattttatccgcgatggtcatttctggcggcatttgaaaaagatgcgccagcattacgccaggcgacggctttggatggaagaggcgctgcgtgagcagggattcgccgttgtcccgcaggaaggcggcattcagctggttgttgcggtggatgctgatgaccggttgctgacggcgaaagccaatcaggccggattagcggtgcaggcattgagccgctggcggcttaagtcagaaggaaggggaggactgctgctgtcgtttaccaacatcacttcagcggaaatggcaaaacaggtcgcacgtcagcttcgggaagccataaccgacacgccgtcggccggataa

SEQ ID NO: 74486 - DNA, 327 bp, Citrobacter koseri
atgtttaaccgaccgagccgaaaagacgccgatgaaaatgttcaggatattcagaacgatgtcagtcaattagccgatacccttgaagacgtgctgaaatcatggggaagcgatgccaaagatgaagcggaaaccgcgcggcgcaaagcgcaggcattgctgaaagaaacccgtgcccgtatgcatggccgcacgcgagtagaacaggcggcgagtgatgccgtgggatgtgcggatacctttgtgcgagaaaaaccctggtgcagcatggggacagccgccgctgtcggcatcgttgtcggggcgctgttaagtttacgccgttaa

SEQ ID NO: 74487 - DNA, 357 bp, Citrobacter koseri
atgtatttacgacccgatgaggtggcgcgcgtacttgaaaaagtgggttttaccgtagatgtggtaacacagaaagcatacggttatcgacgtggcgaaaattatgtgtacgttaatcgtgaagcgcgtatggggcgtaccgcattagtgattcatccgacgctaaaagaacgcagttcttcactggcagaacccgcttcggaaattaaaacctgcgatcattatcatcagttcccgctttatttaggcggagaaattcacgaacattacggcataccgcacggctttagttcacggattgcgcttgagcgctatttgcatggactgtttggcgaagcaaaaccaaattcaaactaa

SEQ ID NO: 74488 - DNA, 450 bp, Citrobacter koseri
atgttctcaccgcagtcacgcttgcgtcatgcagtcgcagacacgttcgcgatggttgtttattgttctgtcgtgaacatgttgatcgagatattcctctctggaatgacctttgaacagtcgctgtcttcccgtctggtcgccattccggtcaatattctgatcgcgtggccctatggaatgtatcgtgatgcgattatgcgcgtcgcgcgtaaggcgagcccggcgagttgggtgaagaatctggcggatgtactggcttacgtcaccttccagtctccggtttatgtcgcgattttgttgacggtcggcgcagactggcaccagattacagcggcagtcagttcgaatatcgtgatatccatgctgatgggcgcggtttacggctacttccttgattattgccgccgcctgttcaaagtcagcagctaccaccaggccaaagcctga

SEQ ID NO: 74489 - DNA, 402 bp, Citrobacter koseri
atgactttgatgttacagaatttaaataatatccgtacactgcgcgcaatggcccgcgaattctccattgacgttcttgaagaaatgctcgaaaaattcagggttgtcactaaagaaagacgcgaagaagaagaagagcaacagcgtctgcgcgctgaacagcaagagaaaattaatacctttctggagatgatgaaagccgacggcatcaatccagaagacttattaaatatgggggcggcaacgccgcgttcaggtaaaaaacgtacaccgcgcccggcgaaatatcgttttaccgattttgatggtgagacgaaaacatggaccggtcaggggcgcacgcctaagccgattgcccaggcgctggcggcggggaaatctctggatgattttctgatctaa

SEQ ID NO: 74490 - DNA, 528 bp, Citrobacter koseri
atgacaaccgggacgatttccccgcgcgaagcacaggcgctgatagcacaaggggcaacgctgattgatatccgtgacgccgatgaatacctgcgcgaacatattcccgacgcgcagctggcgccgctctccacgcttgagcacggcgcttttccggcggcgttacgggctgaacgcgtcatctttcactgtcagtcaggcaggcgtaccagcggcaatgccgcaacgctccaggcggtcgccgcccccgcagaagtctggctgctggaggggggaatcgaaggctggaaagctgcgggcctgcccgtggcggaagataagtctcagccgctgccgctgatgcgtcaggtgcaaattgccgccggagggctggttctactgggcgttgcgctgggttacaccgtcagtagcggtttcttcctgatcagcggctttgttggcgccgggttaatgctggcgggattcacgggtttctgcggcatggcgcgactgctcgaaaagatgccctggaaccggcgaacacattaa

SEQ ID NO: 74491 - DNA, 450 bp, Citrobacter koseri
atgggtctcttcaattttgtgaaagatgcgggcgaaaagctctgggatgccgtaaccggaaatcatgataaagatgatctggcgaaaaaggtgcaggaacacttaaacaaaaccggtattcctgacgccgataaagtcaatgtgcaggtgacggacggtaaagcgacggtaacgggcgacggtttaagtcaggaagcgaaagaaaaaatcctcattgcgatcgggaatatttccgggatcggcagtgtggaagatcaggttaaaacgtcagcgcctgcggcggagagtcaattttatacggtgaaatcaggcgacacgttgagcgctatttcaaaacaggtttacggtaatgccaacctgtacaacaaaatctttgaagcgaataagccgatgctgaaaagcccggataaaatatatcccgggcaggttttacgtatcccggaagagtaa

SEQ ID NO: 74492 - DNA, 693 bp, Citrobacter koseri
atgaccgcctctgcccaaccgacggccatagatggataccgatggctcaaaaacgatattattcgcggcgtttatcagcccgatgagaagctgcgcatgagtctgttaacatcacgctatgaattaggcgtggggccgttgcgggaagcgctttctcaactggtggcggaacggctggtcacggtggtgaaccagaaaggctatcgcgtggcgtcgatgtcggagcaggaactgctcgatattttcgatgcccgcgccaatatggaagccatgctggtgcaactggctattgagcgtggcggcgatgagtgggaagccgatattctcgccagggcgcatatgctcaacaaactggaatcgagcgatgccagcgaacgtatgctggatgagtgggatcagcgccatcaggcatttcatacggctattgttgccggttgcggctcacattatctgctgcaaatgcgcgagcgacttttcgatctggcggcacgctaccgttttatctggctgcgcaaaacggttctgtccgttgaaatgctcgaagataaacatattcagcatcgggcgcttatggaggctattctggcgcgcgatgccgcacgcgccagcgaattaatgcgccagcatttactgacgccaattccgattattcaacaggcgatggccggtaaacttcagcaggaacagagctga

SEQ ID NO: 74493 - DNA, 1401 bp, Citrobacter koseri
atggggcaattgtcagaatcacatgctttaggtggcggactgaaatcccgccacgtcaccatgctgtctatcgccggcgtcattggcgccagtctgtttgtcggttccagcgtcgcgattgcgcaagccgggcctgcggtactgctggcttacctgtttgccgggttgctggtcgttatgattatgcgaatgctggccgaaatggccgtcgccacgccggataccggctctttctcaacctatgcggataaagccatcggcccctgggcgggctacaccatcggctggctgtactggtggttctgggtgctggttatcccgctggaggccaatattgccgccatcatcctgcattcatggataccgggcgtccccatctggctgttctctctggcgatcaccatcgcattaaccggcagtaatttgctgagcgtcaaaaattacggcgagttcgaattctggctggcgctgtgcaaagtgattgccattctggcgtttatcgcgctgggcgcggcggcaattagcggcttttatccctacgcagacgtgagcggcgtttcacgcctgtgggatcacggcggctttatgcccaatggcttcggcgcggtactgagcgcgatgctgatcaccatgttctcatttatgggcgcagagattgtcacgattgccgccgccgagtccgacacgccggataagcatatcgtgcgcgccaccaactcggtgatctggcgtatttcaatcttctacctgtgctctattttcgtggtggtcgcgctcatcccgtggaacatgccgggactcaaagacgttggttcctaccgttcggtactggaattgctgcatattccttatgccaaagcgatcatggactgcgtgattttattgtcagtcaccagttgcctgaattccgcgctgtatacggcgtcgagaatgctctactccctcagccgtcgtggcgatgcgcccgccgttatgggcaaactcaaccgcagcaggacgccgtatgtggcggtgctgttatccacaggggcggcatttctcacggtggtggtaaattattacgccccggcgaaagtgtttaaattcctgatcgacagctccggcgcgatcgccctgctcgtctacctggtgattgcggtttcccagctcagaatgcggaaaatcctgctggcggaagggagcgaaattaagctgaaaatgtggctctatccgtggctgacctggctggttatcgcttttatctgctttgtgctggtggtgatgctattccgaccggcgcaacagctggaggtgatttctaccgggctgttaggactggggatcatttgcaccgtgccgattatgtcccgctggaaaaaactggtattgtggcaaaaaacgccgttgcaaaatacgcgttag

SEQ ID NO: 74494 - DNA, 1284 bp, Citrobacter koseri
atgagcagcaataaagaattaatgcatcgccgcagtaacgccgtccctcgcggcgtaggacagatccaccctatttttgccgatcgcgcggaaaactgccgggtctgggatgtagaaggccgcgagtatctcgattttgcaggcggtattgcggtgttgaataccgggcacctgcacccggagatcgtctcggcggtcgaagcacaactgaaaaagctgtcgcatacctgttttcaggtgctcgcctacgagccgtatctggagctgtgcgaactcatgaaccagaaggtgccgggcaatttcgcgaagaaaaccctgctggtgactaccggttccgaagcggtggaaaacgcggtgaaaatcgcccgagcggcgacaaagcgtagcggcgccatcgcttttagcggcgcttatcatggccgtacccactacaccctgtcgctgaccggaaaagtcaatccctactctgccggaatggggctgatgccaggccacgtttaccgcgcgctctacccttgcgccctgcacggcatcagtgatgatgacgcgattgccagcatccagcgcatctttaaaaacgatgccgcgccggaagatattgccgccatcatcattgaaccggtacagggagaaggcggtttttatgcggcctcgcccgcttttatgcagcgtctgcgcgcactctgcgacgaacacgggatcatgctcattgccgatgaagtgcaaagcggcgcggggcgtaccggtacgcttttcgcgatggagcagacgggcgtcgccccggacctcaccaccttcgccaaatcgattgccggcggctttccgctggcgggagtgaccggtcgcgccgatgtgatggacgccatcccaccgggcggtctgggcggcacctacgccggtaatcctctcgcctgcgccgccgcgctggcggtactgaacattttcgagcaggaaaacctgctgcaaaaagccaaagacctggggcaaaccctgcgtaaagggctgctgaatattgctgaaacgcaccgcgagattggcgacgtgcgcggcccgggagcgatgatcgccattgagctgtttgaaaatggcgatcgcagcaaaccggacgcgaagctgaccgccgacatcgtcgcccgcgcccgtgataaagggctgatcctgctctcctgcgggccgtactacaacgtgctacgcattctggtgccgctgactatcgaagaagcgcaaattcagcaagggctggacatcatcgctcagtgttttgatgaggcgaagcaaggttag

SEQ ID NO: 74495 - DNA, 1449 bp, Citrobacter koseri
atgcaacttaacgatcccactttgttccgccagcaggcatttatcgaggggcaatggcgcgacgccagaagcggcgacacaatcgccgtaaccaacccagcgaacggccagccgttaggcagcgtaccgaaaatgggggcagaagagacccgcgaagccattgacgccgctaaccgcgcgctgcccgcctggcgcgcgctcaccgccaaagcgcgggcgaatattctgcgtcgctggttcaatttgatgatggagcaccaggacgatctcgcccgcctgatgacgctggaacaggggaagccgctggcggaagcaaaaggagaaatcagctatgccgcctcttttattgaatggtttgccgaagaaggtaagcgcatctatggcgacacgattccaggccaccaggccgataagcgcctgatcgttatcaagcagccgattggcgttaccgccgccatcacgccgtggaatttcccctcggcaatgattacccgcaaagccggcccggcgctggcggccggttgtacgatggttctgaaacccgccagccagacgccgttttccgcactggcgctggctgaactggcgaaccgcgccggggttcccgcaggcgtctttaacgtcatcaccggttctgcgggagcggtcggcaatgaactgaccagcaacccgctggtgcgcaaactgtcgtttaccggctcaaccgaaattggccgtcaactgatggaacagtgtgcgaaagacatcaaaaaggtgtcgctggagctgggcggcaacgcgccgttcatcgtctttgatgacgccgatctggataacgccgtggaaggcgcgctggcctctaagtttcgcaatgccgggcagacctgcgtctgcgctaaccgtctgtatgtacaggacggcgtgtatgaccgctttgcggaaaaactccagcaggcggtgagcaagctgcatctcggcgacggcctgcaagcagacgtcaccaccgggccgctgattgacgaaaaagcggtagccaaagtgcaggagcacatcgccgacgcgctggagaaaggcgcaaaagtgctctgcggcggtaaggcgcatgcgctcggcggcaacttcttccagcccaccatcctggtggacgtccccaataacgcgaaagtggctaaagaagagacgttcggccccctcgccccgctattccgctttaaagatgaagcggacgcgatcgcgcaggcgaacgataccgagttcggtctggcggcctatttctacgcccgcgatttaagccgcgtgtttcgcgtcggcgaagcgctggagtacggcattgtcggcatcaacaccggcattatctccaacgaagtcgcgccattcggcgggattaaagcctccggtcttggccgcgaagggtctaagtacggcatcgaagattatttagaaatcaaatacatgtgtatcggcctttaa

SEQ ID NO: 74496 - DNA, 1269 bp, Citrobacter koseri
atgtatgattttgtaattattggcggcggcattatcggcatgtcgaccgccatgcagcttattgatgtgtatccagacgccagcatcgccctgctggaaaaagagtccgaaccggcctgtcatcagacgggtcacaacagcggcgtgatccatgccggggtctactacactcccggtagcctcaaagcgcagttttgcctcgccggaaatcgcgccaccaaagccttttgcgatcaaaacggcattcgctacgacacctgcggaaaaatgctggtggcgacatccgaactggaaatgacgcggatgcgggcgctgtgggatcgcacggcggcaaacggcctggaacgcgagtggttaagcgcggcggaactgcgggagcgggagccgaacattaccggtctgggcgggatttttgtcccctccagcgggattgtcagctaccgggacgtgacggcggcgatggcgaaaatcttccaggccaaaggcggtgagattgtctacaacgcggaggtcagcgcgctgaaggaacatgcggcgggcgtggtgatcacaacccggggcgggcagatatacgaagcctcaaccctgattagctgttccgggctgatggccgaccggctggttaaaatgctgggggtcgatcccggttttatcatctgcccgttccgtggcgaatatttccgcctggcgtcgcagcataatcaaatcgttaaccatttgatctaccccattcccgatccggcgatgccgtttttgggcgtccacctcacccggatgatcgacggcagcgttaccgtcgggcctaacgccgtgctggcttttaaacgagaaggctaccggaaaggcgatttttcattatccgatacgctggaaattttcggttcgtccggcatccgccgcgtgctgcaaaacaatctgcgctcagggcttggcgagatgaagaactcactgtgcaaaagcggctatctgcggctggtgcaaaaatattgccccagcctgaccttaaaagatttgcagccgtggcctgcgggcgtgcgggcgcaggcggtgtcgccggatggcaagctgatcgacgatttcctgtttgttaccacgccacgatccattcacacctgcaatgcgccctctccggcggccacatcagccattcccatcggggcgcatatcgtcagcaaagtgcagacgctgctggcaagccagagtcatcccggacgcacgctacgtgcggcgcgtcgcgtggactcattaaatgccgcattcacccgttaa

SEQ ID NO: 74497 - DNA, 978 bp, Citrobacter koseri
atgaatgcactgaccgccgtaaaaacaaatgctgatagtgtcacccgcagcgacgccggatttaccttcgccccttccgtacagtcgccgcgtctgctggagctgacctttagcgcaaaaacgacggcgcaattcttgcagcaggtggaacagtggccggtacaggcgctggaatacaaatcctttttacgttttaaggtcggtcagatcctcgacgccttatgtggcaaccagctacagccgctgcttattaaaacgctgctggatcgcgccgaaggcgcactgctgatcaacgctgaagggatcgacaacgtagaacaggctgacgagatggtcaagctggcgacggcggtggcgcaccttatcgggcgttctaattacgatgcgatgagcggccagtactacgcgcgctttgtggtgaagaacgtcgataattcagatagctacctgcgacaaccgcaccgcgtgatggagctgcataacgacggcacctacgttgaggaagttaccgactacgtgctgatgatgaaaatcgacgaacaaaatatggcgggcggaaattcactgttgctacacctcgatgactgggagcatctggagcgctttttcagccacccgctggcacgtcgctccatgcgttttgccgcgccgccgagcaaaaacgtcagccacgatgtttatcatccggtatttgacgttgaccagcaggggcgcccggtcatgcgctatatcgaccagttcgtccagccaaaagattttgaagagggcgtctggctcagcgatctctccgatgcactggaaaccagcaaaaacatcctctctgttccggtgccggtcggtaaattcctgttgattaacaacctgttctggctgcacgggcgcgaccgttttacgccacacccggatctgcgccgtgaactgatgcgccagcgcggttatttcgcttattccacccattgctaccagactcatcaataa

SEQ ID NO: 74498 - DNA, 1446 bp, Citrobacter koseri
atgagtaccggactggcatcgctcatcaggcatgtggcgttgacgctgcttgtggttctgatcgtttttcttggcgtgcgggtttaccagacagaaagcgggcccgatcttcatctctggcatacctggaccggtagcgaaatgtctgccaacgcgctggataaggccactttttcgcagtacctggcacgggaagaggcgctgtttagccatctgaaaaccggggtgacggataagctgaagccggatgagcagacgcccatcaaccgtttttaccataacagccgggtctggccgccgcagttttcgcctaacggcaatcgctcgtacgtactcatgccgcaggggaaaccgcgtggtgtcgctgtgttactgcatggcttaacggattcgccctacagcatgaaatacgttgctaaggattatcagcagcgtggctttatcgccgttgtgccgcgtctgcctgggcacggcactgcgcccggcgcgttaacggcggtggagtgggaacagtggcttgccgcctcgcggctggcggttcgggaagcgacgcggcttgcggggcgagatgtgccgttgcatctggtgggctactcaaacggtggggcgctggcgctcaagtacacgctggacgcgctggaagacaacacgttgcggcgtcctcagcagcttatcctgctgtcgccgatgatcggcgtgacggcattcgcccgttttgccggactggcgggtttgcctgcgctctttccagcgtttgccaaagcggcgtggttgaacgtcacgccagaatataatccgttcaaatataactcgtttccggttaacgccgcgcgtcagtcttatctgctgacaaaagcattacaacagcagatttcgcgggatgcgcgaagctcccgccttaacgaattgccgccggtgttgaccttccagtcaattatggattccacggtgagcacccgtgcagtggtggattcgttttatcgttatcttggcaataacggcagtgagctggtgttgttcgatatcaatcaggccgccagtctgcgtccgttgttgcgcacctcatcgtataccgccattactcagttgttaccgcctgcgccgcgcaactatcgcacgacaattatcacgaatgcgacgccggaaacgctgaacgtcgtggcgcgcgataccccggccggggagcatgtggagcaggttcagccgttaccgttggcctggccgcaggagatgtattcgctgtcgcatgtggcggtgccgtttccgctcagtgattcgctgtatggtctgcaaccggacgaactgaaccgctatggaatcagtatcgggactatcgcgctgcgcggggaaacgtccacgctggcggtggggctggatacgctgatgcgcgtgacgtcgaatcctttcttcccgtatatgctacagcggattgaggcgcgacagtga

SEQ ID NO: 74499 - DNA, 264 bp, Citrobacter koseri
atggtagcgctcggcatactgggctacattctgcgcaaaatgcacttccccatgtcgccgctgatcctcggctttgtgctgggcgaaatgctggagcagaacctgcgccgcgcgctctctatcagcaacggcaatatggcgattttatgggagagcggtgtgacgaaagcgctgctgacgatggcgatagcggtgattatcatcccgccgctgctgcgcctgctccgcaaacgcaacaataagccacaggtggatatcggctaa

SEQ ID NO: 74500 - DNA, 1425 bp, Citrobacter koseri
atggatacctggatatatctttctcagggttttgcggtggcaatgacgccagaaaacctggtgatcgcgctgatcggctgcttcgtcggcaccattgtcggcctgctgccgggtcttggcccgattaacggcgtggcgattttactgccgctggctttcgccctgcatctgcctgcggagtccgcgctgatcctgctggctacggtttatatcggctgtgaatacggcgggcgtatttcgtcgattctgctcaacgtgcccggcgatgcggcggcgatcatgaccgcgctcgacggttatccgatggcgcaacaggggcgcggcggcgtcgcgctttccatctcggcggtcagttcattttttggatcgcttatcgccatcggcgggatcatcctgttcgcgccgttgctggcgcaatggtcgctggcgtttggcccggcggaatactttgcgctgatggtctttgccatcgcctgcctcggcagcatgatggcgcaaaatccactgaaatcatttctggcagcgctgatcggtctgggtctggcgaccgtcggcgtagacgccaacaccggggtttatcgctttacttttgacagcgtacatctctccgacggtgtgcagttcatcgtggtggtgatcggtttgttctctgtctcagaaattctattaatgctggaacataccagcagcggccagaaactggtacgcaaaaccgggcgcatgttgtttaacgccaaagaaggggcgcagtgcgtgggcgcaacgttacgctcatcggtgattggcttcttcgtcggcgtgctgccgggcgcaggcgccaccatcgccagcgccatcacctacatgaccgagaagaagatcagcggcaacagcgacagcttcggtaaaggcgatatccgtggcgtggcggcaccggaagccgctaacaacgcgtcggcctgcggttcattcatccccatgctgaccctcggcgtaccgggttccggcaccacggcggtaatgatgggagcgctgacgctgtataacatcacgccaaggcctgcgatgttcaccgaacagccggatatcgtctgggggctgatcgccgcgctgctgatcgccaacgtgatgctgctggtcatgaacatcccgctgattggcatgttcacccgtatgctgaccatcccgctgtggttccttgtcccggcgattgccgccgtgtctgcggtcggcgtgtacgcggtacacagcaccacgttcgatctggtgctgatggtagcgctcggcatactgggctacattctgcgcaaaatgcacttccccatgtcgccgctgatcctcggctttgtgctgggcgaaatgctggagcagaacctgcggcgattgccgccgtgtctgcggtcggcgtgtacgcggtacacagcaccacgttcgatctggtgctga

SEQ ID NO: 74501 - DNA, 432 bp, Citrobacter koseri
atgagcgatcgtatttttgcaggtatctggctgttgctctgcgttgccgggctgttcatcgcctggcagattcagagtgaatacagctacgaaccggtcggccctcgcccgtttccgctgggcattatcggtctgatggcgctctgcgcgctggcgctgttattgcgtcatcccgataccgttagctggcctcaccaccatgtgctgcaaaagctgctcacgatggtgattgtcctgctgatgtacgcctggggatttgagtggctgggcttcccgattgccaccgccattctcaccctggtcatcggcattctgttcggcgcaacaatcccggctgcgggcatttccggcgcggttctcggcatcctgctgtggtatgccttcgaccgtctgcttgacgtcaccttacctctcggcgcctggctgagttaa

SEQ ID NO: 74502 - DNA, 978 bp, Citrobacter koseri
atgaaaaaacaattacttcgtgcccttactgccagcgttttactgatgagcaccgctgtactggcgcaggacgcgccgtcgcgtactgaatgtatcgccccggccaaacccggcggcgggtttgacctcacctgtaagctgattcaggtgagcatgatggaaaccggcgctatcgaaaaaccgatgcgcgtcacctacatgccgggcggcgtcggcgcagtcgcctataacgctatcgtcgcccagcgtcctggcgaaccggggacggtcgtcgccttctccggcggctcgctgcttaatctgtcgcaggggaaatttggtcgttacggcgtggatgacgtgcgctggctggcgagcgccggtactgattacggcatgatcgccgtgcgcgccgactccccgtggaagtcgctaaaagatctactcgccgcgatggagaaaaatcctgacagcgtggtgattggcgctggcgcatcgattggcagccaggactggatgaagtcggcgctgctggcgcaaaaagccaatgtcgatccgcacaagatgcgctacgtggcgtttgaaggcggcggcgagccagtcactgcgctgatgggcaaccatgtgcaggtggtttccggcgatctcagtgaaatggtgccttacctgagcggcgataaaattcgcgtgctggcggtattttctgaagaacgcctgccgggtcagttagccaacgtcccgaccgccaaagagcaaggatacgacctggtctggccgatcattcgcggcttctacgtggggccaaaagtcagcgatgccgactaccagtggtgggtagagaccttccaaaagctccagcagaccgacgagtttaaaaagcagcgtgagctgcgcggcctgtttgcattcgacatgaccggcaagcagcttgacgactacgtcaaaaagcaggtcgccgattaccgcgagcaggcgaaagccttcggcctcgcgaaataa

SEQ ID NO: 74503 - DNA, 675 bp, Citrobacter koseri
atgcgtctcttattagcggaagataaccgtgaactggctcactggctggaaaaagcgctggtgcagaacggttttgccgtggactgcgtattcgatggccaggcggccgatcatcttctgcacactgagacctatgcgctggcggtgctcgacatcaacatgccggggctggacggactggaagtggtgcagcgcctgcgcaagcgtggacaaacgctgccggtgctgctgctgacggcgcgcagcgcggtggcggatcgggtgaaagggctgaatgtcggagcggatgactatctgccaaaaccgtttgaaattgaagaacttgatgcgcggctgcgggcattactgcggcgcagcgcgggtcaggtgcaggagttgcagcagcttggcgatctggcgtttcacgatgaaggttactttttgcttcaggcgcagccgctggcgctgaccccgcgtgagcaggcgttgctgacggtattgatgtaccgcagaacgcgaccggtgtcgcgccagcagctgtttgaacaggtcttcagcctgagcgatgaggtcagcccggagagcatcgaactctatatccatcgtctgcggaaaaaattgcagggcagtaacgtgcggatcaccaccctgcgtgggctgggttacgtgctggagtgcggcgatgaggtgggctaa

SEQ ID NO: 74504 - DNA, 1413 bp, Citrobacter koseri
atgaggtgggctaaaccccagtcgctgtacctgcaactgttgctgttcctcggattgccgctggtgctgctgtggggattgtcggcatttaacagctacgttagcgcgctacaggccgcgacgcaggcctacgacaggacgctgctctcttctgcgagaacggtggcggaacggctggtggtgcgccacgacaaactggaggtgaatgttccctgggtggtgctcgacagctttgaactcaacatgaacgatcgtctctattacaaagtcgtggacccgggcggcaaggtgatctccggttatgacgatctgcccgcgatgccgccttccacctcgcgaacccggctctacccggcgctggcgtggttttatcacacccagtatcgcggacaggctatccgcgtggcgcgtctgctccagccggtaaatgaaggggcgatattcgggatggcggagatctacgttgccgagacgctacagtcccggcgctatctggccgggcaactgctgttctcctcatgggtgtcgcaagggctgctggtgctgctgacattgattctcgttggctggctgctgcgacgcattctgaagccgatgcgccagctctcctcgctgatggtgcgtcgtgaaccgggcctgctgacgcccttgccggaactgctgccctggtcagagacccggctgctgatcgtcgcctttaaccgctacattgatcgcctgcgcgcgctgatctcccgtcaggaacgctttagcgccgatgcgtcccatcagttaaaaacgccgctggccgtgttgaaaacgcaggcggcggtggcgttagccagtcaacagccgcagcagtggcacgaaagtttacgggcgatgagcgcgacgctggatagcacgattttgctgacggagcggctgttgcaactgtcggcggtgaaacgtaaagagcagggggagcgacagttcttgccggttaatctgtatgaggtggtgcagatgagctgttttagccgtctggcgcaggcgcgcagcaaggctatcgatctggggtatgaaggtgagcaagaggcggtgtggattgaaggggatgacgttttgctcggcgagctgtgcgcgaatttgctggataatgcgctgaaatatacgccgtcgcagggaacggtaacggcacggctattgcgggatggcgaggctgttgtgctggtggtggaagacaatgggccagggattgacgctgagcagatcccgcaggcgctgatgccgtttcatcggcttgctaacgtggggaatgagagcggggcggggatcggtctggcgctggttaacgacattgcccgcctgcaccgtacccatccacagctgtcgcgcagtgaaacgctgggcggtctgcgtgtgcgggtacggtttttaacgacggcgcagtaa

SEQ ID NO: 74505 - DNA, 357 bp, Citrobacter koseri
atgaaaaaaacaatgatcgccttatctgcacttctgctggcttcccctgtttttgctgcgaccacacacgcgaccgataacgacgttgcagccgctcatgaaagcgcaaataccgccaaagagaaactgcacaaggcgcagaatcagggtgaagaactgaaactgaaatctgaacatgccgctgaaggtaaaagcgacaacctgagcagtaaagtgagcgaaggctcgcagaaggcctggaataagaccaaagaaggcaccgaaaaaggctggaatgccacgaaagaaggtgctgagaaaggctggaacaaaaccaaagaaggcgcagcagaacttgagaaaaaagtcagcgaataa

SEQ ID NO: 74506 - DNA, 1302 bp, Citrobacter koseri
atgcttattgaattttcagtgcagaattttaaagtttttagccaaaaacaaactttatcgatggctgctaaaaaatcttataaagagcatccagagacgacggcaacagctgagcattttgatgatctgttgattaataaggtcgcagtaatttatggtgctaacggcgcgggcaaaagtagttttgttgaagctttagattttctgcaatcctacatccttagaggatttgctgatagttcacagaatgattcaataagaacgcggtttatcgacagagaaatacctaaatttatttttgatgaggaacagttaaccgcgcctactgattttgagatcagttttatcggcacgaccggtgaacggtatcagtatacgttatctatcggtacagacgcgatagaagctgaaggtttatgggtttactcaaaaaaaggggtaagaccaaagacgattatctccagagtatataatgctgaaaccaatgagttcgaatactactgcccatcgttgcagatagataaaaaaacgtatgaagtggcgatagaaaaagccaataacagcaaacgctcgccattcgtatccattctgcatgcttatgatgtctcacaactggatgagtttattaactggttcagaggcgatttaattgtatccagtaatcgcaatgatgatgttttccgaatggcatccagatactcttttttagacgatctggctgatggcgatgaacagaaaaaaaataaaatacttgagtttttaaacaagtttgatctttctatttctgatatttcggtaacgaaaaagaatgtgacgttacctgatgagatgccagaagaaatgaaaaaaatgatattgagcgatgtcggttttcaaattgttttagaacatacgacgtccagcggtatcaagaaaaacatcccttatgaaagattatcttcgggaacgaagaagttattcgatctatcaggcattcttttactgtgctgtgaggccggtgaaaaaagcgtactggttcttgatgagtttgagtcatcgctccacccttatatcgtcagagcgatttttgagttaatggtcaaacactctgaacgtcttttgcagctgattctcacaacgcattcaaacgttctattagatacggaaaaactcgtcagacgggatcaaatatggttcctggagaaaaatagcgagcttgaaaccgtgctttatccactgagcgattttgcccccaggtttgaggactctattataaaaggctgggatttgggtaaatttggtggcgttccttttttggggtga

SEQ ID NO: 74507 - DNA, 687 bp, Citrobacter koseri
atgaaagagttaatttctccttctgcattgaaaaaacgaggcagcggtaaagttaaatctgagcgcaagaaaaccctgatcgtttgcgaaggtacggagaccgaaccaacctattttaaggatatggttaaagaccttaaaatagcgaatacagacgtttatattgaacctgggcgccattcaaacccaagtagcgttgtacgcaccgccattgatctttatgagcaggatcttgaatttgagctgatttattgcctaattgatacggatgagtttgggaaagatattgacctggcatccagtatgttaaaagaacatactttttcacggcgtaaaaagtcccttggtggcgaccggtatcctcaggcgaagatcctgcgttctgatccctgcatcgaggtctggtttttactccattatgaagtgttaagacggccatttgttaaagcaaataaaagcgcggcacagaactgcaaggaataccttaaaaatacgcatttgaaagattatagcgaaaagtataatggactctatagcctaataaagcaaaatggtcttaaggcgtgtgaggaaagcgccaggctcagagcatggcttgagaagaacgattgtatcaatccgtttacgcagattgatgagttatatctggatttacatgaaaaagttttcgcgccagcgaaaagataa

SEQ ID NO: 74508 - DNA, 930 bp, Citrobacter koseri
atgttaacaggctacatcgtcaggctggatgtatcgctaacatttaaaatgtacggttttgcgtttagaatcagaaaactaagtatgggggataacatgacgacagcatccagtctgagcgagctacagcagcaaattcgcgaccgttacgatagtctcagtaaacgattgcagcaggtgtcccgctatgtgctggataacactaacagcgtagcgttcgataccgtcgccgtcatcgccgagcgggcggacgtgccgccatcgacacttatccgtttcgccaacgcgtttgacttcaccggtttcaacgaaatgaaacaactgtttcgtatgaacctggtggaagaaacggccagctacagcgatcgcgcgcggctgttcagagagatggagagcgaatccgtaccggaaacgccgttagacatcctgcaagaatttgcccgttcgaatgctcaggcgctgcaacagctggcgtcgcgtaccgatcccgacatgctgcaacgcgccgttcaattactggcggaggccgatacgatttatatcgctggcctgcggcgctcttttagcgtggccgcctatctgacttacgcgctcagccaccttgaatgccgcccaatactgcttgatggcatgggggggatgctgcgagagcaaatcagccgaatcaagagtcgcgatatcgttatctccatcagcttttccccttacgcagaagaaacggtcatggtcagcgaaaccgcagccagcgtcggcgcaaagcaaattgtcattaccgacagtcagataagcccactggcgaccttcagcgatctctgctttgtagtcaaagaagcgcaggtagacgcttttcgctcacagtccgcaacgctttgtctggtgcagtcattggttgtcgctctggcttacaggcagggaaacagtcataaataa

SEQ ID NO: 74509 - DNA, 1506 bp, Citrobacter koseri
atggagacggtagcgaattttattcacggcgaatgtgttacgggctcaggccagcgcattcaggcgatcttcaaccccgccacgggcgagcaaattcgtcaggtggtgatgagcacggcgcaggaaacggagcgagccattgccgctgcgcagcaggcgtttgccgcctggtcaaggcagtcgccgctgaaacgcgcgcgagtgctgtttcgttttaaagcgctgctggagcagaacatggattcgctcgcccggctggtcagtgaagaacatggcaaagtgtattctgatgcggtgggcgaactgacgcgcggtctggaagtggtcgagtttgcctgcggcattccacacctgcaaaaaggcgaacattcggcgaatgtcggcaccggcgttgacagccattcactgatgcagcctctgggcgtgtgcgccgggatcaccccgttcaacttcccggcgatggtgccaatgtggatgttccccatcgcactggctaccggcaatacctttgtgcttaagccgtcggaaaaagatccctcgctgccgcttgcgctggcaaaactgctgaaagaggccggtctgccggatggcgtttttaacgtcgtgcagggcgataaagaagcggtggatgttctgctgaccgatccgcgcgttcaggccgtcagctttgtcggctcgacgccgattgcagaatatatttatcagacggcgtcggcgcacggcaaacgctgtcaggcgttgggcggggcgaaaaaccactgcattctgatgccagacgcagacatgaatatggcgaccaatgcgattatgggcgcggcgtatggtgcggcgggcgagcgctgtatggcgctctccgtggtgctggcggtgggggataacacggcggacgaactttgcgcgcggctggaaacgcagatcgccgcgttacgcgttgggccggggcttgatcaaacgccggaaaatgagatgggcccgctgatctccgccgcacatcgcagtaaagtgctgggctatatcgacagcggcgaggcgcagggcgcgcggctgcgggtggatggccgcggctttagcgtgaagcgccacgagcagggctttttcgtcgggccgaccttgtttgataacgtcacgcctgagatgacgatttacaaagaagagatctttggcccggtactctccgtggtgcgggtgaaggattacgccagcgcggtggatctgattaatcgccacgaatatggcaacgggacggcgatctttacccgcgacggcggctgcgcgcgtcgtttctgtgaagaggtgcaggccgggatggttggcgttaacgtgccgattccggtgccgatggcgttccacagtttcggcggctggaaacggtctatttttggtccgcttaacgttcatggtaatgacggcgtgcgtttttatacccgcatgaaaaccgttaccgcccgctggccggagatgcagcaggatagcggcgccgcgttctccatgccaacgctgggctga

SEQ ID NO: 74510 - DNA, 1926 bp, Citrobacter koseri
atgacaaccgtacgtatgaccatggcgcaggcgctggtcaagtttctcaaccaacagtacgtcgatgtagacgggcaggagatgccgttcatcgaaggcgtggcgaccatcttcggccacggcaacgtactcggcatcgggcaggcgctggagcaggacgccgggcatttgcgggtgcatcagggctgtaatgaacagggaatggcgcacatggcgacagggttcgcgaaacagcaccgtcgccagcgtatttacgccgtcacctcttcggtagggccaggcgcggccaatatggtgacagcggcggccacggcgacggcgaaccgtattccgctgctgctgttgccgggcgatatctacgccagccgccagccggacccggtattacagcaaatcgagcagtaccacgatctcagtatcagcaccaacgactgctttcgcccggtttcgcgctactgggatcgtatcaaccgcccggaacagttgatgagcgcgatgcttaacgctatgcgcaccctgaccgatccggctgataccggcgcggtgacgatctgtttaccgcaggatgtgcagggcgaagcctgggattacccgcagagtttctttgtccgtcgcgttcaccatattgaaagacgaccgccggacccacaccggctggcgcaggcgcgggcgctgattgcccgtaaacgccgcccgctggtggtttgcggcggcggggtgcgttattccggcgcgcacgacgcgtttcgtcagtttgtggaaaacctgcacctgccgtttgcggaaacccaggccgggaaaggcgcgctggtcagcgaccatccgctgaatctgggcggtattggcgttaccggcgggctggcggcaaaccagcttgcgccgcaggccgatctggttatcggcgtcggcacgcgtctgaccgatttcactaccggttcgaaagcgctgtttgcacgcccggacgtagaatttctcctgctgaatgtcgccgagttcgacgccctcaaactggacgccacggcgctggtggccgatgcccgcgccggtctgacggcgctgacggaagggcttcagggttatcgcagcggctggggagacgaggtggcgcaggcgaaatcggcctgggacgaggagtgccgcaggctgtggtctcgccagtggcgcccggatgacgcgccggaaattgccgggcaccttgatgcgcagctggcggaatacagtgaagcgctgaacacgcggctgactcagactcgcgttctggggattatcaaccagtacattgaggatgacgccattgtggtcggcgcagcgggatcgttgccgggcgatttgcagcgtctctggcaggtgaaaacgcccgacagctaccacctggagtacggctattcctgtatggggtatgaaattgcggccgcgcttggggcgaaactcgcgaagccgcagcagccggtctatgcgatggtgggcgacggttcgtacatgatgctgcattccgagctgcaaacggcggtgcaggaggggataaaaatcaccatcctgctgtttgataacggcgggtttggctgcatcaataacctgcaaatggggcatgggatgggcagttttggcaccgagaatcgcgcccgtcaaccacaatccggtctgctggacggcccgctggtggcggttgatttcgcccaaaatgcgcaaagctacggctgccgggcgtggcgggtgcatgatgagcagagcctgctgacggcgctggaggcggcgcgcgcgcatccggggccgacgctgctggatattaaagtgctgccaaaaacgatgactcacgattacgcctcatggtggcgcaccggcgatgcgcaggtggccgattcaccgtcggtgcgaaaagccgccgagcagacgttcgatcaggtgaaaaaggcgcgtcagtattga

SEQ ID NO: 74511 - DNA, 987 bp, Citrobacter koseri
atgtttaacattgctttactgggagctggccgaattggtcaggtacatgccgctaacatcgcaacccacaaagagactaccctgtggtctgtcgttgatccgaacgagacctttgcctcccgcctggctacgcaatatcaggcccgtcagcaaagtcttgatgaggcgatgaccgatcctgatgttcatgccgtgctgattgcctccgccacggatacccacgccgatttgattgaactggccgcccgccacggcaaagccattttctgtgaaaagcccgtacatcttgatcttgcccgcgtgcgcgactgcctgaaagtggtcaaagagttcgacgtgccgctgtttatcggctttaaccgtcgtttcgacccacagttccgccgcgttaaaaccgaagcgcagagcgggcgcatcggcaagccggaatcattgctgattatctcccgcgatccttctccgccgcctgcggaatatgtgcgcgtctccggcgggatgttccgcgatatgaccatccacgatttcgatatggcgcgtttcatcatgggggaagagcctgtttcggtctacgcccagggaagcaatctggtcgatccggcaattggcgcggcaggcgatatcgacaccgcgtttatcgtgctcaagtatgcctccggcgcgctggcgaccatcgttaacagccgtcgctcgtcttatggctatgaccagcgtctggagctgcacggttccgaaggtctgcttacggcgggcaatattctcgaaaaccaggtgcagcactttggccagaacggctgcaccagcgcgctgcctgagcatttcttcctgcaacgttatcaggctgcctatgccgccgagtgggagcactttgtcgccatcttacgcggcgaggcagtgccggagtgcagcggtgatgacggcgagcgtgcgctgtatctggctgataaagcgctggagtcattgcacagccagcgtgaagttctcctctga

SEQ ID NO: 74512 - DNA, 930 bp, Citrobacter koseri
atgaaaaagctgattttagccgccttcatcgccatgacagccggggcggcaatggccgagaacgaacaaattgttttcagcacgccgaatctggcaatgccgtttgaagttcacatgcagcgcacggcggtgaaagccgcgaaagagatgggcgtcagcctacaggttctggacgggcagggaagttcgccgaagcaggttgccgatctggaaaacgccatcacccgtggcgcccagggattcatcgtctccccgaatgatgtcaacgcagtttccagcgcggtggatgagattcaggacgctaagctgccggtggtgacgctcgatcgctccgtcgatagccagaagcaggttccgcattttggcgcgaacaactacaagggcggccaggccattggcgactttgtcaaaagcaaatttcctgacggcgcggacattgtgctgctgaccggccagccgggttcttcttccaatattgaacgcaccaaaggcattcgcgacagcctgaaggcggggggcgatacgtaccgcattgttgctgaccagaccggtaactggatgcgttcggaaggaatgcgcattgttgaaagcgtgctgccgtcgttgaaaaaacgtccgcaggtcatcctctccgccaacgatgatatggcgctgggcgcgattgaagcgttgcaggggcagggggtgaaaccgggcgaaattctggtgacaggatttgacgcggtgccggaagcgctggcgcgggtacgcgacggctggatggcggcgacggcggatcagcgtccgggtttcgcggtacagacagcgatgagccagctggttgcgaacgtgcgtgagcagaaagccatcaccggtgcggattatccgccgacgttaatcaccaaagagaacctgcaacaggccgagcgtatcggcgaagccggtaactga

SEQ ID NO: 74513 - DNA, 1548 bp, Citrobacter koseri
atgttgcaacccttactgaacgttaccgatctggcaaagagcttttccggcgtctgggcgttgagcaacgtacaactgaccgtcgggacgggggagattcatgcgctgcttggcgagaacggcgcggggaagtccacgctgctgaaagcgctggcaggggcgcagccgcagacccgtggggacatctggttcaatggcgaaacgctgccggtggaggactcgccggttgagcggcaaaacaaaggcatcattaccatctatcaggaatttaatctgctgcccaacatgaccgttgcggaaaatatgtttctcggacgcgagccgcgtaaacgtaatgtgattgtcgatgcgaaggccgtgaaccaggaggcgcaggtggtgctggactatctgcaactgaatgtcgcgccgaccacgccggttgcccgcctgagcgtggcgcagcagcaaatggtggagatcgcccgcgcgctgaccctgaacgcgaagctcatcattatggatgaaccttccgccgcgctgagcgacagcgaagtggaaagcctgcaccgcgtcgtgcgggaacttaaaggtcggggcgtgagcattatttatgtcacccatcgcctgcatgaagttttccagctctgcgatcgctttaccgtgtttcaggatggccgctttaccggcagcggcgcggtcgcggaaaccaacgtggagcagctgatccgcctgatggtgggacgagacgtggcctttaatcgtcgcccccccagcgaaacccatcatgaagacaaaccgattcgccttgcggtgaaagggctgtgtcgcgaaaagccgccgctggacccgcacggcattgcgctacacgacatcagctttcacgttcacgccggggaggtgctggggattgcggggctggtcggcgccgggcgtaccgaagtggcgcgctgtctttttggcgctgacggctttacttccgggacgttcgcgctggacggcgcggcgtatcacccccgtgacccgatgtacgcgctggatcagggcgtggcgctggtgccggaagatcgcaaaaaagagggggcggtgctgggactgtctattcgcgacaacctgtcgctctccagtctctcttcgctgctgcgctggcgctttttcgtcaacacccgcaaagaagatgacctgatcgaatcttaccgccaggcgctgcaaatcaagatggtcaatagcgagcaggaggtgcgcaagctctccggcggcaatcagcagaaagtgatcctcgcgcgctgtatggcgctcaatccacgggtgctgattgttgatgaaccgacgcgcggcatcgatgtgggcaccaaatccgaggtgcaccaggtgctgtttgatatggcgaaacagggcgtggcggtgattgtgatctcttccgatctgcccgaagtgatggcggtttccgaccggatcatcaccttaagcgaaggccgggtaaccggtgaaatccacggcgatgacgccaccgaagagcggctcatgatgatgatggccatcaaccataacgccctgaacgcggcataa

SEQ ID NO: 74514 - DNA, 1029 bp, Citrobacter koseri
atgacgcagatagtgaccaaaacgcaaccccctgccaaacgtagcggacgtatcgatccgatcgcttttttcgagcgctttggggtactgatttttatgttcctgctgctgatttttttccagacgcagaacagtaacttcctgtcagaacgcaatattttcaacatcctgaccgaggtgtcgatctacgggatcatggccgtggggatgacgttcgtcatcctgacggccggaatcgatctgtctgtcggctccattctggcggtatgcgccatgacggcagcatacgtgattaaaggcgacaactttaccacggtagacccgagcgcctggggcgggatgagctggctgattggcctcggcatctgcctggcgatggggacggcgattggcttcctgcatggcctgggcgtgacccgcctgcgcctgccgccgttcattgtcacccttggcgggatgaccatctggcgcggcctgacgctggtgattaacgacggcgcgcccattgccggttttgaccagggctaccgctggtgggggcgtggcgaactgctcggtatctccatcccgatctggatttttgcgctggtggcgatcggcggttatctggcgttgcacaaaacgcgctggggccgtttcgtctacgccattggcggcaacccggaggcggcgcgtcttgccggggtcaacgtcaaacgtgtgctggtcagcgtgtatgtcgtgattggctgtctggccgggctggcggggtttgtgctgagcgcccgtctgggcagcgcggaggcggtggccgggatctcctttgagctgcgcgttatcgcctcggtggtcattggcgggacatcgctgatgggcggctatggtcgcatcggcggcaccgttatcggctcgatcattatgggcattctgataaacggtctggtgctgatgaacgtctccgcctactaccaacaaattattaccgggctgattattgtgctggcggtggcgtttgatacctatgccaagagccgtcgtggcgcgctgtga

SEQ ID NO: 74515 - DNA, 1134 bp, Citrobacter koseri
atgaaacaagtgcgaattggattgattgggacgggatacatcggcaaggcgcacgccattgcctatgcccaggcgccgacggtgttcaacctgcaaggccaactggtgcgcgaaatggtggcggaagtgacgccggagctggcgacggaacgggcgcaggcattcgggtttcgccgttcgaccggcgactggcgcgaactggtggcagacccgaatatcgatgtggtggatatctgttcgcccaaccatctgcataaagagatggcgctggcggccattcgccacggtaagcacgtctattcggaaaagccgctggcgctgaacgctcacgatgcccgcgaaatggttgaggccgcaaaacaggccggggtgaaaacgctggtgggttttaactatatgaagaacccgacggcggcgctggcgaaagagatcattgcgcgaggggagataggcgacgtgatccacttctacggcacccacaacgaggactatatggccgacccgctttcccccattcactggcactgctttaaggagacggcggggttaggggcgctgggcgatctggcggcgcatatcgtcaatatggcgcactacctggtcggcgatattcgcgaggtctgcggcgacctgaaaattgtggtgccggagcgcccggccagcgcgggatcggcgcagaaggtggtcgtggaaaacgaagatcaggcgcacgcgatggtgcgattcgccagcggcgcgcagggggtgatcgaaacctcccgcgtggcctgcgggcgcaaaatggggctgtcatacgtgattaccggcaccaaaggcgccatcagttttacccaggagcgaatggccgagctgaagctctatctgcatgacgatccggttaaccgccagggatttcgcaccctgctggtggggcccgcgcacccggactatgccgcgttttgcatgggggcggggcacggcatcggctttaacgatcagaaaacggtggaaatccgcgacctggtgaacggcgttgccgccgatgcgccgatgtggccggattttgaagagggctggaaagtgtcgcgcgtgctggacgccatcgcgctctcgcatcaggaaggccgctggctgaatgtgaacgatattgtctga

SEQ ID NO: 74516 - DNA, 1905 bp, Citrobacter koseri
gtggaaaagcagtttgatgtgatatgcatgggccgcgtggcggttgacctctacagccagcagattggcgcacggctggaggatgtctcaagttttgccaaatacctcggcggttcctcagggaatgtcgcctacggcgccgcgcgtcaggggctgcgttcgtcgatgctggcaagagtgggcgacgaacatatggggcgctttttgcgcgaagagcttaaccatgttggctgcgataccagccatctgataacggataaagaacgcctgacggcgttggtgctactcggcattaaagaccgggacacctttccactgattttttatcgcgataactgcgcggatatggcgattaccgccagcgatgttgacgagcagtacatcgcttcatcccgctgcctcgccatcaccgggacccatctttctcatccgcaaacccgcgacgcggtgctgacggcgctgacctgtgcccgccgtcacggcgtgcgcacggtactggatatcgactatcgtccggtgctgtgggggctgacctcgctgggcgacggcgaaacgcgctttattgccgcagagcaggtcactcgccagttgcaggcggtgttgcacctgtttgatgtgatcgtcggcaccgaggaggagtttcatattgcgggcggcgctaccgataccgtgcaggcgctggcgcaggtgcgtgaggtaagcgcggcgacgctggtttgtaaacgcggcgcgctgggctgctcggtgtataccgacgcgattccgccgtcgctggatgacgggctgacggtgactggcgtgcgcgtcgaggtgctcaatgtgctcggcgcgggtgatgcgtttatgtcggggctgctgcgcggttatctcaatgatgaaggctgggagcaggcctgccgctacgccaacgcctgcggcgcgctggtggtttcgcgccacggttgcgcgcccgcgatgccgagtaaggtggagctggatgactacctctcccgcgagcatcaggtgccgcgcccggatcttgatccacggcttaatcatctgcaccgcgtcacgacgcgtcggcgtaactggccggaactgtgcgtgatggcgtttgatcaccgcagtcagcttgaagagatggcgctacagtgcggcgcctccctgaagcgcattccggcgctgaaaacgctgatcctacaggccagtcgcgatgcggcgaacagcgcggggctggaaggaaaagccggtctgctgtgcgacggaacgtttggccaggacgcgctgaatgcgataaccggcgaagggtggtggattggccgcccgattgagcttcccggctcacggccgctggagatggagcacggcaacattggcactcagcttatcagttggccgcaggaacatgtggtgaagtgcctggtctttttccacccggaagatgcccacggcctgcgcctggagcaggagcagaaaatcgccgaggtgtatcacgcctgctgtcagtcggggcatgagctgctgctggaagtgattttacctgtgggtatgccgcgcagcgatgagctttacctgcgggctatctcccgcttctacaacctgggcatttaccccgactggtggaaactgccgccgctctcctctgacggctggacggcgctgagtgacattatcgaacgccgcgacccgcactgccgtggcgtggtgattcttgggctggatgcgccagccgaacagttacgcgcagggttcagagccgctgccggacatgagctggtgaaagggtttgcggtggggcgcacgctgtttggcgaggcttcccgcgcatggctgaaacatgacattgacgatgcgcaactggtgacgcgcattcgggataactatctgcaactgatcgcctggtggcgcgagcgcgggcaggcataa

SEQ ID NO: 74517 - DNA, 891 bp, Citrobacter koseri
atggctgtgcaattaggcattaatccgctgacatggaccaatgatgatttgccctctcttggcgcggaaacgccgctggatacctgtctgagcgaaggtaaagaggctggttttgcgggctttgaactcggtaataaattcccacgcgaggcgcgtctgctggggccaatcctgcaacgccacgatctgaagctggtgtcggggtggtattccggtcgcctgctggagcggagtgtagaagaagagattgcggcggcgcaggcgcatttgacgttattgcgcgagctgggggcgaaagtgatggttttcgctgaggtgagccattgcattcacggcgaacagcagacgccggttcacctgcgtccgcgattcccgcaggcgcgctgggcggagtatggcgagaagctcaccgcgttcgcccgctatacacagcagcagggagtgcagattgcttatcatcaccatatggggacggtgattgagtccgcagaagatgtggataatctgatgacccataccggcgatgaggttggattgctgctggataccggtcatttgaccttcgctggcgccgacccgctggcggtggcgcaacgctgggcgagccgtattaatcatgtgcactgtaaagacgtgcgcgccgacgtgctggcggatgtgaaaaaccgtaaaaccagctttctggatgcggtgctcagcggcgtctttaccgtgccgggcgacggctgcgtggattacccgccgattatgcgactgctgaaagcgcacgattatcagggctggctggtggtggaggcggagcaggatccggcgattgcccatccgctgacttacgcgcggctgggatataacaacctgagccgcctggcgcgggatgccggtcttatctga

SEQ ID NO: 74518 - DNA, 816 bp, Citrobacter koseri
atgtcacgtttactgtcacgctggcaacagcctgacgcgcagggacgtacccagtccgtcaccccggagcgggcaggctggggctatgtcggttttgacgcgtttgagcttgaagaagggcagcagttgcatcttcccgccgttgctgaagagcgctgtctggtgctggtggcggggagggcgtctgtcaccacgccaaccgcgcagttttcagagattggcgagcggatgagcccgttcgagcgtattaagccgtgggcggtatacgttacgcccggagaaacggtacaggtacaggcgttaacgaagctggagctggcggtatgcgccgcaccgggcaaggggacgtatcccacccgcctgattgcgccgcaggatatcgacggcgaggcaaggggcaaggggcataaccagcgctatgtacacaacattctgccggaagataaacccgccgatagtctgctggtggtggaagtgtggactcacgaaggctgtagcagttcgtacccgagccacaagcacgacactgataatccgccttacgagacccttcttgaggagacgtattaccatcgcctcaacccggaacagggattttgtatgcagcgggtatacaccgacgatcgctcgctcgatgagtgtatggcggtctacaaccgtgacgtcgtgatggtgccgaaaggctatcacccggtggcgacaatggccgggtatgacagttattacctgaatgtgatggcaggcccggtgcgcaaatggattttcacctgggaagacgatcacgcgtggattaaccgcgattaccctgcgcgttga

SEQ ID NO: 74519 - DNA, 1542 bp, Citrobacter koseri
atgaaaaacaacacagctgtcacgcaaaaagaatatttgcttaacaataaaacaacgttattatcaaccacagataaagacagtcatattacctatgctaactctgcatttatcgacgccagcggatttaatgaaacgcagttaatgggtaaaccacataatattattcgccacccggacatgccctctgccgctttcgctgacatgtggcacacgatactgcaaggcgatagctggaccgggctggtcaaaaaccggcgacaaaacggcgatcattactgggtacgcgcaaatgttacccctgtctggcaaaatgaaaaattaacggggtatatttcagtacgcaccgtgccttcccgggatgaagtttcgcacagcgaacagctttatcagaaaataaacaataatggaattaaagggtttcgactttttaaaggcataattatccgtcgcggagcgctgtcctggctttcgatgtttaaatggctgtcggttagccaacgcgtcaattatgctttagccatcaccagtctgacagccctgttatttattttcttacctattcctcctgctattcaggggggcagcatcatcgtgttatttttgctcctggctatttaccttaaggttcaaatttgtcagccggttaatacgctgctggtgcagatgcaaaaagtggtttcgggccgtaaacccgataattgccatttgcagcgcgtggacgaaatagggatgctcatgagactggtgaatcaatcggggcttaatctgcgctccctggttgatgatgtcagcacgcaaatatccggtattcaggctatcagtcagcgcgtgtctcaggaaggcacggcattgcagagccgctcagaagagacatctgccgacctgcaacaaaccgccgcagccattgaagagatcggtagcgctgtgcaacaaaccgcagataccgcggcccagacaatgacgatggccgacagtaccagcgccaatgcgactgaaggcggccatatcatgaagcaaaccatcaccatgatgcaggctatctcgcgcgataacagtcaaatcgtggacattatcggcgtcattgacagtattgcttttcagaccaacatcctggcgctgaatgcagcggtcgaagcggcccgcgccggtgaatccgggcgcggatttgcggtcgttgccgcagaggtgcgtaacctcgcccagcattctgcgtctgcggcaaaagagatcaaacagcttatcgagaaaaacgtcactaacgtcaatacgggagtgcaaatggtcgagcagacggaaacacaccttaccggaatgatcgatgacgtgttgcagatgtctaccatgatcaaagagataagcctggcgacgcgggaacaaactttagcgctcgaacagatcaacaattcaatttcacgaattggttccatgacggacaataatgcggaaatggtggaacaggtaacggatgccgcgggggatttaacgggacgcgcgtcacgactgcaacaggccgtacaggtttttggcgcctcacgatag

SEQ ID NO: 74520 - DNA, 1503 bp, Citrobacter koseri
atgctctccagtcgcctctacatgcgcggtatcagcctggccttttccggctttcaggcgctttcccgcgttgatttcaccctgacgggcggttccgtgcacgcgctgacgggggcgaacggtgcggggaaatccacgctgatggcggtgctctgcggcacgcacgaccattacgaaggggaaattgcaattaataaccagccggtgccgatacgcgaaccgctggacgccaaacggctgggcattcatctggtgcagcaggaggtggatgttgcgctgatccctgggttgagtattgcggaaaatattatgctcgatcagctggcgcagccgggacaccgctaccgctggcgcgctattcgccagcaggcgcgtgacgcgctggcccagcttgatgttcatctggacgtgcgccgggtcatcgatggttgcacgctcgccgaaaagcagcagatcctgctggcccgcgcgctctcgcaccactgtcgttttctgatcctcgatgaacccaccgcgccgctcgatcagcatgaaagcgaacggctgtttgccgtggtgaaacgcctgcaacaacaggggatcggcgtggtgtttatctcccatcgcattcatgagctaaaggccatttgcgacaccttaaccgtactgcgcgatggcaagttgattgagtccgggccgatggcggaactgagcgctgacgccatcgtcgagaagatgctgggtcatgagttaaacgatatctatccgccaaaacgcccgccgcatgctgatgaaacgctgctgcgcgtggaagggctgcacgatgaacggctgctgaaaaatatcagtttgcacctgcgtaaaggtgaaattctcggcatcgccgggctggcgggagccgggaaaaccgagctgtgcaaggcgctgttcggcgcgtcgaaaagccgcgttgaacgcggcgaactcaatcatcaaccgtggacgccgcgcgacccggttgattcggtgacgcgcgggctggcgctggtgccggaggaacggcgcaaagagggcatttttattgatgagtccgtcgccatgaacctggcggtcgccgccgataaccgtttctcgcgctggagcttgtttggtcatcgtcaggcatggcgctgggcggaagcggtgattgcccgcgtcggcgtgcgcgctcgcgggccggggcaagtgttgcgtcggctttccggcggcaaccagcagaaagtggcgatcggcaaatggctgcgcggcgacgcccgcgtgctgattttcgacgagccgaccaaaggcgtggacgtgaaagccaaaaccgacctgtttgcgctgatcgacggcctggcgcgggaaggcaaaggggtgatttacgcctccggtgagttcgccgaactggtggggctgtgcgaccgcatctgcgtgttgtgggacgggcgcatcgtggcggaagtggagggcgcgcaggcccgcgaagagacactactttattattcaaccggaggaacggcgttgtga

SEQ ID NO: 74521 - DNA, 996 bp, Citrobacter koseri
gtgagtaaggccctttcagtcaatgcagcggcgtctggccgccagcagattttcgattttctctataagtggggcatgctgctgacggttgtcgcgctgatcgctatttttggcgtcgcgtcggataacttcctcgatcccttcaatatcatcaacatcctgcgctctattgcgatcgtcacggtgattgcgattggcgtctccatctcgcttaccgtcggcggctttgatctttccgttggctcaaccgcgtcgctggcgaacgcactggtgatttcgctgttcgtctggcacggctttggcaccaccggggcgattgtcattaccctggcgctctgtacgctggtggggctgttcaacgcttttctgattgtggtgctgcgtattcccgacatgctcgccacgcttgccagcctgtttgtgattcagggggtggcgatgacctacagctacggcggctctattactgaaaacatggtgctgccgagcggtgaaatggctgaggggcttattccggcggcattcggcgcgctggggcaggtgccgactattgttgtcgtgatgctggtcgtgacgctggcggcgcagcttgcgctgtcgctgaccacccacgggcgacggatgtacgccattggcggcaacccggaagcggcgcgcctctccggtattcgcaccacccgctataaagtggcggcctacgtcattgcctcactgctggcggggttagggggcatcctgctggcttcgcgtattggctcttcacaggttaacgccgggggaggctatttgatggatgctgtcgcggcggcgtggatcggcttttcgctggccggttccggcaaaccgaatgcgctcggcacgctggtgggggcggtgatccttggcgtgctctccaacgggctggtgatgctctcggtgccctattacgcaatggacattataaaagggctggtgctggcggcggcgctggcgatcacctacatacaaaaacgttaa

SEQ ID NO: 74522 - DNA, 1065 bp, Citrobacter koseri
atgaaaaaaactgcactttctttgttggcgctgggattactgagttcgctgccgggctatgcggcaacgcctgcgccggtgccagcggccattgccgggcataatggcccggttcgcattgcggtgatccgcaaccttggctctgatgacaacacgacccagttcgttgcgggcgcgattcaggaggggaaaaagctcggctttaaggtcagcacctttttaagcaatggcgacgacgcgaaattccaggatttcgttaaccaggcgatcagccagaagtatgacggtattattctctctcaggggcgcgatccgtactccaccgcgctggtgaagaaagcggtagatgccgggatcaaagtggcggtgtttgataccgccgtcaacggtgagatcccgggcgtgacggtaactcagcaggatgacgcctcgctgacccatctctccttcgggcaactggtaaaagatttcaacggtaaagccaatattatcaagctgtgggtcgccggtttcccgccgatggagcgtcgccaggcggcttatcagcaaatgctgaaggacaatccggggattaaagagctggagtctatcggcgcggtctcttccgacgtgcagggcgataccgccaacaaagtgggcgcggtgctggcgaaatacccgaaagggaaaatcgacgctatctggggaacctgggacgcctttagccagggggcgtacaaagcgctgaaagagaacggccgcactgagattaagctctacagcatcgacatctccaaccaggatttacaactgatgcgcgaagcgggcagcccgtggagggtgagcgtggccgttgacccgaaactgattggcgccaccaacgtgcggctgattgccaataagattgccggtgaacctacgcctgccacttacgattttaaagccgcagccattccgcaggcgctgctggcagcgcagccgggggcggttaacgtcgcctcattaggcaaaatcattccgggctggggccagacggaagacttcatcgcgccgtggtttgcgacgcttgaagcgaagaataaataa

SEQ ID NO: 74523 - DNA, 1242 bp, Citrobacter koseri
gtgactgaattaccgcgccccgactatagccgcaatatgcggctgattggccatagcgaccagggcggtcgcccggacggcgtacagctgatggtacattgcggttttgcctatattggccatatggtgtcgcaggggttttcgattgttgacgtgcgtgacccgaaaaaaccacgggcgacgggctatgtgcctgcaccgccaggcacctggaacgtgcatttgcaggcgcatgacgatctgctgctggtgattaacgcccgcgatttgttcgccgatgcccgctttgccgatgaaaaggtctactacacgcggcaggtcggtgagacggtcagcgatgtgcaggaccggggctggagcgcagggctgcgcgtgtttgatatttccacgccggataaaccgcgtgaaatcggttttctctccctgaatgggatcggcattcaccgcatctggtacgtcggcggacgctgggcctacgtctcggcgctaatcgacggtttcaccgactacatcttcctgaccatcgatctggccgatccgcgtaagccagaggtgggcgggcgctggtggttgccagggatgaatcaggcggcgggagagacgccagactggtcggagggcaaacgctatgcgctgcatcacgcgattatcgctggcgataccgcctacggtagctggcgtgacggtggtctgacgctgctggatgtgcaagatcgcacgcagccgaaactgattagccatcgcaactggagcccgccgtttggcggcggcacacacactgcgctgccgctgccggaccgcgatctgctggtggtactggacgaagcggtgctcgacaatcaggaagacggcgaaaagctgatctggctgtttgatatccgcgagccgtcgaatccggtgagcatcgccaccttcccgcagccggatgaggctgattacgtggcgaaaggggcgcacttcgggccgcataacctgcacgaaaaccgccctggcagctttattagctcgacgctgattttcgccacttaccagaatgcaggggtgcgcgcttatgatattactaatccttatcgtccggtagaaaccggcgcgctggtgcctgcggcgcctgagacgatgatggatacgcggccaaatcgcccgcaggtgatccagtcctgcgacgtgtttgtcgatgcgcgggggattatctacagcacggattacaacggcgggttatcagtgattgagtatctggggtaa

SEQ ID NO: 74524 - DNA, 1251 bp, Citrobacter koseri
atgtatagacgtctacatgtctttattagtgaaatgagtgaggaacaggcaatgtcgcaataccgtacctttaccgcccaggatgccgtggaatacgcccgaacgtttggcggcatcgatgatccatccacactggtagaggcgcaggaggtgggcgacggcaaccttaatctggtatttaagattttcgataccacaggcgtaagccgcatcgtcgtcaaacaggcgctgccttacgtgcgctgcgtcggcgaatcctggccgctgacgctggatcgcgctcgtcttgaagcgcaaacgctggtggcgcattaccagcactgcccgcagcatacggtgaaaatccaccatttcgaccctgaactggcggtgatggtgatggaagatctctccgatcataacatctggcgcggcgaactgattaaaggcgcctggtatccgcaggcggcacgccagctcggcgaatatctggcgcaaacgctgtttcataccagcgatttttatctccacccgcatgacaaaaaagcgcaggtggcgacatttattaacccggagatgtgtgagatcaccgaagatctgttcttcaacgatccctaccagatccacgaacgcaacagctatcctgcggagatcgaaggcgacgtcgccgcgttgcgcagtgacgctcagcttaagctggcggtggcggcgctcaaacatcgtttcttctcccatgccgaagcgctgctgcacggcgatatccacagcggctcgatctttgtcgccgacggtcgcctgaaagccatcgacgccgagttcggctactttgggccgataggctttgatgtaggcaccgccatcggcaatctgctgctgaacttctgcggcctgccgggtcatctgggtattcgcgacgccgccgccgcgcgcgagcagcggctgacggatattcaggagctgtggaacacctttgctgaacgttttcagatgctggcgacggagaaaacccgcgacgcggcgctacgtgcgccgggctacgcgtcggaatttctgaaaaaagtctgggcagacgccatcggcttttgcggcaccgagctgattcgccgcagcgtcgggctgtcgcacgtagcggatatcgataccattcaggatgcggaaatgcgccatgaatgcctgcgccatgccattaccctcggaaaagcgctgattgtgattgccgaccggattgagagcgtggaagcactgatcgcgcgggtgcggcagtacagctaa

SEQ ID NO: 74525 - DNA, 1029 bp, Citrobacter koseri
atgcagacattacagacgaccagcctgcgagtggcggataatcaattatttattctcgatcagcaggcgcttccacaggagaaacgctggctggatgcctcaacggtagaagcgctggtggggcatattcacgcgctgcgcgtgcgcggtgcgccgctgattggtctttccgccagtctgctactggcgctgctggcggagtcaggccatcgccgggatgaactggcgatagcgctggaaacgctgcgcgctgcgcgcccgacggcggtcaatctgatgaacaatctcgatcgtatgaagcaggcgctgaggcaagaagactttgttccggcgctggcggcggaagcgctgcgtctgatcgatgaagacaaacaactctgtgacgatatcgcgcgtgcgggaagtgcgatggtgaagccgggcagccgtctgctgacccactgcaacaccggcgggctggcgacagcgggcacggggacggcgctgggggtgattgcccgcgcgtatgcacagggcaacgtgcaaaacgtctgggtggatgaaacgcgcccgttattgcagggcggcagactcactgcctgggaactgggcgaactgggggttccctatcaactgattaccgactcaatggctgccagcctgatggcgaaagggctggtggacgcggtgtgggtaggggccgatcgtatcgccgcaaatggcgatgtagcgaataaaatcggcacctattcgctggcggtgctggcgaaattccacggtattccgttttacgttgccgcgccgcaaaccacgctggacccccactgcccgaatggcgacgcaatcccgattgagcagcgcgcagcaggagaagtcaccggcgtggcgggcagttttggcgcggtacagtgggcgccggaaaatgcgcaggtctataacccggcgtttgacgtgacgccagcagcgctgattagcggctgggtgctggatagcggtgtggtgacgccagaagatgtggcgaagggggttttcagggcggaggcggcctga

SEQ ID NO: 74526 - DNA, 543 bp, Citrobacter koseri
atgagcgcattgactatttattccgataaagacgccagccagccccagtggcacagtaccgacgccgcagagatcgcccaacagctcaacgcgaaaggcgtccgcttcgaacgctgggttgcagaccgcgacttaggccaggcccccacgccagaaacggtgatcaccgcctatcaacatgcgattgataagctggttgccgagaaaggctatcagagctgggatgtgatcagcctgcgcgccgacaatccacaaaaagaggcgctacgtgcaaagtttctcaatgaacacacccacggcgaagatgaagtgcgcttcttcgttgaaggcgcaggactgttttgcctgcacattggcgaccaggtttaccaggtgctgtgtgagaaaaacgatctgatttcagtgcccgccggtacgccgcactggtttgatatgggctccgagccaaactttaccgcgatccgtattttcgataacccggaaggctgggtggcgcagtttaccggcgatgccattgcggatgcctatccgcgcctgctttaa

SEQ ID NO: 74527 - DNA, 690 bp, Citrobacter koseri
atgattcgcgcgattgtgacggatattgaaggcaccaccagcgatatccgttttgttcacaatgttctgttcccctatgcgcgcgagcggctggcggcgtttgtcaccgcccggcagtatgccgaaccggtaaaatcaattcttgataatctgcgcaacgagattgcccggccggacgccagtaccgcagaacttatcgaaacgcttttcacctttatggatgaagatcgcaaatcgacggcgctaaaagccctgcaaggcattatctggcacgatggttacgtcaatggcgactttaccggtcatctctacccggacgttctgccagcgctggagaaatggaaagcacaaggcgttgatctctatgtttattcctccggctccgtcgcggcgcagaaactgttatttggctacagcgacgaaggtgatattactcatctgttcagcggctattttgatacccatatcggcgcaaagcgagaaacgcagtcataccgcaatatcgcgtcgtatatcggcgtcgcgccgtcgcaaatcctgttcctctccgatgtatatcaggagctggacgccgctgaagaggcgggtcttcgcaccctgcaactgattcgtggcgagggtgatggcgccagccgccaccaccaggtacatcaattcgacgacattaacccggagcagatcctttcatga

SEQ ID NO: 74528 - DNA, 615 bp, Citrobacter koseri
atgacagataacctgcaactcacacaactggtcgagacctgccgctggataggggcaaaaggctgggctcccgccactggcggcaatatgtctgtccgccaggacaacgctttttgctggctcagcgagtcgggaaaagataaaggcaacctgactaccgacgattttttgcaggtggaaatcgccaccagtcacgcaccgtccggtcgcaaaccatcggcggagaccggactgcataccctgatttatcgcctctttccccaggcaaacgcggtgttacacgtccacaccgtcaacgccacggtgctctcgcgcatcgttaaaacgccggagctatatatcagcggttttgaaatgcaaaagtcgcttagcgggcagaccacccatcttgataccgtctgcgtgccggtgttcgacaacgaccaggatatcgacgcgctggcgtcacgtattgcgcattacgcgcaagagcgttctctgaattacggttttcttctgcgcggtcatggcttaacctgctggggacgctcagtggaggaggcccgccgtcatctggaagggctggaatttttatttgaatgcgaaatgcgtttgcgacaactggagagattatga

SEQ ID NO: 74529 - DNA, 264 bp, Citrobacter koseri
atggacgaaaagctgtgccagcgcaccagccagcaaaccctgccagagtttaattttggggaaaacttcagcaacaacacagtaacctactgcgaagacaatcgaaaagatgatgtgtgttacaccaacccagttaaacacatgcccggcaaaggtgtagacggcagcgttaggatcagcaagccccatccagtcacgaaggaaaatataagggggattcaggaaattgcgggaacagtcaatttgcccggcagccctgattaa

SEQ ID NO: 74530 - DNA, 1206 bp, Citrobacter koseri
atgtctcttcgtttcagacaaacctttactctgtttcctggcgttaggctcaacattggtaagcgtggaataagcgcaagcatcggtgtacctggtgcaactgtcaatgttgggaaaaaaggactcagagcgaccgtcggactaccgggtacaggcttatcttatactacacctaccctgccctatggtgatgggcactctgttaccaatccattaactccgtcctccacagaacctcattttggaatgccggaggcatccccaagtaacatcccatcgaacgctaaaatatatatgcccatggctggcatgaatgaaatttccagcgcttcggtagaagtcctgacaagttcctcccttttacctttacgagatttgattgctaaagcgcgagaacaaagggcagagataaaagcagatctacaagaggctcttactgaagaatcaaaacaaaagaacgagctggttcgacgcaaatcaagtctattccgttggttttacaaacgacgcatcacagaacttgagacagaactccccctaacgcaagctgagatatctcgcctgatatcctgggaaggcaacacaaaaatagccataaccttcgagagcagtgatacttcacagcgcgcatatgcagcaatgatccgtgcattcgatatattaaaatcgagtgtcaaaaaatgggatattactgcagataaagctacagaccagtttgctgaaagaacattagcaacccggtctgttaatcgtcacccagttacctttgatttcagttcaacggatctcattcaatttacaggtcgtgcaatgcggtttgaaaatgtgaatggcgacgatattttgctttatccgggagttgcagtcataccacgagctgatggggcgttcgctctgattgatttacgcgaattacaagtcagttcagaatatcgaagattccatgaggaagaaggtgttcccagtgattcacgcatagatgggcatacatgggcgaaaacgaataagaatggctcgccagaccgtcgatttaaagacaactaccaaatccctatttgcatttatggaaatattactttccattctcaaacaggggtaactgaagaatatatggtatcaaatgcagatgccgcgcaagcctttgctgaggcagtaaaacgctatcagacctcactcactgaatctgatgcgttggtacaagcctaa

SEQ ID NO: 74531 - DNA, 483 bp, Citrobacter koseri
atgacgaagaaaaaagcacacaaacctggctcagccactattgcgttgaataagcgcgcccgacacgaatactttattgaagaagagttcgaagctggactcgccctgcaaggttgggaagttaaatccctgcgcgcgggcaaagcaaatattagcgatagctatgtccttctcagggatggcgaagcgtacctgttcggcgcaaactttacgccaatggccgtcgcctcaacgcacgtcgtgtgcgaccccactcgcacccgtaaactgctactgaaccaacgcgaactcgactccctgtacggacgcgtcaatcgtgaaggttataccgtcgtcgcactttcactgtactggaagaacgcctggtgcaaagtgaaaatcggcgttgcaaaaggtaagaaacagcatgataaacgctcagacctgaaagagcgtgagtggcaactggataaagcccgcatcatgaagaatgcaggccgctaa

SEQ ID NO: 74532 - DNA, 438 bp, Citrobacter koseri
atgcctcagattagccggaccgctttagtcccttatagcgcggaacagatgtataagttagtgaatgatgttcagtcctaccctcagtttttgccgggatgcgtcggcagccgtgtgctggaatcgacgccgggtcagatgacggcggccgtggatgtgtctaaggcagggatcagcaaaacattcacgacacgtaaccagttgacgaataaccagagcatcctgatgcatctggtcgatggccctttcaaaaaattgattggcgggtggaaatttacgccgctcagccaggaagcgtgccgcatcgagttccacctcgattttgagttcaccaacaagttaattgaactggcgtttggccgcgtctttaaagagctggcttctaatatggtgcaggcgtttaccgttcgggccaaagaggtttacagtgtcggctaa

SEQ ID NO: 74533 - DNA, 291 bp, Citrobacter koseri
gtgtcggctaaaattgtcgtcgaagtggcgtatgcgctgcccgagaaacagtatttacagcgtgtgacgttgcaggaaggcgcgacggttgaagaagcgattcgtgcttccggtttgctggaactgcgcaccgatatcgatctcgctaaaaacaaagtcggtatctatagccgcccgacaaaacttgccgacgtggttcatgacggcgatcgggtagagatctatcgaccgttgattgccgacccgaaagagttgcgcaggcagcgagcggagaaatcggcaaataaataa

SEQ ID NO: 74534 - DNA, 345 bp, Citrobacter koseri
atgcgctgtaaaacgctgactgctgccgcagcagtactactgatgttgaccgcaggctgttccactctggagcgagtggtttaccgccctgacatcaaccaggggaactatctgaccgctaacgatgtcgccaaagtgcgcgtcggtatgacgcaacagcaggttgcttatgctttgggtacaccgatgatgtccgatccttttggcactaacacatggttctatgtgttccgtcagcaaccgggtcatgaaggcgtaacgcaacaaaccttaacgctgacctttaacagcaacggcgtgttgaccaacatcgacaataagccagcgttgaccgacaacaagtaa

SEQ ID NO: 74535 - DNA, 1662 bp, Citrobacter koseri
atgttggcacaactgaccatcagcaattttgctatcgttcgtgaacttgagatcgatttccagagcggaatgaccgtcattaccggtgaaaccggcgcgggtaagtctattgcgattgatgcgctcggcttgtgtctgggtggccgtgcagacgccgacatggtgcggttgggagcaacccgcgcagacctgtgcgcccgcttctcactgaaagatacgccagcagcgctgcgctggctggaagaaaaccaactggaagaagggcgtgagtgcttacttcgccgcgtcattagcagcgacggtcgctcccgcggcttcatcaacggcaccgccgtgcctctctcccagttacgggaactgggccagttgctcattcaaattcacggccagcatgcgcatcagctactgaccaaatctgaacatcaaaaatccctgctcgacggctacgccaacgaagcgcttctgattcaggaaatgtcctcacgctatcaactgtggcatcaaagctgccgcgatctggcgcatcatcaacagcaaagccaggaacgcgccgcacgtatggagctgctgcaatatcagttgaaagaactgaacgaatttaacccgcagcccggtgagtttgagcaaattgatgaagaatataaacgactggcaaacagcggccagttgctgacgaccagccagaatgcgctgacgttgcttgctgatggcgaagacgtcaatctgcaaagccaactgtacacggcaaaacagttagtcaccgaactgacgggtatggacagcaaactgtctggcattctggatatgctggaagaggccacaatccagataactgaggccagcgacgaactgcgtcactattgcgaccgtctggatttagaccccaatcgcctgttcgaacttgagcagcgcatttccaggcagatttcactggcgcgtaaacatcacgtcagcccggaagcgctgccgcagttttatcagtcactgctcgaagaacagcagcagcttgacgatcaggccgactcactggaaaccctgacgctggcggtgaacaaacatcgccagcaggcgctggagacggcaaaagcgctgcatactcagcgtcagcatgacgcgcaggaactggggcagttgatcaccgaaagcatgcatgcgctgtcgatgccgcatggccagttcactattgatgtaaaatttgatgagcatcatctgagcagcgacggtgccgaccgcgtagagtttaaagtcaccacaaacccgggtcagccattgcagccaatcgcaaaggtcgcttccgggggcgaactgtcccgtatcgcgctggcaattcaggtcattaccgcccgtaaaatggaaaccccggcgctcattttcgatgaagtcgatgtcggtatcagcggccctactgcggccattgtcggcaaactgctgcgccagttaggtgagtcgactcaggtaatgtgcgtcacccaccttccgcaagttgccggttgtggccatcagcacttctttgtcagcaaagaaacggacggcgccatgaccgaaacgcatatgcagccgctggataaacgctcgcggttacaggagctggctcgtttacttggcggcagcgaagtgacgcgtaataccctcgcaaatgcgaaagaactgttggctgcgtaa

SEQ ID NO: 74536 - DNA, 879 bp, Citrobacter koseri
atgaacaatcatttcaagtgtattggcattgtgggacatccacgtcaccccactgcactgacgacacatgaaatgctctaccgctggctatgcacaaaaggttacgaggtcatcgtggagcagcagatcgcccacgaattacagctgaaaaatgtaaaaaccggcacgctggcggaaattggtcaactggcggatctcgccgtcgttgtcggcggggatggcaatatgctcggcgcggcgcgcacgctggcgcgctatgacatcaaagtgatcggcattaaccgtggcaatctcggcttcctgaccgaccttgacccggacaacgccctgcaacaactcgcggatgtactggaaggccattatatcgccgagaaacgctttttactggaagctcaggtctgccagcaaaactgccagaaacgcatcagtaccgccatcaatgaagtcgtgctgcacccgggaaaagtggcgcacatgattgaatttgaagtgtatatcgacgaaaccttcgccttttctcagcgttccgatggcctgatcatctccacgccgaccggttccaccgcctattcactctcggcgggcggccccattctgacgccgtcgctggacgccatcacgctggtgccgatgttcccgcacaccctatccgcacgcccgttggtcattaacggcagcagcacgattcgtttgcgtttctcacaccgccgtagcgacctcgaaatcagttgcgacagccagattgccctgcccatacaggaaggcgaagatgtattgatccgccgctgtgactaccacctgaacctgatacatcctaaagattacagttatttcaacacattaagcacaaaactaggctggtcaaaaaaattattctaa

SEQ ID NO: 74537 - DNA, 594 bp, Citrobacter koseri
atgagtagtaaagaacagaaaacgcctgaggggcaagccccggaagaaattatcatggatcagcacgaagaagttgaggcggttgaatcagacgcttctgctgagcaggtggatccgcgcgatgaaaaaattgcgaatctggaagcgcagcttgctgaagcccagaatcgtgaacgtgacagcgtgttacgtatcaaagcggaaatggaaaacctgcgccgtcgtaccgagctggacgtagaaaaggcgcataagttcgcgctggaaaaattcgtcaatgagctgttgccggttatcgatagcctggatcgtgcgctggaagtggcggataaagcgaatccagatatggcgtcaatggtcgaaggcattgagctgacgctgaaatccatgctggatgtcgtgcgtaagttcggcgtagaggtgattgctgacaccaacgtaccgctggatccgaacgtgcatcaggcgattgcgatggtggagtctgaggatgttaccccgggtaacgtgctgggcattatgcagaaaggctatacgctgaacggtcgtactattcgcgcggcgatggtaactgtggcgaaggcgaaagcgtaa

SEQ ID NO: 74538 - DNA, 1242 bp, Citrobacter koseri
atggtggttatttcagcctatttttccggttccgaaaccggcatgatgacgctgaaccgctatcgtcttcgccacctggcaaaacagggcaaccgtccggcaaagcgcgtggaaaaactactgcgcaagccggaccgactgataagcctggttctgattggtaataacctggtcaatattctcgcctcagccatcggcaccatcgtcggtatgcgcctgtacggcgatgcgggcgtggcaattgccaccggcgtactgacgtttgtcgtcctcgtatttgcggaagtgctgccgaaaaccatcgccgcgctgtacccggaaaaagtggcctaccccagcagttttctgctggcgcctttgcaggtgctgatgatgccgctggtctggttgcttaacaccattacccggctgctgatgcgcatgatgggcattaaaacggatatcgtcatcagcggctctctgagtaaagacgaactgcgcacgctcgtgaatgaatcccgctcgcaaatctcccgccgcaaccaggacatgctgctctcagtgctggatctggaaaaggtcagcgtggatgacatcatggtgccgcgcaacgaaattatcggcattgatatcaatgacgactggaaatcgatcgtccgccagctttctcactcgccgcacgggcgcattgtgctttaccgcgactcgctggatgacgccatcagcatgctgcgcgtacgcgaggcctggcggttaatgtccgagaaaaaagagttcactaaagagaccatgctgcgcgccgccgatgagatctacttcatcccggaaggcacgccgctcagcacgcagctggtaaaatttcagcgtaataaaaagaaagtcgggctggtggtcaacgaatacggggatattcaggggctggtgacggtcgaagatattctggaagagattgtcggcgacttcactacctcaatgtcgccaacgctggcggaagaggtcacgccgcagaatgacggttcagtgattatcgacggcagcgccaacgtgcgggaaatcaacaaagcctttaactggcacctgccggaagacgatgcgcggacggtaaacggcgtgattctggaagcgctggaagagatccccatcgccggaacgcgcgtgcgcattggccagtacgatatcgatattctcgacgtccaggacaatatgattaagcaggttaaagtcttgccggtgaaaccgttgcgggagagtatctcagagtaa

SEQ ID NO: 74539 - DNA, 864 bp, Citrobacter koseri
atgcaacggttggagcagcggtcacgtaacgctatactgcttctctctcactggccaactgtcgacactcctatgcccgtttttgctttactcgctcttgtcgcctattccatcagcctcgcgctgatcgttcctgctttgctgcaaaaaaacagcggctggcggcgtatggctatcctttctgcggtcatcgcgctggtgtgccatgcttttgcgctggaagcccgaatcctgcccggcggcgaaagtggtcaaaacctgagcctgctgaacgtcggttcgctggtcagcctgatgatttgtaccgtcatgacaattgtcgcttcacgcaatcgcggctggctgctgctgcctgttgtctacgcctttgcgttaattaacctggccttcgccacgttcatgccgaacgagtacatcacccacctcgaagccacgccaggtatgatgatacacatcggcctgtcgctgttcgcttacgccacattgatcattgccgcactgtatgcgttgcagctggcatggatcgactatcagctcaaaaacaaaaagctggcgttcaataatgaaatgcccccgctgatgagcattgagcgcaaaatgtttcacatcacgcagattggcgtggtgctgctgacgctcacgctgtgtactggtctgttttacatgcataacctgttcagcatggaaaatatcgacaaagccgttctctctatcgtggcatggtttgtctatattgttctgttgtggggacattaccacgaaggctggcgcggacgtcgggtcgtatggtttaacgtcgcgggcgcaggcattctgacgctggcctatttcggcagccgcgtattgcagcagtttgtaagctaa

SEQ ID NO: 74540 - DNA, 1362 bp, Citrobacter koseri
atgtttgataatttaaccgatcgtttgtcgcgcacgctgcgcaatatcagtggccgtggacgccttactgaagacaacgttaaagagacgctgcgcgaagtgcgcatggcgctgctggaggctgacgttgcgcttcctgtagtgcgagagtttatcaatcgcgtaaaagagaaagcggttggtcatgaagttaacaagagcctgacgccggggcaggagttcgtcaagattgtgcgcaacgaactggttgcggcgatgggcgaagagaaccagaccctgaatctggccgcgcagccgccagccgtcgtgctgatggcgggcttgcagggcgccggtaaaaccaccagcgtcggtaagctgggtaaatttctgcgcgagaagcacaagaagaaagtgctggtcgtctctgccgacgtttatcgcccggcggcgatcaaacagctggaaaccctggcgcagcaggttgacgtcgatttcttcccgtctgacgtcggtcagaagccggttgatatcgtcaatgccgcgctgaaagaagcgaaactcaaattctacgacgtgctgctggtggataccgccggtcgcctgcacgtcgatgaagcgatgatggacgaaatcaaacaggtccacgcttctattaatccggtagagaccctgtttgtcgtcgatgcgatgaccggtcaggatgccgcgaataccgcgaaagcgtttaacgaagcgctgccgttgaccggcgtggtgctgacgaaagtcgacggtgacgcccgtggcggtgccgcgctctctattcgtcatatcaccggcaagccgattaaattcctcggcgttggcgagaaaaccgaagcgctggagccgttccacccggatcgtatcgcgtcccgtattctcggcatgggcgacgtgctgtcgctgatcgaagatattgaaagcaaagttgaccgcgcgcaggctgagaaattagccagcaaactgaaaaaaggcgacggctttgatctgaacgatttcctcgaacagctcaaccagatgaaaaacatgggcggtatggcgagcctgatgggcaagctgccgggcatgggccagattcctgacaacgtgaaatcgcagatggatgacaaggtgctggtgcggatggaggcgatcatcaactcgatgacgctgaaagagcgcgcgaagccagaaatcatcaaaggttcccgtaaacgccgtatcgcagccggttgtggcatgcaggtacaggacgttaaccgtcttctgaaacagttcgacgacatgcagcgcatgatgaagaaaatgaagaaaggcgggatggcgaagatgatgcgtggcatgaaagggatgatgccgcctggcttcccgggtcgttaa

SEQ ID NO: 74541 - DNA, 249 bp, Citrobacter koseri
atggttactattcgtttagctcgtcacggcgctaaaaagcgtccgttctaccaggttgttgttaccgacagccgtaatgcacgcaacggtcgcttcattgagcgcgttggcttcttcaacccgatcgccagcgaaaaagaagaaggcacccgcctggatctggatcgcatcgctcactgggttggccagggcgcgactatttctgatcgcgttgcagcgctgatcaaagcagcaaacaaagcagcttaa

SEQ ID NO: 74542 - DNA, 549 bp, Citrobacter koseri
atgagcaagcaactcactgcgcaagcgcccgttgaacccatcgttttggggaaaatggggtcgtcttacggtattcgtgggtggctcagagtgttttcttccaccgaagacgccgaaagcatttttgactatcagccctggtttatccagaaggcgggtcagtggcagcaagtacagctggaaagctggaagcaccacaatcaggatctgatcatcaagctgaaaggcgttgacgatcgtgattcggcgaatctactgaccaattgcgaaattgtcgtggattcctcgcagttgccagcgctggaggatggttcttactattggaaagaccttatgggctgccaggtagtgaccactgaaggctacgatctcggtaaagtcgtcgatatgatggaaaccggttcgaatgacgtcatcgtcattaaggcaaacctgaaagatgcgtttggtatcaaggaacgtcttgtgccgttcctcgatgggcaggttatcaagaaagtcgatctcgctactcgtactatcgaagtagattgggatcctggtttttaa

SEQ ID NO: 74543 - DNA, 768 bp, Citrobacter koseri
gtgtttataggtatcgttagcctgtttcctgaaatgttccgcgcaattaccgattacggggtaactggccgggcagtaaaaaatggcctgctgagcatccagagctggagtcctcgtgacttcacgcatgaccggcaccgtaccgtggacgatcgtccttacggcggcggaccggggatgttaatgatggtgcaacccttgcgggacgccattcatgcagcaaaaagcgcggcgggtgaaggcgctaaggtgatctatctgtcacctcagggacgcaagcttgatcaagcgggcgtcagcgaactggcaacgaatcagaaactgattctggtgtgcggtcgctacgaaggaatagatgagcgcgtgattcaaaccgaaattgacgaagaatggtcaatcggcgattacgtactcagtgggggtgagttaccagcaatgacgctgattgactccgtttcccggttcattccgggggttctgggtcatgaggcttcggcaatcgaagattcctttgccgacggattactggactgtccacactatactcgacctgaagtgttggaagggatggaagtaccggcagtattgctgtcaggaaaccatgctgagatacgtcgctggcgtttgaaacagtcgctgggccgaacctggcttagaagacctgaacttctggaaaacctggctctgactgaagagcaagcaaggttgctggcggagttcaaaacggaacacgcacaacagcaacataaacatgatgggctggtctga

SEQ ID NO: 74544 - DNA, 348 bp, Citrobacter koseri
atgagcaacattattaagcaacttgaacaagagcagatgaagcaggacgtaccttccttccgtccgggtgataccgtggaagtgaaagtatgggttgttgaaggttccaaaaaacgtctgcaggcattcgagggcgtggttatcgctattcgtaaccgcggtctgcactctgcattcactgttcgtaaaatttccaacggcgaaggcgttgagcgtgtcttccagactcactctccggtagttgacagcattgctgttaaacgtcgtggtgccgttcgtaaagctaaactgtactacctgcgtgagcgtactggtaaggctgctcgtattaaagagcgtcttaactaa

SEQ ID NO: 74545 - DNA, 411 bp, Citrobacter koseri
gtggttatcggtacatttcgtcagcctgcgtatcaacgcaacgcgacatggctcgcgatgtttgcgatcctgctgatcgtggtggcgccgcttatctccgtctcgttgcaaaaagatcccatgagcgccatgcctggtatgcatcatgacatgagcatgatggctgaacatgttggacatcatgggcagtcttcatcaatgccgatgcctgtcgatcacggtgaagcgtgcgggtattgcgtcctcctgacccatgttcctggcctgatgctggcgctggtcatcctgttgtccgggatgctgctcagacaaaagctgatgccgccacgcccggttgttaaacactggcatttcttcccctggctttatcccgatacgcgcgcaccgccgcgcaggtctgctgtttcctga

SEQ ID NO: 74546 - DNA, 1359 bp, Citrobacter koseri
atgacaacctgcactccgcgcgcggcatggataaccctgctgcgacgttttcatttctacacaggtctgtttgtcgggccatttatctttgtggcggccttaaccggtacgctctacgttgcgacgccgcaactggaagaggcgctctatgcaccggcgctacagggcacagagcaaggagagcggcaaccgctggcggcgcaaatcaccgttgcccaacaggtgacgggagggcatttacgactgcatgccgttcgtcccgctcttgaagagggcgcaacgacgcgggtgatgtttgccgaccccggacttgccgcttccgagaaccgggcgattttcatcgatccagtgacgctggcggtgaaaggcgatatgacggtctatggcaccagtggcattttgcccctgcgtcagtggattgattatgctcaccgctctttgctattgggggatatcgggcgaatttacagcgagctggcggcctcctggatgtgggttgcggcgactggcggcatcatgctctggtatttcacccgaccaaaacgtcggctgaataatcgggtgcaaaataaccggcgtttacacgtaatgctggggtggttattgctggcggggatgctgctgttctcggcaaccggtttaacctggtcccagtgggccggaggcaacgtggataaaatgcgtgcggcttttggctggctgacgccgcaggtgaatacgcagctttatggcgacgaacaccctgctgatgaacatgccgatcatcatgccgggcaggaaatgccggttatgcatatggatgtcagccagtttgatgcggttctgcatacggcgcagacggcgggaattgatgctaaaaagctggagattcgtccggccaaagatgcgcaacatggctggacggtaactgaaattgatcgccgctggccgacacaggttgatgcggtatcagtagacgccgcaaccctgcatgttatcgaccggacgcattttgctgactttccgcttatggcaaagctgacgcgctggggcgtcgatttccatatgggcatactgtttggtctgccaaatcagttactgctgatcgccttcggcatcgggctttgcctgatgattattattggctaccgtctgtggtggattcgccgaccggcccggtcaggcgttaacccggcgcaaacgctgatgcagtgttggcttacgttaggttggccgggaaggtgcggggttctggtgctggctgtcgccctggggatggtgatgccagtgctgggaggcagcctgctggtatttatcgttatcgactggctgcgctggttcagcacgtctcgcgccgcccttgcgcagccagttgactag

SEQ ID NO: 74547 - DNA, 483 bp, Citrobacter koseri
atgctaaagcgacttttctccccgatcattctgatagcgttgattctggcgggttgccagacgccgcaggggaaatttacgcccgaacaagttgcggcaatgaaatcctatgggtttactgaatcagcaggcgactggtctctggggctgtctgacaacattttatttgataaaaacgactataagttacgcccggaaagccagcagcaaatccgcgagatggcctccaggctagcagccaccgggctgaaacatgcccgtatggatggccatactgacaactacggcgaagacagttataacgaagcattgtcgctcaagcgcgccaatgtggttgctgacgcctgggccgaaggcgccaacatccctcgcagcaatctgacgacgcagggtttaggtaaaaaacacccggtcgccagcaatcagagcgcgaaaggtcgtgctgaaaaccgccgcgttgccgtcgtcatcagcacgccgtaa

SEQ ID NO: 74548 - DNA, 1224 bp, Citrobacter koseri
atggataaggattttttccctacaacgcgcccgacctttaagcgtacattacgccggatcaacatgatcagcgtactggtcaccatgttgctgatctggctgctgctttgcgtcgcctctgtcctgacgctgaaacaatatgcgcaaaaaaatctggatctgactgccgcgacaatgacccatagtcttgaggccgcattggtgttttccgatggcgtcgccgcgacagaaacgctggccgcgctggggcgccaggggcagttctcggccgcagaggttcgcgataaaaaccagaaggtgatcgcctcctggtactatgacgcacaagcatcggacgataagctcaatggcctgatcagccagtggcttttcccgctgccggtgactcagcccgtctggcacaatggcaaaattatcggcgaggtctgcctgaccgcgcgcgacagcttgattggtcattttatctggctctcgctggcggttcttaccgggtgtattttgctcgcatccggcattgcgttaatgctcacgcgttatttgcataatggcgtggtggacgcgctgcaaaacatcaccgatgtggtacatgatgtacgcacgaaccgtaacttttcacgtcgcgtttctgaggaacgcattgaagagttccatctttttgcccaggatttcaacagcctgctggatgagatggaagagtggcaactgcggctacaggctaaaaacgcccagcttttgcgtaccgcgctgcacgacccccttactggtcttgctaatcgtgccgcctttcgtaacagcataaccgagttgatgaacgacagctccgcccgtagctgttcggcgctgctatttctggacggcgataacttcaaattcattaacgatacatgggggcatgccgcaggagatcgcgttttgatcgaggtcgcccggcgactggcggagtttggcggcaatcaccaccagccatatcgacttggcggagatgaattcgccatggtgctttacaacgtgcattcggagtacgaagttaaacgcatttgttcggcattatcgcaagaatttaatcgcccctttgatctgcataacgggcatctggcgagtatgacgctgagtattggtttcgcgctgacgtgggaacatgcttccgcagaaaaattacaagagttggccgatcgtaatatgtatcaggccaaacatcagcgttctgaacgttcaattaaataa

SEQ ID NO: 74549 - DNA, 519 bp, Citrobacter koseri
atgagcttttctcaccgactcatactcctgctaacgctattactggcaggattaccactgtatgctcagggcatcacagaagaagcgaaatctgtacgctcaatcgtttccggtatcgtcagctatacacgctggcctgcattatctggccctccacggctatgtattttcgcctcgtctcgttttgccgatgtgctgaacgacaacagcgccaggtcattaccttatctgcccgtcatcatccgcacggagcaggaagctctgacagcccgttgtgatggcttttatttcggcagtgaatctccggcgtatcaggtagaattaacgaataaatatccgtctaaggcattgttattaattgccgaacaaaatactgaatgcattattggcagcgcattttgtctgatcataaacaatgatgaagtcagattttccgtaaatctggattccctgtcacgcagtggcgtaagagtgaaccccgacgtattgatgcttgcacggaatcaaaagcatggataa

SEQ ID NO: 74550 - DNA, 375 bp, Citrobacter koseri
atgaagcgtttcgcaggcgccttatttgttttattcatcagcggatgtcagatcgatccttacacgcatgctcccacctggaccgcgaccgactggtatagcgccggtatcgaagatgcgatttcaggcgttgccgtcaaagataacgaaacactggctgacgcctggaacgatcctgacgtggagcgaacgcaatatcttaagggctacgccgaaggccaacgaaaaacctgccagttaaactttgtccacgccagaggactggccgggaaaacatttcccgccagttgcgacacggttgaaaacgccagtcaattgcatgatgcctggcaaaaaggcgcagacgaaggtgttcgctcaatgcggctaaattaa

SEQ ID NO: 74551 - DNA, 1071 bp, Citrobacter koseri
atgcaaaaagacgcgctgaacaacgtacacattaccgacgaacaggttctgatgaccccggagcaactcaaagcggcgttcccgctgagtttgtcgcaagaggcgcaaatcgcccagtcacgtaaaacgatttctgacatcatcgccggtcgcgatccgcgcctgctggtggtgtgcggcccttgttctatccacgatcctgaaaccgctctggaatacgctcgtcgatttaaaactcttgccgcagaggtcagcgatagcctctacctggtaatgcgcgtctattttgaaaagccccgtaccactgtcggctggaaagggttgattaacgatcctcatatggatggctcgtttgatgtggaaaccggcctgaagattgcgcgtcaacttctggtggaactggtgaacatgggcttgccgctggcgacggaagcgttagatccaaacagcccgcaatacctgggcgatctgtttagctggtcggcaatcggcgcgcgtacgaccgaatcccaaacccaccgtgaaatggcctctggcctttccatgcccgttggctttaaaaacgggacggatggcagcctggcgacggcgattaacgccatgcgtgccgctgctcagtcacaccgttttgtcggtatcaaccaggcggggcaggtcgctctgctgcaaacgcagggcaacccggatggccatgtcattctgcgcggtgggaaagcgccaaactacagcccggcagatgtcgcgcagtgtgaaaaagagatggaacaggcaggactccgcccgtctctgatggtagattgcagccatggtaactcgaataaagattaccgtcgccagcctgccgtggcagagtctgtggtcgcgcagatcaaagacggcaaccgttccattattggcttgatgattgaaagtaatattcacgaaggcaaccagtcctccgagcaaccgcgcagtgaaatgaaatacggcgtgtctgttacggatgcgtgtatcagctgggaagccacggatgcgctgctgcgtgaaattcatcaggacctgaacggccaactggtggcgcgtgtagcataa

SEQ ID NO: 74552 - DNA, 1122 bp, Citrobacter koseri
atggttgctgagttgaccgcgttacgcgatcaaatagatgaagtggataaggcgctgctggatttactggctaagcgcctggagctggtggccgaagtcggtgaagtgaaaagccgctttgggctgccgatttacgtgcctgagcgtgaagcgtctatgctggcttcgcgccgtgcggaggcggaagcgcttggcgttcctcccgatttgattgaagacgtcttgcgtcgggtgatgcgtgagtcttactccagtgagaatgacaaagggtttaagacgctttgtccttctctgcgcccggtggttatcgtcggcggcggcggtcagatgggccgtttgtttgaaaaaatgctcacgctgtcgggataccaggtacgcatacttgagcaacaggactggggacgggcgcaggagatcgtagccgatgccgggatggtgatcgtaagtgtgccgattcatatcacggagcaggtgatcgcgaaattaccgcgtttgcctgcggattgtattctggtcgatcttgcatcggttaaaaacggaccgctacaggcgatgatggcggcgcacgatggcccggtactgggcttacacccgatgtttggcccggacagcggcagtctggcaaagcaggtggttgtctggtgcgatggccgtcagccggaggcgtatcagtggttccttgagcaaattcaggtgtggggcgcgcggctgcatcggattagcgccgttgagcacgatcagaatatggcgtttattcaggcgctgcgtcactttgcaacgttcgcttacggtttgcacctggcggaagagaatgtccagctggaacaactgctggcgctgtcgtcaccgatttaccgtctcgaactggcgatggttgggcgactgtttgcgcaggacccgcagttgtatgccgatattattatgtcgtcggaaaataacctggcgctgatcaaacgctactataaacgttttggcgacgcgattggtttgctggagcagggcgacaagcaggcctttatcgacagtttccgcaaggttgagcattggtttggtgattacgccaaacgcttccagaacgaaagtcgcacgctgttacgccaggcgaacgatagccgacaataa

SEQ ID NO: 74553 - DNA, 1161 bp, Citrobacter koseri
atgacatcggaaaacccgttactggcgctgcgagagaaaataagcgctctggatgtaaaattactggccttactggcggagcgtcgtgagctggccgttgaagtcgggaaagcgaagctgctttctcatcgcccggtgcgtgatatcgatcgcgagcgcgacctgctggacaggctgatcgcgcttggcaaagcccatcatctggacgcgcactatattactcgcctgttccagctcatcattgaagattctgtccttacccagcaggcgctgttgcagcaacatctgaacaaaattaacccgcattcagcgcgtattgcatttcttggaccaaaagggtcgtactcgcacctcgctgcgcgccagtatgccgcccgccactttgaacagtttattgaaagcggctgcgcaaaattcgctgatatctttaatcaggttgaaaccgggcaagcggactacgccgtcgtgccgattgagaacaccagttcaggcgcgatcaacgacgtctacgatctgttgcagcacaccagcctctctatcgtgggcgagatgaccattaccatcgaccactgcgtgctggtttcagggacgaccgatttaaacaccattgagacggtctacagccacccgcagccgttccagcagtgcagtaaattccttaaccgctatccgcactggaaaattgagtacacagaaagcacctctgcggcgatggaaaaagtggcgcaggcgaactctccacgcgtggcggcactgggtagcgaagccggtggcgtgctgcatgggctacaggtgctggaaagaatcgaagccaaccagacgcagaatattacccgtttcgtggtgctggcgcgcaaagccgtcaatgtttccgaccaggttccggcgaaaaccacgctgctgatcgccacgggtcaacaggcaggtgcgctggttgaggcgctgctggtgctgcgcaatcacaacctgatcatgaccaaactggagtcccgtccgattcacggcaacccgtgggaagagatgttttatctcgatatccaggccaacctggaatcaccggagatgaaaaaagcgctgaaagagttgggggaaattacccgctcaatgaaggtactgggctgctaccccagcgagaacgttgtgcctgtcgatccgaactaa

SEQ ID NO: 74554 - DNA, 339 bp, Citrobacter koseri
atgacaatgaacattaccagtaaacaaatggaaattactccggcaatacgccagcatgtcgcagaccgtctcgccaaactagaaaaatggcaaactcacctgattaatccacatatcattctgtctaaggagccacagggtttcatcgctgatgccaccatcaataccccgaacggacatctggtcgccagcgcaaaacacgaagatatgtacgccgccattaacgatttgatcaacaagctggaacggcagctcaataaagtgcagcacaaaggcgaagcccgtcgtgccacaacttcagtaaaagacgccaacttcgtcgaagcagaagaagagtag

SEQ ID NO: 74555 - DNA, 738 bp, Citrobacter koseri
atgacgcgcatgaaatatctggtggcagcagccacgttgagcctgtttttggcgggttgctctggttcaaaggaagaggtgcccgataatccgcctaacgaaatctacgcgactgcccagcaaaagctgcaggacggtaactggaaacaggcaataacgcaattggaagcgttggataaccgttatccatttggaccgtattctcagcaggtgcagttggatctgatctacgcctactacaaaaacgccgatctgccgttagctcaggccgccatcgatcgttttattcgcctcaatccgacgcacccgaatattgattatgtcatgtatatgcgcggtctgaccaatatggcgctggatgacagcgcgctgcaaggtttcttcggcgtcgatcgtagcgatcgcgatccgcagcacgcccgagctgcattcaatgatttctcaaagctggtgcgtagctatccgaacagccagtacacgaccgacgccaccaaacgtctggtcttcctgaaagatcgtctggcgaagtatgaatactccgttgccgactactacaccgctcgcggcgcatgggttgccgtggtaaaccgtgtggaaggtatgctgcgcgacttcccggatacgcaggcgacgcgcgacgctctgccgctgatggaaaacgcttatcgtcagatgcagatgacgactcaggctgacaaagtggcgaaaattatcgccgctaatggtcgcaacacctga

SEQ ID NO: 74556 - DNA, 981 bp, Citrobacter koseri
atggcacaacgagtacaactcaccgcaacggtatccgaaaaccaactcggtcaacgcttagatcaggctttggccgaaatgttcccggattattcacgttcgcgcataaaagaatggattctcgatcagcgcgtgctggtcaacggtaaactttgcgataaaccgaaagaaaaagtattgggcggcgaacaggtttccattaacgcggaaatcgacgaagagatccgctttgagccgcaggatatcccgctggatatcgtctacgaagatgacgatatccttgtcatcaacaaaccgcgcgatttagtggttcaccctggcgccggtaatcctgatggtacggtactgaacgcgctgttgcattactacccgccgattgctgacgtaccgcgcgcgggtattgtgcatcgtctggataaagacaccacaggtctgatggtggtggcgaaaacggttccggcgcaaacgcgactggtggagtctttgcaactgcgtgaaatcacccgtgagtatgaagcggtcgcgatcggacatatgacggcgggcggtacggtagatgaaccgatcagccgtcacccgaccaaacgaacccatatgtcagtgcatccaatggggaaaccggcggtgactcactaccgcatcatggaacatttccgtgtgcatacgcgtctgcggttgcgtctggaaaccggacgtacgcaccagatccgcgtgcacatggcgcatatcacgcatccgctggtgggcgatcaggtgtatggcggtcgtccgcgtccaccgaagggggcatcggaagcgtttatctccacgttgcgtcagtttgatcgccaggcgctgcacgcgacgatgctgcgtctttaccatccgatttccggtattgaaatggagtggcatgcgccgattccgcaggatatggtggagctgattgacgtgatgcgcgctgacttcgaagaacataaggatgatgtagactggctatga

SEQ ID NO: 74557 - DNA, 732 bp, Citrobacter koseri
atgagtaagctaattgttccgcagtggccaatcccggagtgggttgcagcctgtagttctgtacgtacaggcggtgtcagcttaccgccttacgattctctgaacctgggcgcccattgcggcgataacccggaacatgtggaagagaatcgcaagagactctttgctgcgggcaatttgccgtcaaaacccgtctggcttgaacaggtgcatggcaaggacgtgctgaaactcaccggcgagccttatgcatccaaacgtgcggatgcgtcgtacagcaatacccccggcaccgtttgcgcggtgatgacggcggactgtttgcccgtgttgttttgtaatcgcgcgggaacggaagtggcggcggctcatgcgggctggcgcggattatgtgaaggtgtgctggaagagacggtcgcctgctttgccgataaacctgaaaacattatcgcctggctgggtccggctattggccctgctgcttttgaagtgggggctgaagtgcgtgaagcgtttatcgcaaaagatgcgaaggcgagcagcgcatttcaggcgcgcggcgaaaaatatctggcggatatttatcagcttgcgcatcaacgtctggcgaatgtgggagttgaaagcgtctatggcggcgatcgctgtacttacagcgaaagtgagactttcttctcttatcgtcgcgacaagatcacaggtcgtatggcaagttttatttggctgatataa

SEQ ID NO: 74558 - DNA, 2574 bp, Citrobacter koseri
atgcgtctggatcgtcttactaataaattccagcttgctcttgccgatgcccagtcgctcgcactggggcacgacaaccaattcatcgaacctcttcatttaatgagcgccttactgaatcaggaagggggatcggtacgtcctttattaacgtccgctggcattaatgctggccagttacgcacgagtattgatcaggcgctgagccgtttgccgcaggtggaaggtaccggcggcgacgtacagccgtctcaggatctggtgcgcgtactgaatctttgcgacaagctggcgcaaaaacgtggggacaactttatttcgtcggaactgttcgttctggcagcgcttgagtctcgcggcacgctgaccgatctactgaaatcggccggggcgaccaccgccaatatcactcaggcagttgaacaaatgcgcggaggtgaaagcgtgaacgatcaaggggctgaagaccaacgtcaggccttgcaaaaatataccgtcgacctgaccgagcgcgcggagcagggcaagctcgatccggtgattggtcgtgatgaagaaattcgccgtaccattcaggtactgcaacgccgtactaaaaacaacccggtattaattggtgaaccgggggtcggtaaaacggcgattgtcgaagggctggcgcagcgaatcattaatggcgaagtgccggaagggctgaaaggccgccgcgtactggcgctggatatgggcgcgctggtggccggggcgaagtatcgcggtgagtttgaagagcgtctgaaaggcgtgctgaacgatctcgccaaacaggaaggcaacgtcatcctgtttatcgatgaattacacacgatggtcggcgcgggtaaagccgacggcgcaatggatgccgggaacatgctgaaaccggcgctggcgcgtggagaactgcactgtgtgggcgccacgacgctggacgaatatcgccagtacattgaaaaagatgcggcgctggaacgtcgtttccagaaagtgttcgtcgcggaaccgtctgtggaagataccatcgctattctgcgtggtcttaaagaacgttatgagctgcaccaccatgtgcagattactgacccagcgattgtggcggcggcaaccttatctcaccgctacatttccgatcgccagttgccggataaagccatcgacctgatcgatgaagcggcatccagcatccgtatgcagattgactccaagccggaagaactggacaggctcgaccgccgtattattcagctcaagctggaacagcaggcgttaatgaaagagtctgatgaggcgagcaaaaaacgcctcgatatgctcaacgaggaactggatgataaagaacgccagtactctgaattagaagaagagtggaaagcagagaaagcctctctgtccggtacgcagaccattaaggccgaactggagcaggcgaaaatcgccatcgaacaggcgcgtcgtgtgggcgatctggcgcggatgtctgaacttcagtacggcaaaatccctgagctggaaaaacagctggaagcggcgactcaatctgaaggtaaaaccatgcgtctgttacgcaataaagtgacggatgcggaaatagctgaagtgttggcgcggtggacggggattccggttgccagaatgcttgaaggcgaacgtgaaaaactgctgcgtatggagcaggaattacacagccgcgtgattgggcagaacgaggccgttgaagcggtatcgaatgccattcgccgtagccgtgcgggactggccgacccgaatcgtccaattggttcgttcctgttccttgggccgaccggggtaggtaaaaccgaactgtgcaaggcactggcaaactttatgtttgatagcgatgacgcgatggtgcgtatcgacatgtctgagttcatggaaaaacactccgtgtctcgtctggttggcgcgcctccgggatatgtgggttatgaagagggcggttatctgacggaagcggtacgtcgtcgtccttattccgtcatactgctggacgaagttgagaaagcgcatcctgatgtattcaacattctgttgcaggtgctggatgatggccgtctgacggacgggcaagggagaacggtcgacttccgcaacacggttgtcattatgacctcaaacctcggttccgatctgatccaggagcgtttcggtgagctggattacggccatatgaaagaactggtgcttggtgtggtcagccacaacttccgcccggaattcattaaccgtatagatgaagtcgtggtattccatccgttgggtgaaaaacatatcgcttctattgcacagatccagttgcaacgtctgtacaaacgtctggaagagcgcgggtatgaaatccatatctctgatgatgcgctgaaattgctgagcgcgaatggttacgatccggtttacggggcgcgtccattgaaacgtgcaattcagcagcagattgaaaacccgctggcgcagcaaatcttgtctggtgagctgattccgggtaaagcgattcgtctggaggcgaatgacgatcgcattgtggcagtgcagtaa

SEQ ID NO: 74559 - DNA, 885 bp, Citrobacter koseri
atggaacgcgtacatcgtatagatcttaaattattgcgctattttctcgctgttgctgaggagctgcattttggccgggcggcggcgcgtctgaatatgtctcagcctcctctgagtcttcatgtcaaagagctggaaaatcagctcggcacgccgttgtttgttcgccattcccgcagcgtggcgttaacgcatgcggggaaaattcttatggaagagtcgcggcgtttgttgttcagcgcgaatcaggcatttgcgcgcgtggaacagatcggacgcggtgaggcagggcgcattgaactgggcgttgtgggcacggcgatgtgggggaaaatgcgtcctgtgatgcgccgttttttgaaagagaaccccaatgtcgaggtgttatttcgcgaaaaaatgcctgcgatgcagatggcgttactggagcgacgcgagctggatgctggcatctggagaatggcgatcgaaccgacggagggatttaccagcctgcgcttacatgaatccgcatttctggtggcgatgccggaagatcaccctctggcttgctgcccggcgatccctcttgatgcgttacgcaacgaatatttcgtcaccatgccttcgattcataccgactgggcatttttgcaacgtgtttgtcagaaggccggatttacgccgatgatagtgcgtgaagttatggagccgcaaacggtgctggcgatgatcagcatggggattggcattacgttaatcgcagacagttatgcgcagatgaactggccgggcgtggtgtttcgccctctggaagaacgtattccggcagatttgtatattgtttacgagccgcagcaggcaacaccggcattaacgaagttgattgatgcgctgattcgttga

SEQ ID NO: 74560 - DNA, 1257 bp, Citrobacter koseri
atgggtattacgtcccgcttaaaagtcatgtcgtttttacaatattttatctggggaagctggctggtgaccctgggttcttacatgattaacaccttacattttactggcgctaacgttggaatgatttacagctcaaaagggctggcggcgattattatgccgggcattatggggatcgttgccgataaatggctgcgtgccgagcgtgcatatatgctctgccatctggtgtgcgccggcgcgttgttgtatgccacgaccgtgaccgacccggatgcgatgttctggataatgttaattaatgcaatggcctatatgccgactattgccttatccaacagcgtttcttacgcctgcctggcgcagtctgggcaggacccggttactgcattcccgcccgttcgcgtctttggcaccgtgggctttattatcgctatgtggacggtcagcctgatggggctggagctaagcagcacgcagctgtacattgccgctggcgcttcgctgttactggcgctgtatgcctttacgctaccgaaaattccggtggcgaagaagaatacgtccgccacgcttgccagcaaactggggctggatgcgtttgtcttattcaaaaatccgcgaatggcgattttctttttgtttgcgatgatgttaggggctgtgctgcaaattacgaatgttttcggtaatcccttcctgcacgattttgcccgcaatccggcgtttgctgacagcgttgtggtgaaatatccctccatcctgctgtctgtttcccaaatggctgaagtgggtttcattctgactatcccgttctttctgaaacgctttggcattaaaaccgtgatgctgatgagtatgctggcatggacgctgcgctttggcttttttgcgtttggcgatccatccccgtttggcgttgtgctgctgctgatgtcgatgattgtttacggttgcgctttcgactttttcaatatttcaggatcggtatttgttgagcaggaagtcagttcgacgatccgcgccagtgcgcaggggctgtttatgactatggtcaatggcgtaggcgcctgggtcgggtcaattttgagtggtatcgccgtggactacttctcggtggaaggcgtgaaagactggcagaccatctggctggtattcgccgcttatgcgctggcgctggcagtgatttttgcgctgtttttcaaatataaacatgagccagaaaaatggctggcgaaaccactggcgcactaa

SEQ ID NO: 74561 - DNA, 834 bp, Citrobacter koseri
atgacccacacccttttttcgcagaatccctggtacagcgctgacatcattcgcgcgcacaagcctgattttaccccgcgtgttgctttcattcttggctccggtctgggagcgctggcggagcaaattgaagacgcggtggcgatttcttatgcgcgtttacctggttttccggtcagtaccgttcacgggcatgcgggggaactggtgctggggaatctggctggagtcccggtggcatgtatgaaaggccgtggacacttttacgaaggtcgcggcatgacgatcatgactgacgcgatccgtaccctgaaactgctgggctgtgaactgctgttttgcactaacgccgctggctccctacgcccggaagtcgggccaggcagtctggtcgcgttgagcgatcatatcaatacgatgccgggcacgccgatggtggggatgaacgacgaacgttttggcgatcgcttcttctcgctggccaatgcctacgatgcggattaccgcgccattctccagcgcgttgctggggaagagggtttcacgcttcacgaaggggtgtttgtctcttatccggggccgaactttgagacggcggcggaaattcgcatgatgcagatcatcggtggcgacgtggtgggaatgtcggtcgtcccggaggtgattagcgcgcgccattgcggactaaaggtggtggccgtatccgcgatcaccaatctggcggaagggctgggtgatgtgaaactgtcccatgcgcaaacgctggcggcggctgagctttcccggcagaacttcatcaatctgatttgcggcttcttacgccaactggcttaa

SEQ ID NO: 74562 - DNA, 342 bp, Citrobacter koseri
atgacgacgatcaacacttcagtctccgccgttcagagcggcagcacgggcaacaaagccgctaccggtaacgatctgtctgcgcaaatctcgcgcatcacgcagcaaattacaaagcttacacagcagctcaaagaggttgctgacggcagtggcagcacagaagagaaacaaaagcagcaggaactgatacagacgcaaattaaaatgttgcaggcgcagctggcgcaattacagcgccagcaggcagaagaaacgcagcagaagcaggagcagaaacaactcagggccgaaggtgtcaacgcgccttccgacgatcaccaaattgatgtttatatctga

SEQ ID NO: 74563 - DNA, 927 bp, Citrobacter koseri
atgaattattctctgcgtcaacttcgtatttttgtcaccgttgctcaggctaaaagctttagtcgggcaggggacgtcattggtctgagtcagtctgcggtgagccacagcgtaaaagagctggaacggcagacgggagttaagctgttggatcgcaccacgcgagaagtgacgttgacggaagcgggtcagcagctggcggggcgtctggagcgtgttctcgatgaactgcacagtactctgcgggaagccggaagagtggggacgcagttaaccggcaccgtgcgcgtggcggccagccagacgatttccgcgcatcttatcccgcagtgcatcgcgcagagtaaccagctgtacccgaaaattgattttgtactgcacgatcgtccccagcagtgggtgctggagagcattcgtcagggggatgtggattttggcattgtcatcgatcccggggctgtttcggatttgcaatgtgaagccgtgctgtcggaaccctttttgctgttgtgtcgccaggatagtccgttagcgcagcgggagtgggttaactggcaggatcttaaacatgagcggctggtattacaggattacgcctccggcagccgcccgttgattgacgcggctttcgcgcattttgccattgatgccacgatcgtgcaggagattgggcatcccgcaacgctgtttccgatggtggaggcggggattggcatcagcgtgttgcccgcgctggcgttgccgctgcctcagggaagtcatttgcaggtgaaacggttgacgcccgtcgtcgaaaggcagttgatgctggcgagacgcaagaaccggtcgctctctacggcggctcaggcgctgtgggacgtcgtgcgcatgcaggccagtgaacttaccgctggccgtgcacgcgatccgttgtatcagatataa

SEQ ID NO: 74564 - DNA, 999 bp, Citrobacter koseri
atgaaactttttcgtattcttgatccgttcacgctgacgcttatcaccgtcgttttgctggcctccttttttccggccaaaggggatttcgttccgttttttgaaggcttaaccaccgccgcgattgcgctgctgttttttatgcatggcgcaaaactctcacgcgaagccattatcgcgggcggcagccactggcggctgcacctgtgggtaatgtgcagcaccttcatcctgtttccggttctcggggtgttatttgcctggtgggcgcccgtcaatgtcgatcccatgctgtataccggtttcctgtacctgtgtattttgcccgcgaccgtacagtctgccatcgcctttacctctctggcgggaggaaacgtcgctgcggccgtctgttcggcatcggcctccagcctgctggggatttttctttcgccgctgctcgtcggcctggtgatgaatatccacggagcggaaggcagcctggaacaggtcggcaagatcatgctgcaactgctgctgccgtttgtgctggggcacctgtcgcgtccgtggattggcaactgggtcgcgcgtcataaaaagtggattgcaaaaacggaccagacctccattctgctggtcgtctattccgcattcagcgaagccgtcgttaacggtatctggcacaaagtgggatggggctcgttgttgtttattgtcgtcgtcagccttgtgctgctggcgattgtcattggcgttaacgtgtttgccgcccgcaggttcggattcaacaaagcagatgagataaccattgtcttctgcgggtcgaaaaagagtctggcgaacggcatcccgatggccaatatcctgtttcccacctcagtgattgggatgatggtgctgccgttgatgatcttccatcagatccagttgatggtctgcgcgatgctggcgcgtcgctacaaacgccagaccgataagttgcaggcgcagcaagaaggccgcgccgcgaaggcttaa

SEQ ID NO: 74565 - DNA, 219 bp, Citrobacter koseri
atggaaaaagagcagctgattgagatagccaacacggtgatgccgttcggcaagtacaaagggcgtcggctcattgatgtgccggaggagtatttgctgtggtttgcccgtaaggatgaatttccggcgggaagactgggcgagctgatgcaaatcacgctgctgattaaaaccgaggggctgacgcagctggtgcagcccctgaaacggcctctttaa

SEQ ID NO: 74566 - DNA, 2016 bp, Citrobacter koseri
atggaatcaatcgaacaacaactgacagaactgcgaaccacgcttcgccatcatgagtatctttaccatgtgatggatgcgccggagatcccggacgctgagtatgaccgtctgatgcgcgaacttcgcgagctggaagcgcagcatccagatttaattacgccggactccccgagccaacgcgtcggagcggcgccgctggcggcgttcagccagattcgccacgaagtgcccatgttgtcgctggacaacgtgtttgatgaagagagttttctggcgtttaacaagcgcgtgcaggatcggttaaaaaacagcgataaactgacctggtgctgcgagctgaagctggacggtctggccgtcagcatcctgtatgaaaacggcgtgctgatcagcgcggcaacgcgtggcgatggaacgaccggcgaggacatcacctccaatgtacgtaccattcgcgctattccgctgaagctgcgtggcgataacattccggcgcgtctggaggttcgtggcgaagttttcctgccgcaggccgggtttgaaaaaattaatgaagaggcgtgccgcaccggtaataaagtgtttgccaacccgcgtaacgctgcggcggggtcgttgcgccagcttgatccgcgtattaccgcgaagcgaccgctcactttcttttgctacggcgtcggcattctggaaggtggcgaactgcccgatacgcatctggggcgcttgctgcaatttaaagcctgggggcttccggtaagtgaccgggtgacgctgtgcgactctcccgaagcggtgctggacttctaccacaaagtggaagaagaccgcccgacgctgggttttgacattgacggcgtggtgattaaagtcaactcgatggcgttgcaggagcagcttggatttgtcgcccgcgcgccgcgctgggcggtggcctttaagttcccggcgcaggagcaaatgacgtttgtacgcgatgtagagttccaggtggggcggactggcgcgatcacgcccgtcgcccgtctcgaaccggtgcatgttgcgggtgtgctggtcagcaacgccaccttgcacaacgcggatgaaattgagcgtcttggcctgcgcattggcgacaaagtggtgattcgccgcgcgggggatgtgatcccgcaggtggtgaacgtggtgctttccgaacgcccggaagagacgcgcccggtcgagttcccgacgcattgcccggtgtgcggttctgatgtcgagcgcgtggaaggcgaagcggtcgctcgctgtaccggcggcctgatctgcggagcgcagcgcaaagagtcgctcaagcactttgtttcccgccgggcaatggacgttgacggcatgggcgataaaattatcgaccagcttgtcgagaaagagtatgtccacaccccggcagatctgttccgtctgacggcaggcaaactgacgggcctggatcgtatggggccgaaatcggcgcagaatgtggtgaatgcgctggaaaaagcgaaagagaccaccttcgcgcgattcctctatgcgctcggtatccgcgaagtgggcgaagccacggcggcagggctggcggcgtacttcggtacgttagaggcgctggaagcggcctctatcgacgaactgcaaaaagtgccggatgtcggtattgtggtcgctacgcacgtctttaacttctttgctgaagagagtaaccgggatgtgatcgggcagttactggcggaaggcattcactggcctgcgccgatcgtggttaacgccgacgaaatcgacagcccgtttgccggtaaaacgatcgtcctgacgggcagcctcagcctgatgtcgcgagatgatgcgaaagcgcgcctcgtggcgctgggggcgaaggtggcgggcagcgtatcgaaaaaaaccgatctggtgattgcgggtgaagcggcgggatctaagctggcgaaagcgcaggaactggggattgacgtgatcgacgaagcagagatgctccgcctactgggtgtctga

SEQ ID NO: 74567 - DNA, 1026 bp, Citrobacter koseri
atgatgcaggatttgcgtctgatattaatcattgttggcgcgatcgccataatcgctttactggtacatggtttctggaccagccgtaaagaacgatcttctatgttccgcgatcgtccactgaaacgcatgaagtcaaaacgtgacgacgattcttacgacgatgacgtcgaagaagaggaaggcgtgggtgaagttcgtgttcaccgcgtgaatcatgcccccggcaacgttcaggagcatgatgcgcctcgtcagtcgccgcaacaccaataccagccgccttatgcgtctgcgcagcctcgtcaaccggctcagcagccgcctgaagcgccagcgcagccgcagcaacggccgcagtatgggcagccgtcacaaccgcaaccggcacaacaaccggcacagcctgtgcagcagccagtacagcaacagccggtagcgccgcaggttcagtctgcgccgcaacagcctgttcagccagcgccacagcaacctgcgcctcagcctgctccgcagactttccagccagcggaacctgtcacagagcctgcgccagcgcctgaaccagtagtggaagaagcgcccgtcgcggaaaaaccgcagcgtaaagaagcggtcattattatgaacgtcgccgctcatcatggcagcgagcttagcggcgaagtgctgctgaacagcatccagcaagcgggcttcaaatttggcgatatgaatattttccatcgccacctgagcccggatggcagcggccctgcgctgtttagcctggccaatatggtgaatccgggaacgtttgatcctgaaatgaccggtgatttctccacgccaggggtcactatctttatgcaggtgccttcttacggcgacgagctgcaaaactttaagctgatgctccagtctgcgcagcatatcgctgatgaagtcggcggcgtggtgcttgatgaccagcgccggatgatgacgccgcagaaactgcgtgaatatcaggatcgcattcgcgaagtgaaagaatccaacgcctga

SEQ ID NO: 74568 - DNA, 762 bp, Citrobacter koseri
atggtgtcatcatccgcaactgcacctcgcagcggcttttactatttctcacaggggtggaaactggtcacgcaaccggggatccgtcgctttgttattttgccgttactggtaaacattttgctgatgggcggcgcattctggtggctgtttacgcaactggacgtctggatcccttcgctgatgagccacgttcccgactggttgcagtggttaagctatctgctgtggcccattgcggtcatctcggttttactagtcttcggctatttcttttcaaccattgccaactggatcgcagcccctttcaatgggctgctggcggaacagcttgaggcgcgcctgaccggcgcaacgccgccagataccggcgtactgggtattatgaaagatgtgccgcgcattatgaaacgcgaatggcaaaagttcatctggtatctgccgcgcgccattgtgctgttaattctctattttattccaggagtcgggcaaaccgtcgccccggtgctgtggttcctgttcagcgcgtggatgctggcgattcagtattgcgactatcccttcgacaaccacaaagtcccgttcaaagagatgcgcgccgccctgcgcacgcagaaagtcgccaatatgcagttcggcgcgttaaccagtttgttcaccatgatcccggtgcttaacctggtgatcatgcccgtcgccgtgtgtggcgcaacggcgatgtgggttgattgctaccgttccagacatgggtcatggaaatga

SEQ ID NO: 74569 - DNA, 972 bp, Citrobacter koseri
atgagtaagatttttgaagataactcgctgactatcggtcatacgccgctggttcgactgaaccgtatcggtaacggacgcattctggcgaaggtggaatcacgtaacccgagcttcagcgttaaatgccgtatcggtgccaatatgatttgggatgccgaaaaacgcggcgtgctgaaaccgggcgtcgaactggtggaaccgaccagcggcaacaccggtatcgcgctggcttatgttgctgccgcgcgtggctacaagctgacgctgaccatgccagacaccatgagcgttgagcgtcgcaaactgctcaaagcactgggggcgaacctcgtactgaccgaaggcgcgaaaggcatgaaaggcgctatccagaaagcggaagagattgtcgccagcgatccagaaaaatacctgctgcttcagcagttcagcaacccggctaacccggaaattcacgaaaaaaccaccggcccggaaatctgggaagataccgatggtcaggtcgatgtctttatctccggcgtcggcaccggcggtacgctgacaggcgtcacccgctacatcaaaggcaccaaaggcaaaacggacctcattaccgtagcagtagaaccgaccgactctccggttatcgcgcaggcgctggctggtgaaaaactgaagcccggcccgcacaaaattcagggcattggcgcaggcttcattccgggcaacctcgatctgaaactgattgataaagttgtcggcatcacaaatgaagaagccatttccaccgctcgtcgcctgatggaagaagaaggtattctggcggggatctcttccggcgcggccgttgcggcagcacttaagctccaggaagatgaaacctttaccaataagaatattgtggttatcctaccgtcatcgggtgagcgttatctgagcactgctttgtttgccgatctctttactgaaaaagaactgcaacagtaa

SEQ ID NO: 74570 - DNA, 258 bp, Citrobacter koseri
atgttccagcaagaagttaccattaccgctccgaacggtctgcacacccgccctgctgctcagtttgttaaagaagcgaaaggcttcacttctgagattactgtgacttccaacggcaaaagcgccagcgcaaaaagcctgttcaaactacagactctgggcctgactcagggcaccgttgtcaccatcgctgctgaaggcgaagacgaacaaaaagcggtagagcatctggtcaaactgatggcggaactcgagtaa

SEQ ID NO: 74571 - DNA, 1728 bp, Citrobacter koseri
atgatttcaggcattttagcatccccgggtatcgctttcggcaaagcactgctgctgaaagaagacgaaatcgtcattgaccggaaaaaaatttctgccgacaaggttgatcaggaagttgaacgttttctgagcggtcgtgccaaggcatctgcgcaactggaagcgatcaaaacgaaagctggtgaaacgttcggtgaagaaaaagaagccatctttgaagggcatatcatgctgctcgaagatgaggagctggagcaggaaatcatagccctgattaaagataagaacatgacggctgacgcagctgcgcatgaagttatcgaaggtcaggccactgccctggaagaactggatgatgaatacctgaaagaacgtgcggctgacgtgcgtgacattggtaagcgcctgctgcgcaacatcctgggtctggcaatcatcgacctgagcgcaatcaaggacgaagtcatcctggttgccgctgacctgaccccatcagaaaccgcacagctgaacctgcaaaaggtgctgggtttcatcactgacgcaggtggccgtacctcccacacctctatcatggcgcgttctctggaactgccggccatcgtgggcaccggtaacgtcacctctcaggtgaaaaacgacgactatctgattctggatgccgtaaacaatcaggtttacgtcaacccaaccaacgaagaaattgaaaaactgcgcgccgttcaggagcaggttgcaaccgagaaagcggaactcgctaaactgaaagatctgccggctatcacgctggacggtcatcaggtagaagtttgcgccaacatcggtaccgttcgtgacgttgaaggcgcagagcgcaatggcgcggaaggcgttggtctgtatcgtactgaattcctgttcatggaccgtgacgcgctgccgactgaagaagaacagtttgcggcgtacaaagccgtcgctgaagcctgcggctctcaggcggttatcgtccgtactatggatatcggcggcgacaaagaactgccgtacatgaacttcccgaaagaagagaacccgttcctgggctggcgtgcggtacgtatcgcgatggatcgcaaagagatcctgcgtgatcaggttcgcgccattctgcgcgcctctgcgttcggtaaactgcgcatcatgttcccgatgatcatctctgttgaagaagttcgcgcgctgcgcaaagagattgaaatctacaaacaggaactgcgcgacgaaggtaaagcatttgatgaaagcattgagattggcgtaatggtggaaacaccagctgcggcaaccattgctcgtcatttagctaaagaagttgatttctttagtatcggcaccaatgatttaacgcagtacaccctggcagttgaccgtggtaatgatatgatttcacatctttaccagccaatgtcaccgtccgtgctgaacttgatcaagcaagttattgatgcttctcatgctgaaggtaaatggactggcatgtgtggtgagcttgcaggcgacgaacgtgctacacttctgttgctggggatgggtctggacgaattctctatgagcgccatttctatcccgcgcattaagaagattatccgtaacacgaacttcgaagatgcgaaggtgttagcagagcaggctcttgctcaaccgacaacggacgagttaatgacgctggttaacaagttcattgaagaaaaaacaatctgctaa

SEQ ID NO: 74572 - DNA, 510 bp, Citrobacter koseri
atgggtttgttcgataaactaaaatctctggtttctgatgataagaaagacaccggaactattgagattgttgctccgctctctggcgagatcgtcaacatcgaagacgtgccggatgtagtttttgccgagaaaatcgttggcgatggcattgctatcaaaccaaccggtaacaaaatggtcgcgccagtagacggcaccatcggcaaaatctttgaaaccaaccatgcgttctctatcgaatcggatagcggcattgagctgttcgttcacttcggtatcgacaccgttgaactgaaaggcgaaggcttcaagcgtattgctgaagaaggtcaacgcgttaaagttggcgatccggtaattgagttcgatctgccgctgctggaagaaaaagccaagtctaccctgactccggttgttatctccaacatggacgaaatcaaagaactgatcaaactgtccggtagcgtgactgtgggtgaaaccccggttatccgcatcaagaagtaa

SEQ ID NO: 74573 - DNA, 240 bp, Citrobacter koseri
atgaagagttatcggctggtggttcgccagcaggggcgtgtggttggtcactttgaaacgagcgggcttgatgcgctggaggatatctgcgtggcgcgcgcgatgttcggcattgcgggcggctatcagtgcgaattgctggtgtcggactcggagaagcggatgctggaaagcgggccggaagggatgaagatcctgatgcgcgagaagtgctatcgtccagtcacctcgctgttgtga

SEQ ID NO: 74574 - DNA, 867 bp, Citrobacter koseri
atggggcaggatagtgaaatacagtcagtgctcttcgacgataagcatcgggctttacagaccgacattgtcgccgttcagtcacaggtggtgtacggcagcgtaggcaacagtattgccgtaccggcgattaaagcgcagggcttgcgggtgacggcggtgcccacggtgctgttcagcaatacgccgcattatgaaacgttttacggcggcattattcctgccgactggttcagcggttatcttcaggccttaaatgagcgggatgcgctgcgtgagcttaaagcagtcacgacaggctatatgggcagtgcggaacaaatcgttctgctggcgaaatggctggaaacggtgcggatcgcgcatcctgaggtgtgcattctggtcgatccggtgattggcgacacggacagcggaatgtatgtgaaagcggaaatcccgcaggcgtatcgtcattatctgctgccgttggcgcaggggctgacgccgaatgtgttcgagctggagatgctcagcggcaaaccgtgcggcacgctggatgaagcggttgcggcggcgaaatcgctgctctccgacacgctgaagtggattgtgatcaccagtgcgccaggccagacggcggataccatcaatgtggcggtggtgacgaacggcggcgtggatgtgattgaacacccgcgtgtggaaaccgatttaaaagggacgggcgatctgttctgcgccgaactggtgagcggtattgtgcaggggaaagcgctgacggcggcgacgcgacatgccgcagagcgtgtgctggaggtgatgacctggacgcagcgctgcgggtgtgatgagttgattctgccaccggcaggggaggcgcgatga

SEQ ID NO: 74575 - DNA, 1293 bp, Citrobacter koseri
atgatcgacggaaaaaccgccagcgaaatctttgacagtattcgtcagcatgtcaccaccggcgcactggcgccaggggaaacgctgccaccggtgcgggaactggcatcggaattaagcgtgaaccgcaatactgtcgcggcggcttacaaacggctggtgacatccggcctggccctgagccagggacgtaacggtacggtcattaaaggtgcgccttctccgttcgcgctggaaggaagcagccccgatacgccgttgaccgatctttccggcggcaatcccgatccccaacggctgcccgatctcagcagttatttttcgacaataaataagtcaccgcgtctttacggcgatgcggccgtttctcccacccttcacgcgtgggcgaagcagtggatgcaggatgccgtacctgacgaaggcgagattgatatcaccagtggggcgattgacgccatcgagcgtctgctgtgcgcccatttactgccgggtgacagcgtggcggtggaagatccctgctttttaagcagcatcagtatgctgcgctacgccgggttttccgccatccccgtcggcgtcgatagcgaaggtatgcagcctgagatgctggaacaggcgctgaaaaatggcgcccgcgccgtcattttaactccgcgcgcccacaatcctacggggtgcagtttaagcgcctcccgcgccgccgcgctacagaacattgtggcgaaatacccgcaagcgctggttattatcgacgaccactttgccctgctctcttcatctccctggcacccggtgatcgccccggagacgctacactggtcagtggttcgctcgatgtcaaagacgctggggccggatctgcgtcttgccattgtcgccagcgatcccgccacctcagccagactgcgtctgcgccttaattccggcagtcagtgggtcagccatctgttgcaagatttagtgcatgcctgtctgagtgacaaaaactatcagcgaacgctggcgcagacccggcaattttatgcttcacagcagcagaagctggcctgcgcgctccagcgaaccggtcttacacacgcccccggcgatgggctgaatgcgtggttgccgttgaaaagccacagccagggcatcgcgtttatgctggcgaaagcgggctggctggtacgggaaggcgaagcatttggcgtcaacgcgcccgcccacggtctgcgcattacgctgtcgacgctgggcgacggcgatatcaacaaactggcggctgatatccatcaggcgttgaaacgttaa

SEQ ID NO: 74576 - DNA, 717 bp, Citrobacter koseri
gtgcgagttcattttgtcgttcatgagtctttcgaatctgccggagcctatctgcaatgggctgaggatcgcggttaccccctctcctggtcccgcgtgtatgccggtgaacctgtccccgccaatgcggatggtttcgatatgctggtggtgtttggcggcccgcagtcaccgcgtactacgctcgaagagtgcccgtattttgactctttagcggaacagcggcttattaatcaggcgatctctgcgcgtcgtattgtgatcggcatctgtcttggttcccagttgattggtgaggcgctgggcgcaaaagtacgccagagcccggaaaaggagatcggccactacccgattacgctgacggaagccgggaaacagaatccgctgctcgctcatttcggctctccgcttgtggtcgggcactggcacaacgatatgccagggttaaccgatcagtcggtcgttctcgcgacaagcgaaggatgtccgcgccagatcgtgcaatacggtaacgccgtctacggttttcagtgccatatggagtttaccgccgaggcggtagaagggctgatccagcattcagaacaggaactggctgcggcaaaagggaagcgctttattcgctcgaacgccgaaatgcgcgagtggaattatcaggagatgaacgagaaactgtggcgcttcctcgacctgctggttgagaaacgtaacgcttga

SEQ ID NO: 74577 - DNA, 969 bp, Citrobacter koseri
atgatctgcgtcggcccggtaagcgaagcgccaccgggctttttactggacagagaagtgaacacattagaacaaacaattggcaatacgcctctggtgaaattgcagcggatggcgccggataacggcagtgaaatttgggtcaagctggaaggcaataaccctgccgggtcagtgaaagaccgggcggcgctgtcgatgatcgtccaggcggaaaaacgcggggaaattaagcccggcgatgtgctgattgaagcgaccagcggcaataccggtattgcgctggcgatgattgccgcactgaaaggctatcgcatgaaactgctgatgccggacaacatgagccaggagcgccgcgcggcgatgcgcgcctatggcgcggatctgattctggtgtctaaagagcaagggatggaaggcgcgcgcgatttggcgctggaaatggccgaacgcggagaaggtaagctgctcgatcagtttaacaatcccgacaacccttacgcgcactacaccacgaccgggccggaaatctggcagcaaacctcaggccgcatcacccactttgtctccagtatgggaacaaccggcacgattaccggtgtgtcgcgcttcctgcgcgaacaggaaaaaccggtaacgattgttggcctgcaaccggaagagggtagcagcattccggggattcgtcgctggcccgcagaatatatgccgggtatttttaatgctcagcttgtggatcaggtgctggatattcaccagagcgaggcggaaaataccatgcgcgaactggcagtacgcgaaggtattttctgcggcgtgagttccggcggcgcggttgccggtgcattacgcgttgcccgcgcgacgccgggggccgtggtggtggcgatcatctgcgatcgcggcgatcgctatctttctaccggcgtctttggcgaagaacacttcagccagggggcagggatttag

SEQ ID NO: 74578 - DNA, 1098 bp, Citrobacter koseri
atgagcattgagattgccaatattaagaagtcttttggtcgcacccaggtgctgaacgatatctcgctggatattccttcaggtcagatggttgccttgctggggccgtccggttccggtaaaaccacgctgctgcgtattattgccgggctggagcatcagaccagcgggcacattcgttttcacggtacagacgtaagccgtctgcacgcgcgcgatcgtaaagtcggctttgtttttcagcactatgcgctgtttcgtcatatgacggtgttcgacaatatcgcctttggcctgacggtgctgccgcgtcgcgaacgtccgaatgcggcggccattaaagcgaaagtgacgaaactgctggaaatggtgcaactggcccatctggcggagcgttttccggcacagctttccggcgggcagaaacagcgcgtggcgctggcgcgcgcgttagcggttgagccgcagatcctgctgctggatgaaccgtttggcgcgcttgatgcgcaggtgcgtaaagagctgcgccgctggctgcgtcagctgcatgaagagttgaaattcaccagcgtgtttgtcacccacgatcaggaagaggctacggaagtggcggatcgcgtggtggtgatgagccagggcaacattgaacaggccgatgcgccggatcaggtgtggcgtgaacccgccacccgctttgtgctggagtttatgggcgaagtgaaccgtttgcaggggactgttcgcggcggtcagttccacgttggcgcgcatcgctggccgctggggtatacgccagcgtaccagggagcggtcgatctgttcctgcgtccgtgggaggtggatgtcagccgccgcaccagtctggattccccgctgccggtacaggtgctggaggccagtccgaaaggtcactacacccaattagtcgtgcagcctctggggtggtataacgaaccgctgacggtggtgatgcagggggataatcccccacagcgcggcgagcggctgtttgtcgggctgcaaaatgcgcggttgtacaacggcaaccagcgcattgagacgcgcgaagaggagcttgctctggcagaatcggcctga

SEQ ID NO: 74579 - DNA, 876 bp, Citrobacter koseri
atggcggaagttacccaattgaagcgttatgacgccccccgcattaactggggaaaatggtttctgattggcaccgggatgctggtttcggcgtttattttgctggtgccgatgatttatatcttcgtacaggccttcagcaaagggctgatgccggtcttacagaacctggccgacccggacatgctgcacgcgatctggctgacggtgttgattgcgctgattgccgtaccggtaaacctggtgtttggcgttttgctggcgtggctggtgacgcgctttaattttcccggtcgccagctgctgctgacgctgctggatattccgtttgccgtctcgccggtggtggccggtctggtctacctgctgttttacggctcgaacggcccgctgggcgactggctggatgagcacaacctgcaaattatgtttgcctggccggggatggtgctggtcactattttcgtcacctgtccgtttgtggtgcgtgaactggtgccggttatgctgagtcagggcagtcaggaagatgaagcggcgattctgcttggcgcttccggctggcagatgttccgtcgcgttacgttgcctaatattcgctgggcgctgctgtacggcgtggtgctgaccaacgcgcgcgccattggcgagttcggcgcggtgtcggtggtttccggctcgattcgcggcgaaaccctgtcgctgccgttacagattgaattactggagcaggactacaacaccgtcggctcctttaccgccgccgcgctgctgacgctgatggcgattattaccctgtttttgaagagtatgttgcaatggcgcctggaaaatcaggagaaacgtgcgcaacaggaggaaaatcatgagcattga

SEQ ID NO: 74580 - DNA, 834 bp, Citrobacter koseri
atgttcgcagtatcgacaagacgtgtgctgcccggctttaccttaagcctcggaaccagcctgttgttcgtctgcctgatattgctgcttccgttgagcgcgctggtgatgcagctggcgcaaatgagctgggcgcaatactgggaggttatcaccaacccgcaggtggtagcggcctacaaggtcacgctgttgtcggcgtttgtggcatcaatcttcaacggcgtatttggcctgctgatggcgtggatcttaacccgctatcgctttccgggacgtacgctgctggatgcgctgatggatctgccgtttgccctgccgacggcggtggcgggtctgacgctggcgtcattgttttccgtgaacggtttttacggcgaatggttggcgaagtttgatatcaaagtgacttacacctggcttggcatcgcggtagcgatggcttttaccagcatcccgtttgtggtgcgcacggtgcagccggtactggaagagttaggcccggaatatgaagaagcggcggaaacgctcggcgcaacgcgcctgcaaagtttccgcaaagtggtgttgccggagctgtctcctgcgctggtggcgggtatcgcgctctcgtttacccgaagcctcggcgagttcggcgcggtgatttttattgccgggaacattgcgtggaaaactgaagtgacctcgctgatgatttttgttcgtttgcaggagtttgactatccggcggccagcgcgattgcgtcggtgatcctcgcggcgtcgttgttgctgctgttctcgattaacaccctgcaaagtcgctttggtcgacgtgtggtaggtcactaa

SEQ ID NO: 74581 - DNA, 1017 bp, Citrobacter koseri
atggctgttaacttactgaaaaaaagatacctggcgctgagcgcgatgctgttgttggccacgcaggcgcaggcaacagagctgctgaacagttcatacgacgtttctcgcgaactgtttgccgcccttaatccgccgtttgaacagcagtgggcgaaagataacggcggcgataagctgaccatcaagcagtctcacgccggttcgtcaaaacaagcgctggcgatcctgcaagggctgaaagctgacgtagtgacctataaccaggtcacggatgtgcagatcctgcatgacaaaggcaggctgatccctgccgactggcaaagccgtttgccgaataacagctcaccgttctattccacgatgggattcctggtgcgcaaagggaatccgaaaaatatccatgactggaatgaccttgtgcgttccgatgtaaaactgattttcccgaacccgaaaacctcaggcaacgcccgttacacctatctggctgcatggggcgcggcggataaagctgacggtggcgataaagccaaaaccgagcagtttatgacccagtttctgaagaacgtcgaagtgtttgacaccggcggtcgcggcgcgaccaccacctttgcggaacgcggcctgggcgatgtgctgattagctttgaatcggaagtgaataacatccgtaaacagtatgaagcgcagggatttgaagtcgttatcccgaaaaccaatattctggccgaattcccggtggcatgggtggataaaaacgtacaggccaacggtactgaaaaagcggcgaaggcttacctgaactggctctacagcccgcaggcgcagaccatcatcaccgacttctactatcgcgtgaataacccggaagtgatggacaaactgaaagataaattcccgcagaccgaactgttccgcgtggaagataagtttggttcctggccggaagtgatgaaaacccacttcggcagcggcggcgagctggacaaactgttggcggcggggcgtaagtaa

SEQ ID NO: 74582 - DNA, 792 bp, Citrobacter koseri
atgggtaaactcacgggcaaaacggcattgattaccggcgcgtcacagggcattggcgaggggatcgccagagtgtttgctcgccacggcgcgaatttaattttgctggatatctccgatgaggcggaaaaactggcggatgagctgggcggacgcggtcatcgttgtaccgccatcaaagcggatgtcagggattttgcatcagtcgcggcggcagtggcgcgcgcgaaaaagatagaaggtaaaattgatattctggtcaacaatgcgggtgtttgccggttgggcaacttcctcgacatgagcgaagaagatcgcgatttccatatcgatattaatatcaaaggcgtctggaacgtcacaaaagccgttctgccggaaatggttgaacgcaaagatgggcgtatcgtcatgatgtcctccgtgaccggggatatggtggccgatccaggcgaaacggcttatgccctgtctaaagcggcgattatcggactcaccaagtccctggccgtggagtatgcgcagtccggcgttcgtgtgaacgcaatctgtccgggttatgtccgcacgccgatggcggaaaatattgcccgtcagtctaatcctgacgatcctgaatcggtactcaccgaaatggcgaaagcgatcccgatgcgccgtctggcctgtccgctcgaagtgggtgaactggcggccttcctggcgtcggatgagtccagctatttgaccgggacgcaaaacgtgattgatggcggcagcacgctgcctgaaagcgtgagcgtgggcgtctga

SEQ ID NO: 74583 - DNA, 864 bp, Citrobacter koseri
atgttgtatctggcgaaaatgcgtaatgcagagggagagttaacggaaaatgaacagaaaattgccagctttcttttggctcatgtcagcgagctaaaaaccgtttcttcccgcaatctggcgaagcagctggaagtcagccagtccagtattgtgaaattcgcccagaagcttggcgcgaagggattcaccgagctcagaatggcgctcattgaggagtacagcgtcaaccgggaaaagaaacatgacacggcgctgcatctgcacagtacgattaccagtgaagacagcctggaggtgattgcccgtaagctgaacagagaaaaaatgttcgcgctggaggaaacctgtagtctgatggatttcgatcgcctgaagcaggtgattaacctgatcagcaaggcccggcttattcagattacgggtgtcggcggttcggcgctggtaggacgggatttatccttcaagctgatgaaaattggttatcgcgtggcctgcgaggtcgatacccatgtgcaggcaaccattgctcaggccttacaggaaggggacgtgcaaatagccatttcctacagcgggtcgaaaaaggagatcgtgctttgcgccgaagcggcgcgtaagcagggggcgacggtaattgcgatcacctctttgacggactctccgctgcggcggctggccgattacacgctggataccgtatccggtgagaccgaatggcgcagttcgtccatgtccacccgaaccgcgcagaactcggtgaccgatctgctgtttgttggcatggtgcagctcaatgatgttgagtcgcttcgtatgattgagcgcagcagcgaactgattaatcttttaggcaagagctag

SEQ ID NO: 74584 - DNA, 1086 bp, Citrobacter koseri
atgaaacgtactctgaagtccctggcaatctttactctcctcgcaaccagcgccagccatgccgccgtgatctaccaggccaatgacggatcgaatatcgatctctacgggcgtctcggattcaatatctctgacaagaaatcaggcgacacctcgggcgattttgacgcgcgtatcggtttctccgcccgccaggcgattaatgacaagctggccgttattggttttacgcagtatcaggtaaatgccgcagagtacgcgaacaacatcagcgcggaaaacccgaatgacttcaccgcgcgttacgtctgggcagggattgattttgccgaatacggcaagctgaccggcgggcgcgtgtcatccggcctgatcatgttcacggatatcggcgatgtgttcgccagctccgatgtcgcaatggctcgccaggcaaactttgttgacccgacggcagtacaggttttccgtcaggacggcaccattcagtaccagaacacattcggcaattttgatttctctaccgcctatattctgggcaacaacacctccgatctggattacggttataatgccgcccttcgctatacgctcgatatgggcgattttggccgcctccagccggtgattgccggtcagacagagaaagcgagccatgacgatacatccacgctgtcggataataatgtcgataagtacaccttttatggcatcggcacccgctactacctgggcgatttcatgttcggcctgctctatgcccaggataaagtcacctacctcgacggttctgcggacagcaccgataaagattacgaagcaacgctggtctggaacgtcagcccggactgggcgttacgtaccggctatcgccatctgaaaaatgaggacggcgacgggctgaaacttcgcgacaccacctttgaagcgcagtacaaactcaccgttcgcagttccatatttgcgtcttactcctggcgtaatggtgaagaagggaaaaaacggacgaacggcaatgatgtctcctttggcggcagcaacccggctgatgactatttccaccttggcttacgttacgaattctga

SEQ ID NO: 74585 - DNA, 591 bp, Citrobacter koseri
atgaagaaatattttgtgtccgccgcagcactgttgttttgcagccaggcttttgccgctccgcatctctttattggcgataacgtcagcgtgctggcggcccgttcggcaaaagtcagtatttttagtaaagacgtggcgctgccagacggcgctcaaaaaatggtagtgaagttcgacagtccagcaaatcctgaatcggtgaacaataaccggggccgcgtgacgtctaacccgtatatcatctcgtttaacgcttccggcaatgtggatctgcaactgtctgcgggaaaaccgctggacgaaaaagaagccagtcagatggcgcaaaaaccggtattcaccctgacggcggccgggaaacccgtaccgtttgatatcaaaattctcgaccgtgacagcatcaccgtgttcaccgacctgagcgccatcgtcaacgatgacagcacgatgataccttctccggcgcgctccgcttccccggcggcgcccgccacttcgcatgaccagctctcccagctacagcaactgtatctgaaagctgacgacacccagaaaaaagcattcctgaaatgggcgctaaacctgtaa

SEQ ID NO: 74586 - DNA, 897 bp, Citrobacter koseri
atgcaacttgaaaatatgattaccgaaggtgttaaccgcgcctcttttgagattgaccgggcttccaccctcgatatgtgccgcatcattaatgatgaagataaaacggttccactcgccgtggagcaggttctgcccgagatcgccgcggctatcgacatcatttatgcgcaggtcagcgctggcgggcggctgatttataccggcgccggaacgtccggtcgcctgggtatccttgacgccagcgaatgccccccgacctatggcgtggaatcaggcctggttatcggtttgatcgccggtggcgagcgcgcgatacagcatgcgattgaaggcgcggaagacaaccgcgagcttggggtcaacgacctgaaagccctcgcactcaatgaaagagatgtggttgtgggcattgcggccagcggtcgcacgccgtatgtgattgccggtctggaatatgcccgtacgctcggctgccggacgatcgggatctcctgcaatccggggagcgccgtagcaaaggcggcggagcttgccatcacgcccgttgtcggcgccgaagtggtgagcggttcttcccgtatgaaggcgggcaccgcgcagaagctgattctcaacatgctgtccaccggcctgatgattaaatccggcaaggtgtttggcaacctgatggtggatgttgtcgccacgaacgaaaaactcaacgtgcgtcaggtaaatattgtgaaaaatgcgacaggctgcaccgggcaacaggctgaagccgcgctgatagcctgtggccgtcactgcaaaaccgctatcgtcatgctactgaaaaacctcaacgcaacagaagccagtctgcgtcttgagcaacatggcggcttcattcgccaggtactggaagaggaataa

SEQ ID NO: 74587 - DNA, 1431 bp, Citrobacter koseri
atggcaaaagaaatcagtaatgatctcctgaatacgattatctcccgggtcggtggcccgggtaatattgccacctgcgggaactgcatgacccgtttacgcctggcggtacatgacagcgatcgggtcgatccggcgattaaaacgctcgaaggcgtgaaaggcgtggtcctctcgaataaccaggtgcaggtcatttttggccccggtaaagcgcagcgggcggcagatgccatgaatgcgctactgagcgacaacagcggcgccgtcacgcaggcggcagatatcgccgccaaaaccaaaagccagctaaaagcgaaacaaacctcaggcattcagcaattcctgtcgaagttcgccactatttttacgccgctcattcccggttttattgctgcgggtctgctgctggggattgccacgctgctgggtacggtattgcacgttccggccgatgcgcaaggtatgcttcccgacgccctgaactttatgaaagtattcagtaaagggctgtttacctttctggtcattcttattggctataacgccgcgcaggctttcggtggcaccggcgttaacggggcgatcatcgcctcgctgttcctgttgggatacaaccctgccgccaccacgggctatttctccggtattgaggacttctttggcctgccgatcgacccgcgcggcaacattatcggcgtactgatcgccgcctgggccagcgcgcgtattgagggctttatccgacgctttatgcccgacgatctggacatgctgctgacctccatgttaaccctgctggtcactgccgcactggcctacctgatcatcatgccgctgggcggctggctgttcgaagggatgtcatggctctttatccacctcaacagcaacccgctgggctgcgccgttctggcgggtctgtttcttgtttcggtggtgtttggcgtccatcagggcttcattcccgtctatctggcattaatgagtagccagggattcaacagcctgttccctattctttctatggctggcgcaggtcaggtcggcgccgcactggcgctctactggcgagcagaaaaacacagcgtgttacgcagccaggttcgcggggcgattattcccggcttactcggtgttggcgaaccgctgatttacggcgttacgctgccacgaatgaaaccgtttatcaccgcctgcctcggcggcgctgccggggggcttttcatcggcttagtggcctggtcgggtctgccgatgggcttaaacagcgcctttggcccatccggtctggtggcgctgccgttaatgacgtccgcgcaaggtattctgcccgcaatggcggtatatgccggaggaatgctgattgcgtatcttggcggatttatttttaccgctctctttggctgccgtaatgtgaatctggactaa

SEQ ID NO: 74588 - DNA, 1305 bp, Citrobacter koseri
atgaaaatgacattactttttgcttccctgctggcgctcagttgcaccgccagcgccgcgccatttccggtattgactgacgccgcgccggaaaaagcaggatttaatattgaacggcttaacgcgctggataactggatagcgcaacaggttgatgccggttatccaagcgttaacctgctcattattaaagacagtcatattgtttatcgtaaggcctggggtcaggctaaaaaatatgacggcagcgtcctgatgtctcatcccgtcaaggcaaccactgacaccctgtacgacctggcatcaaatacaaaaatgtatgccacgaactttgccctgcaaaaactgatgtcagagggcaaattacagccggacgatcttatctcgaaatacattcccgattttggcgatcgcccgggggatgcgattaaagggaaaagcacgttacgcattgcggatctgctgcatcattccggcggtttccccgctgacccgcaatacccgaaccaggccgtcgcgggcgagttgtattcgcaggataaagccaccacgctggagatgatcaaacgtacgccgctggcgtaccgccccggcacgaaacacatctacagcgatgtggattatatgctgcttggatttatcgtggagtccgtgacgggccagccgctcgatcgttatgttgaagagaacctctatcgcccgctcggtttaacgcatacggtctttaacccgctacagaaaggcttccgccaacagcagatcgccgcgacggaactgaacggcaatacccgggatggcgtgattcatttccccaatatccgcacgaccaccctatggggccaggtgcatgatgaaaaagcattctactcgatgggcggtgtttcaggacatgcgggactgttttcgaataccggcgatattgcggtactgatgcagaccatgctgaatggcggagggtacggtaacgtgacgctgttcagcccggaaaccgtgaaaatgttcacgcaatcctcgccggaggatgccacgtttggtctcggctggcgcgttaacggcaatgcgtccatgacgccgacattcggcacgctggccagcgcgcaggcatacggccataccggatggacagggacgctgaccgttatcgacccggccaatcagatggcgattgtgatgctgagcaacaagccgcactcgcccgtcgccgacccgcaaaagaacccgaatatgtttaacagcgggttgatgccgatagccacatacggttgggtggtggatcagatatacgcggcgttaaaacatgagtaa

SEQ ID NO: 74589 - DNA, 900 bp, Citrobacter koseri
atgtctcagattcaaagtggcattttgccagaacactgccgcgcggcgatttggattgaagccaatgtaaaaggggatgtcgatgccctgcgtgcggccagcaaagcgtttgccgataaactggcaaccttcgaagcgaaattccctgacgcgcatctgggcgcggttgtcgcatttggcaacaacacctggcgcgccctgagcggcggcgttggggctgaagagctgaaagattttatcccttacggtaaaggtctggcgccggcaacccagtacgatgtgctgatccacattctttcactgcgtcacgacgtgaacttctctgtcgcgcaggcggcaatggcggcttttggcgagtgcatcgaggtgcaggaagaagtccacggtttccgctgggtggaagaacgcgatctcagcggctttgtcgacgggacggaaaacccggcgggagaagaggttcgccgcgacgtggcggtcattaaagacggcgtggatgcgggcggcagctacgtgttcgttcagcgttgggaacacaacctgacgcagctcaaccgcatgagcgttcacgaccaggaaatgatgattggtcgtactaaagaagccaacgaagagatcgatggcgatgaccgtccggtcacgtctcacctgacccgcgtggatctgaaagaagacggcaaagggctgaaaattgtgcgccagagcctgccatacggtacggccagcggcacccacggcctctatttctgcgcttactgcgcgcgtctgtacaatattgagcagcagttgctgagcatgtttggcgataccgacgggaagcgtgacgccatgctgcgcttcacgaagccagtgacgggcggctattacttcgcaccgtctctggacagattgatggcgctgtaa

SEQ ID NO: 74590 - DNA, 576 bp, Citrobacter koseri
atgaaatcgctgcgtttgattttatgcgcaatgccgctggtgctgagcggctgttcaaccctctcgtcggtgaactggtctgctgcgaatccgtggaactggtttggctcgtcgacagaggtcactgagcagggcgttgggacattaactgcgtccacgccgctggatgaaaaagcgattactgacgcgctggatggcgactatcgcctgcgtagcggcatgaaaacccagaacggcaacgtggtgcgtttttttgaagcgatgaaagaggacaaggttgcgctggttatcaatggcgaccagggaaccatcagccgtattgatgtgctggacagcgatattccatcgcaggcaggcgtcgaaatcggtacgccgtttagcgacctttacagcaaagccttcggtaactgccagaaagcgacgggcgatgacagcgcgtcggtcgagtgtaaagcacaagacagtcaacatattagctatctgttctccggcgagtggaacggcccggaagggttaatgcctcctgacgacacgctgaagaactggaaagtgagcaaaatcatctggcgccgttaa

SEQ ID NO: 74591 - DNA, 450 bp, Citrobacter koseri
atgaagagtactgagtttcatcctgctgactacgacggtcatgggcgcttgcgcctgccttttctgttctggtgcgtgctgctgcttcaggcgcgtacctgggtgctgtttgtgattgctggctcctcccgcgagcagggcgatacgctgctgaatctgttttatcccgatcacgatacgttctggctggggttgttgcccggcgtcccggcggtactggcgtttttactgagcgggcggcgcgacgctttcccggtgctgtggcgcgggctgcgcggcttgttgattctggcgcagggcgttctgctctgctggcaaccggtgctgtggctgtacggtgaaccggtaaacggcatcgggctggcgctggtggtggccgatattgtcgcgcttatctggttgctctctaaccgccgtttacgcgcctgctttgcgccggcaaaagaataa

SEQ ID NO: 74592 - DNA, 426 bp, Citrobacter koseri
atggagatacgcgtttttcgccaggaagatttcgaagaggtgatcaccctctgggagcgctgcgatttgctgcgtccgtggaacgatcctgaaatggatatcgaacgtaagctgaaccatgacgtcagcctgttcctggtcgctgaggtgaatggcgaggtggtcggcacggtcatgggcggctatgacggccaccggggttctgcctattatcttggcgtacacccggagtttcgcggtcgtggcatcgccaacgcgctgttgaaccggctggagaaaaaactcattgctcgcggctgcccgaaaatccaaatcatggtgcgggaagacaacgacattgtactgggcatgtacgagcgcctgggttatgaacattcggacgcgttaagtctgggcaagcgtctgattgaagatgaagagtactga

SEQ ID NO: 74593 - DNA, 870 bp, Citrobacter koseri
atgagcacttttaaacccttaaaaactctcacatcgcgccgccaggtgctgaaagccgggctggcggctctgacgctgtcgggcatgtcgcacgccatcgctaaagaagaagcgctaaagaccagtaatggtcacagcaaaccgaaggccaaaaaagcaggcgccaggcgcattgttgttctcgaccccggccacggcggtatcgacaccggcgcgattggtcgcaacggctcgaaggaaaaacacgtcgtgctggagatcgccaaaaacgtgcgcgcgattttgcgcaaccaggggattgatgcgcgcctgacacgcacgggcgacacctttattcccctgtacgatcgcgtggaaatcgcccacaagcacggcgcggatctgtttatgtccatccacgcagatggttttaccaaccccagcgccgcaggggcctcggtgtttgcgctttctaatcgcggcgccagtagcgccatggcgaaatacctctccgaccgtgaaaaccgcgccgatgaagtcgcggggaaaaaagcgaccgataaagatcatctgttgcagcaggtgttgttcgatctggtgcaaaccgacaccatcaaaaacagcctgacgctgggatcgcatattcttaagaagatcaaaccggtgcatcgtctgcacagtcgcaatacggaacaggcggcgtttgtggtgctaaaatcaccgtcaattccctccgtactggtagaaacctcatttatcaccaacccggaagaggagcgtctgttaggcaccaccgcattccggcagaaaatcgccaccgcgatagccaatggcgtgatcagttatttccactggtttgataaccagaaagcacactcgaagaaacggtaa

SEQ ID NO: 74594 - DNA, 900 bp, Citrobacter koseri
atgaaacccgatgcacaacgcgtaaaacagttcctgctcagccttcaggatgatatttgccagcagttagccgccgttgatggcgctgattttgttgaagatagctggcagcgcgacgcgggtggcggcgggcgcagccgggtactgcgtaacggcggcgtctttgagcaggctggggtaaatttctcccatgttcacggcgacgcgatgcccgcctccgcaacggcacaccgcccggagttggcagggcgcagttttgaagcgatgggcgtgtcgctggtggtgcatccgttgaatccgtacattccaaccagccatgccaatgttcgcttttttattgcggagaagcccggcgcggagccggtctggtggtttggcggcggtttcgacctgacgccctattacgcgtttgaagaggatgccattcactggcaccgcacggcgcgggatctgtgccagccctacggcgaggacgtctatccgcgctataaaaaatggtgcgacgattactttttcctgaagcatcgcgatgagcagcgcggcattggcgggcttttcttcgacgatctgaacacgccggatttcgacagctgctttcgctttatgcaggcggtaggcaaaggctataccgatgcttttctgccaattgtcgagcggcgtaaagcaatggcctggggcgagcgcgagcgtcatttccagctttatcgccggggccgctatgtggagtttaatctggtgtgggatcgcggcacgctgtttggcctgcaaacgggcggacgcaccgagtccattttgatgtcgatgccgccgctggtgcgctgggagtacgactggcagccggaagagggcagcccggaagcggcgctgagcgaatttatcaaagtccgcgactgggtataa

SEQ ID NO: 74595 - DNA, 1053 bp, Citrobacter koseri
atgaaaaagactcgtacagcaaacttgcaccatctttatcatgaagcgttacccgaagacgttaaacttacgcctctggttgaggtggataatgttcaccagcggctgacaacggacgtctatgaacacgccctgacgataaccgcctggcagcagatttacgatcagctgcatcccggtaaatttcatggggaattcacggaaatcctgctggatgaaattcaggtgttccgtgagtacaccggtctggcgctgcgtcagtcttgcctggtctggccgaactccttctggttcggtattccggcaacgcgcggcgagcaaggttttatcggcacgcagtgcattggcagcgcggagatcgccacccgtccgggcgggacggagtttgagctgagcacgccggatgattacaccatccttggcgtggtcatctcggaggaggtgcttacccggcaggccaatttcctgcatcacccggaaagggtgctgcatatgctgcgtaaccagtctgcgctggaggtgaaagagcagcataaagcggcgctgtggggctttgtccagcaggcgctggcgacgttcagcgagaacccggaaaacctgcatcagcatgcggtgcgtaaagtgctgggggataacctgctgctggcgatggggacgatgctggaagaagcgcagccgattataacggcagaaagcgtcagccatcagagctatcgaaaattgctgtcccgcgcgcgggaatacgtgctggagaatatgtcggagccgctgacggtgctcgatctgtgcaatcagctgcacgtcagccgccgcacgttgcaaaacgcgtttcacgcgattctggggattggcccgaacgcgtggctgaagcggattcgattaaacgcggtgcgaagggagctgatcagtccgtggtcgcaaagttcgacggtcaaagaggcggcaatgcagtgggggttctggcatctggggcagttcgcgaccgattaccagcagctgtttgccgaaaaaccatcgctgacgctgcatcagcgtatgcgccagtggatgtga

SEQ ID NO: 74596 - DNA, 498 bp, Citrobacter koseri
atgatcaatgcactgggattactggaagtggatggcatggttgccgccgttgatgcggcggacgccatgctgaaagccgccaatgtgcgattgctcagccacgaagtgctcgatcccggcaggctgacgctggtggtggagggcgatctggcggcgtgtcgcgcggcgctggatgccggaagcgccgcagcacaacgcacgggccgtgttatcagccgcaaagaaattgggcggccggaagacgacacccagtggctgatcggcggctttaagcgccagccaacgaaagtcggaaggacgccagatgcgcctgttacctctgaatcctcagaagcgctgttggcgttattagcatcagtacgtcagggaatgacggcaggggaggtggccgcgcattttggctggtcactggagcgcgccagaaatgcgctggagcaactcttttctgacggggcgttgcgtaaacgcagtagtcgctatcgtctgaagaaagtataa

SEQ ID NO: 74597 - DNA, 660 bp, Citrobacter koseri
atgccagcattagatttgattcgaccgtcggtcaccgcaatgcgcgtgattgcctcggtgaatgacggtttcgcgcgtgagcttaaattaccgtcacatatacgtagcctcggtctcatcacggcagactctgatgacgtaacgtatattgcggcagacgaagcgacaaaacaggcgatggtggaagtggtgtatggccgttcactgtatgccggagcggcccacgggccgtcgccgacggccggtgaagtcttgattatgttgggcggcccgaacccggcggaagtgcgggcgggtctggatgcgatggtggcgcatattgaaggcggcgcagcgttccagtgggccaacgatgcggaagatacagcattcctggcgcatgtggtttcgcgtaccgggtcttatctctcatcaacctcaggcatcgcgctgggcgatcctatcgcttatctggtggcgccgccgctggaagcgacgtttggcattgatgcggcgatgaaatccgccgatgtccaactggtgacctacgtgccgccgccgtcagaaaccaactactctgcggcgtttttaacggggagccaggccgcctgtaaagccgcctgcaacgcctttaccgatgccgttctggatattgcccgtaatcccgtccagcgcgcgtaa

SEQ ID NO: 74598 - DNA, 906 bp, Citrobacter koseri
atggatcaaaaacagattgaagaaattgtacgcagtgtaatggcgtcaatgggcgagtcgcagccgcaggcccccgcagaatccgcgccagcctgtagcgctaaacaatgtgccgcaccttcagcgccttcagcggcggaaagctgcgcgctggatttaggttcggctgaggcgaaagcctgggtaggcgtggagaatccgcatcgcgcggatgtgttggccgaactgcgccgcagcaccgctgcgcgcgtgtgtaccggtcgcgctggcccacgtccgcgcaccctggcgctgttgcgcttcctggcggatcactctcgttcgaaagataccgtcctgaaagaggtgccggaagagtgggtgaaagcacaggggctgctggaagtgcgttcggaaatcagcgacaaaaacctctacctgacccgcccggatatggggcgtcgtctgagccaggaggccattgacgcgctgaaagcgcagtgtgtcgccagcccggatgtccaggtggtgatttccgatggtttatcgacggatgcgattaccgccaactatgaagagatcctgccgccgctgctctcaggcctgaaacaggcggggctgaaagtcgggacgccgttctttgtacgctatggccgcgtgaagattgaagatcagatcggcgaaattcttggcgcgaaagtggtgattctgctggtgggcgagcgtcctggcttaggtcagtcggaaagcctctcctgctatgcggtttactcaccacgggtggcaaccaccgttgaagcggatcgtacctgtatttcgaatattcaccagggcggcacgccgccagttgaagccgcagcggtaattgtggatttggcgaaacgtatgctggagcagaaagcatccggcatcaatatgacccgttaa

SEQ ID NO: 74599 - DNA, 1362 bp, Citrobacter koseri
atgaaactaaagaccacattgttcggcaatgtttatcagtttaaggatgtaaaagaggtgctggcaaaagccaacgaactgcgttcgggggatgtgctggcaggtgttgcggctgaaagctcacaggagcgcgttgccgcgaaacaggtgttgtcggaaatgtcggtggcggatattcgcaacaacccggtgatttcctatgaagaggactgcgtgacgcgtctgattcaggacgacgtcaatgaaacggcctataaccgcattaaaaactggagcatcagtgagctgcgcgaatatgtgctgagtgatgaaacgtccgtcgatgacattgcgtttacgcgtaaagggctgacttcggaagtggtggcggcggtcgcgaagatctgctccaacgccgacctgatctacggtggcaagaagatgccggtgatcaaaaaggccaataccaccatcggtattccgggcacctttagctgccgtttgcagccgaacgatacccgtgacgatgtacagagtatcgccgcgcaaatctatgaagggctctctttcggggcaggcgatgcggtgattggcgttaacccggtaacggacgacgtggaaaacttaagccgcgtgctggataccgtgtacggggtgatcgacaagttcaatattccgacgcagggctgcgtgctggcgcacgtcaccactcagattgaagccattcgtcgcggcgcgccgggtgggctgattttccagagtatttgcggcagcgaaaaaggattaaaagagttcggcgtggagctggcaatgctggatgaggcgcgtgcggtcggcgcggagtttaaccgtatcgccggggaaaactgcctgtactttgaaaccgggcaggggtctgcgctttcggccggggccaacttcggcgccgaccaggtgacgatggaagcgcgtaactacggcctggcgcggcactacgatccgttcctggtgaatacggtggtcggttttatcgggccggagtatctctacaatgaccggcagattattcgcgccggtctggaagatcacttcatgggcaagctgagcggcatctcaatgggctgcgactgctgctacaccaaccacgccgacgccgatcagaacctcaacgaaaacctgatgattctgctcgccaccgcaggctgtaactacattatgggcatgccgctcggcgacgacatcatgctcaactaccagaccaccgcattccacgataccgcaacggtacgtcagttactcaacctgcgtccatcgccggagtttgagcgctggctggaaacgatgggcattatggaaaacggtcgcctgaccaagcgggcgggcgatccgtcactgttcttctga

SEQ ID NO: 74600 - DNA, 1404 bp, Citrobacter koseri
gtgaacactcgccagctactgagcgtcggtatcgatatcggcaccaccaccactcaggtgatcttctcacgccttgagctggttaaccgtgcggcagtgtcgcaggtgccgcgctacgaatttatcaaacgtgaaattagctggcaaagcccggtcttttttacccctgtggataagcagggcggattgaaagaggccgaacttaaggcgctgattctggctcagtaccaggcggcggggattgcgccggagacggtggattccggggcgatcatcattaccggcgaaagcgcgaaaacccgcaatgcgcgtccggcagtgatggcgctgtcgcagtctctcggcgattttgtcgtcgccagcgccgggccgcatctggaatcggtgattgccgggcacggcgcgggggcgcagaccctgtctgaacagcgtttgtgtcgcgtgctcaacatcgacatcggcggcggcacttcgaactatgttctgtttgacgccggaaaagtgagcggctccgcctgtctgaacgtgggcggcagattgctggaaacggacggccaggggcgggtggtgcatgcgcataaaccggggcagatgatcgttgaggcggtgttcggcgcgggcactgacgcccgctcgctcaatgccacacagttggcgcaggttgtgcggcggatggcggatttgattgtcgaaatcattgacggcgagccttcgccgctggcgcaggcgctgatgcaaaccggattactgcccgcaggggtgaaaccggaagtgatcaccctttccggtggcgtcggggagtgctaccgcaatcagcctgccgatccgttctgcttttctgatgtcggtccgctgctggcgacggcgctgcatgagcacccgcgactgcgtgagatgaacgtgcagttcccgacgcaaaccgtgcgcgccacggtgattggcgcgggggcgcacacgctgtcgctgtccggcagcaccatctggctggagggggtggcgcttccgctgcgcaacctgccggtggcgattccacaagatgaaagcgaactggtggccgcctgggaacaggcgctgactcagctcgatctcgaccctggcactgacgcatacgtgctggcgcttcccgcccggcttccggtgcgctacgcggcattactcacggtcatcgacgcgctgctggcgtttaccgcgcgttttcccaatccgcatcccctgctggtggtggccgagcaggactttggcaaagccctgggcatgttattgcgcccacagttacagcaacacccgctggcggtcattgacgaagtgagcgtccgggcgggggactatatcgacattggtacgcctctttttggcggatcggttgtgccggtgacggtgaaatcactcgcatttccttcctga

SEQ ID NO: 74601 - DNA, 1227 bp, Citrobacter koseri
atgggaattaatgaaatcatcatgtacatcatgatgttctttatgctgattgccgccgtggacaggatcctgtcgcagtttggcggttcggcgcgttttctcggtaaattcggtaagagcatcgaggggtcgggcggtcagtttgaagaaggttttatggcgatgggcgcgctggggctggcgatggtcggtatgaccgccctggcgccggtgctggcgaagctgctcgggccggtgattatcccgctgtatgaaatgctcggcgcgaacccgtcgatgttcgccggaacgctgctggcctgcgatatgggcggtttcttcctcgccaaagaactggcgggcggcgatgtggcggcatggctgtactccggtctgatcctgggggcgatgatggggccgacgatcgtcttctccattccggtggcgctcggcattatcgagccgtctgaccgccgctacctggcgctgggcgtgctggcggggattgttaccattcccattggctgtatcgccggtggtttagtggcgatgtactccggcgtggagatcaacgggcaaccggtggagtttaccttcgcgctgatcctgatgaacatgatcccggtgatcatcgttgcggtgctggttgcgctggggctgaaatttatcccggagaaaatgatcagcggtttccagatcttcgctaaattcctggtggcgttgatcaccattggtctggcggctgcggtgattaaattcctgctgggatgggagctgatcccaggcctcgacccgatcttcatgtcccctggcgaccagcctggcgaagtgatgcgcgccattgaagtgatcggctccatctcctgcgttctgctcggcgcctatccgatggtgcttctgctgacccgctggtttgaaaaaccactgatgcgcgttggcggcctgttaaaaatcaacaatatggcggcaggcggcatggtcgcgacgctggcgaacaatattccgatgttcggcatgatgaagcagatggatacccgcggcaaagtgatcaactgcgccttcgcggtctccgctgcctttgcgctgggcgaccacttaggctttgcggccgccaacatgaacgcgatgatcttcccgatgattgtcggcaagctgatcggcggcgtgacggcgattggcgtggcgatgatgctggtgcccaaagatgaagacgttccggcagaaacggaagtggaggcgcagtcgtga

SEQ ID NO: 74602 - DNA, 1188 bp, Citrobacter koseri
atgcaaagtgaattgcagaccgcgctctttcaggcattcgataccctgaatctgcaacggataaaaacgttcagcgttccgcccgtcacgctgtgcggcctgggggcgctcagcgcctgcgggcaggaagcgcaaacgcgcgggctgacgcatctgtttgtcatggttgacagttttctgcatcaggcagggatgaccgccgggcttgaacggagtctggcgatgaaaggcgtggcgatgagcatctggccctgcccggtgggagaaccttccatcactgatgtttgcgcggcggtcgcgcagctgcgcgaatcaaaatgtgacggcgtggtggcgtttggcggcggctcggtgctggatgcggcaaaagccgtagcgctgctctttaccaacccagggcagacgctggcggatatgacggcgcagagcgtactgcgcccgcgtctgccgttgattgccgtgccgacgacggcgggaacggggtcggaaaccaccaacgtgacggtgattattgatgcggtaagcgggcgcaagcaggttctggcgcatgcctcgctgatgccggacgtcgccattctggatgcggcgctgacggaaggggtgcctgctcacgtaacggcgatgaccgggattgacgcgctgacccatgcggttgaggcgtatagcgctctgaatgccacgccgtttaccgacagcctggcgattggcgctattgcgatgatcggcaagtcgctgccgaaagcggtggggaacgggcatgacatggcggcgcgggaaaacatgctgctggcgtcctgtatggcagggatggccttttccagcgcggggctggggctgtgtcatgcgatggcgcaccagccgggcgcgacgctgcatattccgcatggccaggcgaacagtatgttgctgccgacggtgatgggatttaaccgcatggtgtgtcgcgaacggttcagccatatcggccgggcgttactcaacaagaaagcggacgatcgcgacgcaatcggcgcagttagcgaactgattattgaaaccgggctgacaaaacgcctcgccgatgttggcgcgacgtccgcgcattacagcgcgtgggcgcaaggtgcgctggaagatatttgtattcgcagtaacccacgaaccgccacacaggaacagattatcgacctgtacgcggcggcacaataa

SEQ ID NO: 74603 - DNA, 840 bp, Citrobacter koseri
atggcgcacgatgaacaacgttggctgacgccgagactccagaaagccgctgagctatgtaatcagcatcccgtcgccagcgattcgccgctgtggctgggtattgatttagggacgtgcgatgtggtgtcgatggttgtcgaccgcgacgcgcagccagtcgccgtttgtctggactgggctgacgtcgtgcgtgacggcatcgtctgggacttcttcggcgccgtcaccatcgtgcgtcgccatctcgacacgctcgaacgccagcttggctgccagttcacccacgcggcgacctcatttccgccaggcaccgacccgcgtatctccatcaatgttctggaatccgccgggctggaggtcagccatgtgctggatgagccgaccgccgtggcggatctgctgcgactggataacgcgggcgtggtggatatcggcggcggtacgacggggatcgccattgtgaagcagggcaaggtgacttactccgctgatgaagcgaccggcggacaccatatttccctgacgctggccggaaaccgccgcatcgaactggaagacgctgagcagttcaagcgcagcaacgcccgggagatttggccggtggtaaaaccggtatacgaaaagatggcggagattgttgcccggcatatcgaagggcaaggtatagccgatctgtggctggcgggcggctcctgtatgcaaccgggcgtggatgagctattccgtaaacgcttcccggaactgcgggtgcatttacctgaacacagcctgtttatgacgccgctggcgattgccaacagcgggaaagaaaaagcggaggggatctatgcaaagtga

SEQ ID NO: 74604 - DNA, 1404 bp, Citrobacter koseri
atgaatcaacaggatattgaacaggtggtaaaagcggtattgctgaaaatgaaagacagcagtcaacctgccgccgccgttcatgaaatgggcgtctttgcctccctggatgacgccgttgccgcagcgaaagtggctcagcaggggctgaagagcgtggccatgcgccagctcgctattcatgcgatacgtgaggcgggtgaaaagcacgccagagaactggcggaacttgccgtgtcagaaaccggcatgggacgcgtcgaagataaattagcgaaaaacgtggcgcaggcgcgcggtacgccgggcgtggaatgcctctcgccgcaggtactgaccggcgataacggtctgaccttaattgaaaatgcgccgtggggggttgtggcgtcggtcacgccgtccaccaatccggcggcaaccgtgattaacaatgccatcagcctgattgccgcaggcaacagcgtggtctttgcgccgcatccggcggcgaaaaaggtttctcagcgtgccattacgctgcttaaccaggcggttgttgccgcaggcggcccggctaacctgctggtgaccgttgcgaacccggatatcgaaaccgcccagcgcctctttaaatatcccggtatcggtctgctggtggtgactggcggcgaagcggtcgttgaggccgcgcgtaaacacaccaacaaacgtctgattgccgcaggtgccgggaacccgccggtggtggtggatgaaaccgctgacctggcgcgcgccgcgcagtccatcgtcaaaggcgcatccttcgataacaacatcatttgcgccgacgagaaggtgctgattgttgtcgatagcgttgccgatgaactgatgcgcctgatggaagggcagcatgcggtgaaactcaccgccgcacaggccgaacagcttcagccggtattgctgaaaaatatcgacgagcgtggcaaaggaacggtcagccgcgactgggttgggcgtgacgccgccaaaatcgccgccgcgattgggctgacggtgccggagcaaacgcgcttgctgtttgtggaaacgcctgccacgcacccgttcgcggtcacggaactgatgatgccggtactgccggtggtacgggtcgccaacgtagaagaggccatcgaactggcggtcacgctggaaggcggttgccaccatacggcggcgatgcactcgcgcaacatcgacaacatgaaccggatggcaaacgccattgataccagcatcttcgtcaagaatgggccatgcatcgccgggcttggtctgggcggcgaaggctggaccaccatgaccattactacgccaaccggggaaggagtgaccagcgcgcgcaccttcgtgcgtctgcgtcgctgcgtgttggtggatgcgtttcgcatcgtctga

SEQ ID NO: 74605 - DNA, 288 bp, Citrobacter koseri
atgaagctggcagtcgtcacaggacaaattgtttgtacggtgcgccatgaaggactcgcgcatgacaaattgctgatggtgaaaatgattgatgccgaagggaatcccgacgggcagtgcgccgttgcaatcgacagcattggggcgggaaccggggagtgggtgctgctggttagcggcagttctgcccgccaggcgcatcggagcgaatcctcacctgtcgatctgtgcgtgattggtattgtcgatgaagtggtggctggcgggaaagtcgttttccataaatag

SEQ ID NO: 74606 - DNA, 291 bp, Citrobacter koseri
atggaagcattaggaatgattgaaacccggggcctggttgcactgattgaggcctctgatgcgatggttaaagcagcacgcgtgaaactggttggcgtgaagcagattggcggcggtctggtcaccgcgatggtgcgtggcgatgtggcagcgtgcaaagccgctactgatgccggcgccgcagcggcgcagcgcattggcgaactggtttccgtacacgtcattccgcgcccgcacggcgatctggaagaggtgttcccgatcagcttcaaaggtgacagcaatatctaa

SEQ ID NO: 74607 - DNA, 1017 bp, Citrobacter koseri
atgatcattgaacgttgccgcgaacaggccttacgcacgcccgccagagtggtcttcccggatgcgctggatgtccgtgtcctgaaggcggcgcactatctgcaacggcatggtctggcgcgaccggttcttgtcaccagcccgtttgcgctacgccagtttgcgctcactcaccgtatcgcgatggatggcattcaggtgattgacccacagagcaatctgtctatgcgcgaggtgttcgccgggcgctggatggcgcgggcgggagagaaaacaccgccggatgcgctggaaaaactgaacgatccgctgatgttcgccgccgcgatggtgagcgccggtcatgccgatgtgtgcattgccggcaacctctcttcgacagcgaacgtgctacgggcagggctacgcctgatcggtttgcagccgggctgcaaaacgctgtcgtcgatcttcctgatgctgccgcagtacaccgggcaggcgctgggattcgccgattgcagcgtggtgccgcaacccacggcggcgcaactggcggatatcgccatcgccagcgcgcagacctggcgaaccattactggagaggagcctcgggtcgccatgctgtcgttctccagtcatggcagcgcgcgtcaccccaatgtcgccaatgtgcagcaggcgacagagatcgttcgtgagcgcgcgccggatttgattgttgacggcgagttgcagttcgacgccgcttttgtcccggacgtcgccgcgcaaaaagcgcccgccagtccgttacagggcaaagccaatgtgatggtctttccgtcactggaagcgggcaacattggctacaaaatcgcccagcgtctgggaggatatcgcgccgttgggccgctgattcaggggcttgccgcaccgcttcacgatctctcccgaggctgtagcgtacaggaaattatcgaactggcgttggtggcagcagtgccgcgccagactgacgtgagtcgtgaacacgactcgcaaacactggttgtataa

SEQ ID NO: 74608 - DNA, 804 bp, Citrobacter koseri
atgaaggatttcattaccgaagcatggctcagagcgaatcatacgctcagcgaaggggcggagatccatcttcccgctgacgctcgcctgacgccatctgcccgggaattgctggaaagccgccatttgcgcatcaagtttctggatgagcaaggccgtctttttgtcgatgacgatgagcagcaattacagccggtgcacggtttgaccagcagcgatacgcaccctaaggcgtgctgcgaactgtgtcgccagccggtggcaaaaaagcccgatacgctgacccacctgaccgccgacaaaatggttgcgaaaagcgatccgcgcctgggatttcgcgccgcgctggacagcaccatcgcgctggtggtgtggctgcaaattgagttgccggagcagtggcaaccctggcttgctgacattcgttcccgcctgggcaacatcatgcgtgctgatgcgatggatgaaccgctggccgcgcaggccattgtggggctaaacgaagacgaattgcatcgtctgtcccatcagccgctgcgctatctcgatcacgatcatctggtgccggaagccagccacggccgcgatgccgcgctgctgaatctgctgcgtaccaaagtgcgtgagacggaagtcgtggccgctcaggtctttatcacccgcaattttgacgtgctgcgcccggatcttctacaggcgttgaaccgcctctccagtacggtctacgtgatgatgattttgtgcgtgacgaagcatccgctcaccgtcagccagattcaacagcgactgggaggggagcaatga

SEQ ID NO: 74609 - DNA, 690 bp, Citrobacter koseri
gtgaagaaactcatcacagctaacgatattcgtgcggctcacgcacgcggcgaacaggaaatgtcggttgttctgcgcgccagcatcattaccccggaagcccgcgaagttgcggaactgctggacttcacgatcgtggaatgcgacgaatcggcaccggctgtcgcgccggtggaagacgcgaaaaccgaaagtcagcgcattcgtgaaaccattatcgcgcaactgccggaagggcaatttaccgaaagcctggtcgcgcaactgatggacaaagtgatgaaggaaaaacagtcgctggagcaggctgacatgcagccgggctttaagtcggtcactggcaagggcggcgtaaaagtgatcgacggcagcagcgtgaagtttggtcgcttcgacggcgcgcagccccactgcgtcggcttaacggatttggtcaccgacaaggacggcagcagcatggcagccgggttcatgcagtgggataacgcgtttttcccgtggacgctgaactacgacgagatcgatatggtactggagggcgaactgcatgtgcgtcatgaaggcgaaaccatgatcgcgaaagccggggacgtgatgtttatcccgaaaggctccagcattgagtttggcacaccgtcgaccgtgcgcttcttatacgttgcctggcctgcgaactggcagtcctgctaa

SEQ ID NO: 74610 - DNA, 480 bp, Citrobacter koseri
atgaaacgtattgcgtttgtcggcaccgttggcgcggggaaaacaacgctttttaacgccttgcagggaaattattccctcgcccgaaaaacacaagccgtggaatttaatgacaacggcgatatcgatacgccgggagaatattttagccatcctcgctggtatcacgccttaattaccacgctacaggatgtggatacgctgatttatgtacatgcggcaaatgaccgcgaaagtcgcttacccgccgggttattggatattggcgccagtaaacgacacatcgccgttatcagcaaaacggacatgccggatgccgacgtcgccgccgcgcgacagctactgagcgggctgggatttcaggagccgattttcgagctcaacagccatgacccgcaaagtgtgcagcacctggtggattatctggcagcactcaccgaacaggaggaaggcgcaggtgaagaaactcatcacagctaa

SEQ ID NO: 74611 - DNA, 336 bp, Citrobacter koseri
atggataaagaacgcattattcaggaatttgtgccggggaaacaggtcacgctggcgcatctgattgcccacccgggtgaagaactggcgaaaaagatcggcgttcccgaagcgggcgccatcggcatcatgacgctaacgccaggggaaacggcgatgatcgcgggcgatttagccatgaaagccgccgatgttcatatcggttttctcgatagattcagcggcgcgctggtgatttatggctccattggcgccgtcgaggaagccttattgcaaacggtcagcgggctgggacgcttattaaatttcacgttgtgcgaattaacaaaaagttaa

SEQ ID NO: 74612 - DNA, 2280 bp, Citrobacter koseri
atggatgaccaattaaaacaaagcgccctcgatttccacgaatttcccgttccaggtaaaatccaggtttccccgaccaagccccttgccacacagcgcgatctggcgctggcctattcgccaggcgtagcggcgccgtgtcttgaaattgaaaaagacccgctggcggcttacaaatacaccgctcgcggcaatctggtcgcggtggtctctaacggaacggcggtgctcggcctgggcaacatcggcgcgctggccggtaaaccggtaatggaaggtaagggcgttctgtttaagaaattcgcgggcatcgacgtgtttgatattgaagtcgatgaacataacccggataaattcattgatgtcgttgccgcgctggagccgacgttcggcgggattaacctcgaagatattaaagcgcctgaatgtttctatatcgagcagaaactgcgtgagcgcatgaatattccggtattccatgatgaccagcacggaacggcgattatcagcaccgccgctattcttaacggcctgcgcgtggtggaaaaaaatatctctgacgtgcggatggtggtttccggggcaggggcggcggcaatcgcctgtatgaacctgctggtggcgttggggatgcagaaacacaatatcgtggtctgtgactcgaaaggcgttatctataaagatcgtgaacccaacatggtggagaccaaagcggcctatgcggtggtggatgacggcaaacgcacgctggatgatgtgatcgacggggcggacattttcctgggctgctccggcccgaaagtgctgacccaggagatggtgacaaaaatggcgcgtgcgccgatgatcttggcgctggcgaacccggagccggaaattctgccgccgctggcgaaagaggtgcgttcagacgccatcatctgtaccggacgttccgactatccgaaccaggtcaacaatgtgctctgcttcccgttcatcttccgtggcgcgctggatgtcggcgcaaccgcgatcaacgaagagatgaaactggcggcggtacacgccattgctgaactggcgcacgccgaacaaagtgaagtggtcgcttccgcttatggcgatcaggatttgagcttcggcccggaatacatcattccaaaaccgttcgacccgcgcctgattgtgaagattgcgcctgccgtggcgaaagcggcgatggactccggcgtggcgacgcggccgatcgctgatttcgatgcctacatcgataagctgaccgaatttgtctacaaaaccaacctgttcatgaagccaatcttctctctggcccgtaaagcgccgaagcgcgtggtgctggcggaaggggaagaggcgcgtgtcctgcatgcgacgcaggagctgattacgttaggtctggcgaaaccgatcctgattggtcgcccgagcgtgatcgaaatgcgcattcagaagctggggctacagatcaaatcgggtgtggatttcgagatcgttaacaatgaatccgatccgcgcttcaaagagtactggggtgaatactataagatcatgaaacgccgtggcgtgacgcaggaacaggcgcagcgggcggtgatcagcaataccacggtgattggcgcgatcatggttctgcgcggtgaagcggatgcgatgatctgcggcaccatcggcgaataccacgaacacttcagcgtggtgcaggaactgtttggctaccgtgagggcgtccacgcagcaggggcgatgaacgccttgctgttgccgagcggcaacacctttatcgccgacacctatgtcaatgacgatccgacgccggagcaactggcggaaattacgttaatggctgcggaaacggtgcgccgctttggtattgagccgaaggtggcgctgttgtcgcactccaactttggttcgtctaagtcggtcgccgcttgcaaaatgcgtcagacgctggagttagtacgcgaacgcgcgcctgagctgatgatcgacggcgaaatgcacggtgatgccgcgctggttgaaagtattcgcaacgacaggatgccggacagcccgctgaaaggagcggcgaatattttaattatgcctaacgtggaggccgcgcgtattagttacaacttactgcgtgtctccagctcggaaggcgtgacggtagggccggtattgatgggcgttgccaaaccggtgcatgtattaacgccgatcgcttctgttcgccgtatcgttaatatggtggcgctggcggtggtcgaagcgcaaacacagccactgtaa

SEQ ID NO: 74613 - DNA, 951 bp, Citrobacter koseri
atgaaccagttagacggcatcaaacaattcaccactgtcgtggcagacagcggcgatatcgaatccattcgccattatcagcctcaggacgccaccaccaatccctcgctgctgctaaaagcggctggccttgcgcaatacagccatttgattgatgacgcgatcgcttggggcaagaaacgcggtaaaacccaggagcaacaggtcgccgaggccagcgataaactggccgtcaatttcggtgcggaaattctgaaaatcgtccccggacgggtctctacggaagtggacgcgcgcttatccttcgataaagaaaaaagtatgcagaaggcccgccacctggttgacctctaccagcagcagggcgtggaaaaatcgcgcattttaattaagctcgcgtcaacctgggaagggatacgggcggcggaagagctggagaaagaaggcatcaactgtaacctgacgctgctgttctcttttgcacaggcgcgcgcctgcgcggaagcgggcgtttttctggtttcgccgtttgtcgggcgtatctatgactggtatcaggcgcacagcccgatggacccctacgtcgtggaagaagatccgggggtgaaatcggtacgtaatatctatgactacttcaaacgtcaccgctacgaaaccatcgtcatgggggccagtttccgtcgcaccgagcaaatcctggcgctgacaggctgcgaccgcctgaccatttctcccaacctactgaaagcgctacaagaaaaagaagagctggtgatccgtaaactggtgccgtcatcgcagacgttccatcgcccgaccccgatgaccgaagcggaattccgctgggaacataatcaggacgcgatggccgttgagaaactgtcggaaggtatccgcctgttcgccgttgaccaacgcaaactggaagacctgctcgccgccaaactgtaa

SEQ ID NO: 74614 - DNA, 1995 bp, Citrobacter koseri
atgtcccgaaaagaccttgccaatgccattcgtgcgctcagtatggatgccgtacaaaaagccaattccggtcatcccggcgcgccaatgggcatggcggatattgctgaagtgctgtggaatgattttctccgccacaacccaaccgaccccacctggtatgaccgcgatcgctttattctttccaacggccacgcgtcaatgctgctctacagcctgctgcacctgaccggctacgatctgccaatcgaggagctgaaaaacttccgtcagctccattcaaaaacgccgggacacccggaaatcggctatacgccaggcgttgaaaccaccaccgggccattgggtcagggactggcgaacgccgtcggtctggcgattgccgaacgcacgctggccgcgcagtttaatcagcccgatcatgacatcgtcgatcactacacgtatgtctttatgggcgatggctgcctgatggaggggatttcgcacgaagtctgctcgctggcgggtacgctggggctgggcaagctaatcggcttctacgatcacaacggcatctcaattgatggcgaaaccgagggctggtttaccgacgataccgccaaacggttcgaagcgtatcactggcatgtagtgcatgagatcgacgggcacgatcccgaagccgtgaagaaagcgattcttgaagcgcagagtgtgaaagacaaaccgtcgttgattatttgccggacggtaatcggcttcggctcaccgaataaagccgggaaagaggagtctcacggcgcggcgctgggagaagaagaagtggcgctgacccgccagaaactgggctggcatcaccctgcttttgagatcccgaaagagatttaccgagcctgggatgcgcgtgaaaaaggtgaaaaagcgcagcaggcatggcaggagaggttcacggcgtatcagaaagcgtatcccgatctggcaagaacatttacccgacgaatgcgcggcgagttgccagagtcctgggaaaccacgacgcgaaaatacattgctgaattacaggccaacccggccaaaatcgccacccgcaaggcatcgcaaaatacgctgaacgcctacggcccaatactaccggaactgctcggcggctcggcggatctcgcgcccagtaacctgactatctggaaaggttcgacgtcgctaaaagaagatccggccgggaattacattcactacggcgtgcgcgaatttggtatgacggccattgctaacggcattgcccaccacggcggattcgtgccatacaccgcgaccttcctgatgtttgtggaatacgcccgtaacgcggcgcgaatggcggcgttgatgaaagcccggcagatcatggtttatacccacgactccatcgggctgggtgaagatgggccgacgcaccaggccgtggagcaactggccagcctgcgtctgacgccgaatttcagcacctggcgtccgtgcgatcaggttgaggcggcagtcggctggaagctggcggttgagcgccataccggcccgacggcgctgattctctcaaggcagaatctggcgcaggtggagcgtaccccggagcaggtgaaggagatcgcccgtggtggttatgtgctgaaagacagcggcggtaagccggatgtgatcctgattgccaccgggtctgaaatggaaatcaccctgctggcggcagaaaagctgaccggagaaggccataacgtccgggtggtgtccctgccttcgacggatatttttgatgctcaggatgaggcgtatcgcgaatccgtgctgccgtcgaacgttgccgctcgcgtggcgattgaggcgggtattgccgactactggtacaaatatgtcgggctgaaaggcgcgattgtcgggatgacgggatatggcgaatcggccccggccgaaaaactgttcccttatttcggctttacggtcgagaatatcgtcgaaaaagcgcataaggtgcttaaagcgtaa

SEQ ID NO: 74615 - DNA, 1044 bp, Citrobacter koseri
atgcgcaatcgcgttattttcgttttcctgctcggcctgctgccgacgtcgctgacgtgggcggcgccagcgcagcagactttttctgactggcaggtcacctgtaacaatcagaatttttgcgtggcgcgtaataccggcgaacatcgcgggctggtgatgaccttaagccgcagcgccggggcgcataccgatgcggtacttcgcattgatttgggggggctgacctcgcccggtgcgaaagaggcggagattgcgccgcgtctgctgctggatgaaaaaccgctgccgctaaatgccgggcaatggcgtatcacgccctggcatctgatgacggacgacaccgccaccattgccgcgtttttacagaccattcaggaagcccaggcgattactctgaaaaagggaaaacagacgatttctctggtggggcttaaagctgcgctgttgtttatcgacgcacagcaaaaacgcgttggcagcgaaacggcgtggattgataaagggaatgatccaccgctcagcgtgccgcccgcgccagcgctgaaaggcgtggctatcgtcaacccaacgccgacgccgctctcttatgatgaacgcaacgatctgctggattacggtaactggcggatgaacagtattcactgctcgcttgacccgatgcgccgggaagtgcgcgtcgcggccctgaccgatgacaaagccctgctgatgaccggttgcgaagccggagcctataatacagtcgatctcgcgtggattgtctcacgcaaaaaaccattcgcctcccgcgccgtacggttgcgtttgccctttaactccggggctgaaagcaatgatatggagctgatgaacgcggtttttgacgagaaatcccgggaattaatcacgctggcaaaagggcgggggttggccgattgcggtatccagacgcgctggcgttttgacggccagcgttttcgtctggtgcgttatgccgaagagccaagctgcgataactggcatgggccagatgcctggcccacgttgtggatcacacgttag

SEQ ID NO: 74616 - DNA, 576 bp, Citrobacter koseri
atgtcgcaaaaaattactctcatcaaagacaaagttctctctgataactactttatcctgcgcaatattacctacgatctgacccgtaaaaatggtgatgtgattcgccataagcgcgaggtttacgatcgcggcaatggcgcaacgatcctgctgtataaccgcgaaaaacagaccgtggtgctcatccgccagtttcgcgttgccacctgggtgaacggcaatgaaagcggccagttgatagaaacctgcgccgggctgctggataacgacgagccggaagcgtgcattcgcaaagaagcgattgaagagaccggctatgaagtgggtgaggtgcgtaaactgtttgagttatacatgtcgcctggcggcgtgacggaactgattcacttcttcattgcagaatacagcgacagccagcgggcaaacgcaggcggcggtgtggaagatgaagatattgaggtactggaactgccattaacacaggcgctggcgatgatcaaaaccggtgagatacgagacggtaagaccgtgttattgctcaattatttgcattcttcctcgctaatggattga

SEQ ID NO: 74617 - DNA, 1974 bp, Citrobacter koseri
atgaatcgttttattatggccaatagccaacagtgcctgggatgccatgcctgtgaggtcgcttgcgtaatggcccacaatgatgagcaacacgtactgcaccagcggcattttcagccccgaattacggtgatcaaacatcagcatcagcgcagcgcggtaacctgccaccactgcgaggatgcgccttgcgcccggagttgcccaaatggcgcaatccgtcatgtcaaagacagcgttcaggtcaaccagcaaaaatgtatcggctgtaaatcctgcgtggttgcctgtcccttcggcacaatgcagataatccttacgccaacaggtcaggatcaggtcaaagccacggcgcacaaatgcgatttgtgtctggatcgcgaagacggcccggcctgtgttgaaaactgcccggcagatgcgttgcaattggtaacggaggcgtcgctgacccggctgtcgaaagcgcggcgtctgcgcaccgcgcgtcaggaaaatcagccctggcatgcctgtgcgacgggagtcactcctggtgcgctcaataaagtcgaacagatgcgggcgacgcccccacgcggcgagccggataagctggcgattgacgcgcgaaaaaccagctttgatgaaatctacctgccgtttcgtaccgcgcaggctgaacgcgaagcggcccgctgcctgaagtgcggtgaacacagtatctgcgagtggacgtgtccgctgcacaaccatattccgcagtggattgagctggtaaaagcaggaaacattgacgatgcggtggcgctgtcgcaccagactaactgcctgccggaaattaccgggcgcgtatgcccgcaggacaggctgtgcgaaggtgcctgtacggtgcgcgatgagtatggcgcggtgacgatcggcaatattgaacgctacatttccgaccgggcgctggacaaaggctggcggccagatctgagcggcgtgcagcagcaggataaacgtgtggcgattattggcgcgggcccggccgggctggcctgcgcggatgtgctggcgcgtcatggcgtgagcacgactgtgttcgatcgccaccctgaaattggcggcctgctgacctttggcattccctcttttaagctggataaatcactgctggcgcgccgtcgcgaaatcttcagcgcgatgggaattcattttgaactgaactgcgaagtcggcaaagacgtcaggctggcgtcgctgctggatgagtacgatgcggtttttgtcggcgtcggcacataccgttccatgaaggccgacctgccaaacgaagatgcgccgggcgtatatgatgcgctgccgttcctgattgccaacacgaaacaggttatggggctggatgaattgcctgacgaaccttttatcgacaccgccgggcttaatgttgtggtgctgggcggcggcgataccgcgatggactgcgtgcgtaccgcgctgcgtcatggcgcaagccaggtgacctgcgcatatcgtcgcgacgaggcgaatatgccggggtcgaaaaaagaggtaaaaaacgcgcgggaagagggggcgaactttgaatttaacgtacagccggttgagctggtgctgaatgccgacggttgcgtcagcggcgtgcgttttttacgtactcagcttggcgaacccgatgcgcaggggcgtcgccgcccgatgcctatcgcgggcagcgagtttgtcatgcccgctgatgcggtaattatggcgtttggttttcatccgcatggtatgccgtggctggaggcgcacggtgtgaaagtggacgactgggggcgcattgcggcaaatgtcgaaagcgcgttccgttaccagaccagtaatcctaaaatcttcgcgggcggtgacgccgtgcgcggcgccgatctggtggtgacggcgatggcggaagggcgtcacgccgcgcaggggattattcagtggctggggatcatgcaaaccggataa

SEQ ID NO: 74618 - DNA, 1701 bp, Citrobacter koseri
gtggtcgtcaaacgccctgtctcggccagcctggcccgggcctttttttacattgtgctgctgtcgattctctcaaccggtatcgccctgctgacgctggcgagcagtttgcgggatgccgaggccattaacgtggccggttcactgcgtatgcagagctaccgactgggttacgatctgcaaagcggcagttcgcaattgaacgcgcaccgtcagctttttcagcaagcgctcaactctcccgcgttaagtaacctgaacgcctggtacgtcccgcagacggttaaaagccgttacgggcaactgcatgcgaactggctggagatgaacacgagactggtggatgcggatataaagtggtatcgcgccaatatcaataactatgtcgatcagatcgatctcttcgttctggcgctgcaacactatgccgagcgcaaggtgatgctggtggtcggcatatcgctggcgggcggcatcgggatcttcacgctggtctttttcaccctgcggcggattcgccagcaggtagtccagccgcttaaccagctggtcgccgccagccagcacattgaacatggtcagttcgacatcccgccgctgaatacccacttgccgaatgagctggggctgctggccaaaacgtttagccagatgtcgagcgagttgcataagctgtaccgctctctcgaagcttcggtagaagaaaaaacccacgatctgcacgaagccaaccgccgtctggaagtgctgtaccagtgctcacaggcgctcaataccagccaaatcgacgttcactgtttccgccatattttacagatcgtccgcgaacatgacgccgcttactatctggaattaaccgtgggcgataactggcggatcagcgaaggagcggaaagcactgatttgcccatgcagattctgccggtcacgatgcaggaaacggtctacggcgaactgcactggcaaagccccaacgtcagcgcctccaccccgctgctgcacagcgtatcgaccatgctgggacgcggtttgtactttaatcaggcgcaaaaacatttccagcaactgctgctgatggaagagcgcgcgactattgcccgcgagctgcatgactcactggcgcaggtgctctcctatttgcgcattcagttgacgctgctgaagcgctcaattccagaagataacctccctgcgcaaagcatcatggcggatttctcccgggcgctgaacgacgcttatcgtcagttgcgcgagctgctgaccaccttccgcctgaccttacagcaggccgacttaccttctgcgctgcatgaaatgctggataccctgcaaagccagacctctgcgaaactgacgctggattgccgtttaccgacgctggcgctggatgcgcaaatgcaggtgcacctgttacaaatcgttcgcgaggcggtgctgaatgcgattaaacacgccagcgccacggagatcgccgttagctgcgtcaccgcccccgatggcaaccatacggtctatattcgggataacggcgtcggcattggcgaaccgaacgaaccaacgggacactacggtctgaacattatgcgcgagcgtgcggaaagacttagcggcacgctgaatttctcgcaaccgtcagggggtgggacgctggtcagcatcagttttcgctcatcggaagatgaagagggtcaattagcgtaa

SEQ ID NO: 74619 - DNA, 3114 bp, Citrobacter koseri
atggcgaatttctttatcgatcgccccatttttgcctgggtgctggcaatcctgttgtgtctgacgggcaccctggccattctctctttgcccgtagagcaatatcccgacctggcgccgccaaacgtccgcattaccgcgaattatccgggagcatccgcgcagacgctggaaaataccgtcactcaggttatcgaacagaatatgaccggcctcgataatctgatgtatatgtcgtcgcaaagcagcgggacgggccaggcaacggtgacgctcagttttgtggccggaaccgaccccgatgaagccgtccagcaggtacaaaaccagctgcaatcggcaatgcgtaaattgccgcaggcggtacagaaccagggcgtcacggtccgtaaaaccggggacaccaacatcctgactattgcgtttgtctccaccgacggttcaatggataaacaggacatcgccgactatgtcgccagtaatatccaggacccgctcagccgcgtaaacggcgtgggggatatcgacgcctacggttcgcaatattcgatgcgtatctggctggacccggccaaactcaacagctaccagatgaccgcaaaagatgtcacggatgctatcgaatcacagaacgcgcaaattgccgtcgggcagcttggcggcacgccttcggtcgacaggcaggcgctcaatgcgacaatcaacgcccagtcgctgctgcaaacgcccgagcagtttcgtgatatcacgctgcgcgtcaaccaggatggttcagaggtcaagctgggcgatgtggcgaccgtcgaaatgggcgctgaaaaatatgattatctcagccgcttcaacggtaatccggcctccggtctgggggtaaaactggcctctggcgccaacgaaatggaaaccgccaaactggtgcttaaccgcctggacgagctggccgaatacttcccgcacggtctggagtataaggtggcgtatgaaaccacctccttcgtcaaagcctcgattatcgatgtggtgaaaaccctgctggaagccatcgcgctggtgttcctggtgatgtacctgttcctgcaaaacttccgcgccacgcttatccccactatcgccgtaccggtggtattgatggggacattctccgtcctgtatgccttcgactacagcattaacacgctgacgatgttcgcgatggtgctggcgatcggcctgctggtcgatgacgccatcgtggtggtggaaaacgtcgagcgcatcatgagcgaggaaggtctttcaccgcgcgaagccaccagaaaatcgatggggcagatacaaggggcgctggtcggtatcgcgatggtgctgtcagccgtatttgtgccgatggctttctttggcggtacgaccggggctatctatcgccagttctccatcacgattgtcgccgcgatggtgctctccgtgctggtggcgatgatcctgacgcccgccctgtgcgccacgctgctaaaacccctgcacaaaggcgagcatcacggacagaaaggcttcttcggctggtttaaccggacgttcaaccgcaacgctgaacgctacgagaaaggcgttgcgaagatcctgcatcgcagcctgcgctggatactgctctacgttctgttgctcggcgcgatggtggtgctgttcctgcgtctgccgacctccttcttgccgcaggaagaccgtgggatgtttattacctcagtacagttgccaagcggctccacgcagcagcagaccttaaaagtagtgcaggaagttgaaaaatattacttcacccaggagaaagacaacgtcatgtccgtcttctcgacggtgggatcggggcctggcgggaacggtcaaaacgtggcgcgcatgtttgtccgcttaaaagactgggacgaacgcaacgccacaaccggcacctcgtttgccattattgaacgcgccacgaaagcctttaacaagattaaagaagcgcgcgtttacgccagcagtccaccggcaatcagcggtctgggcagttccgcagggtttgatatggaacttcaggaccacgcgggcgccggtcacgatgccttaatggccgcgcgcgatcggttgattgagctggcggcgcaggacagttcgctgacccgcgtgcgtcacaatggtctggacgacagtccgcagttgcaaattgatatcgaccagcgcaaagcccaggcgttgggcgtctctatcgacgacatcaacgacacgctgcaaaccgcatggggctccagttacgtcaatgactttatggaccggggccgcgtgaagaaggtctatgtacaggcggcggcgaaataccgcatgctgccggacgatatcaatctctggtatgtgcgtaataaagacggcggcatggtgcctttctccgcctttgcgacgtcacgctgggaaacgggctctccgcgtctggagcgctataacggctactcggcggtcgagattgtcggcgaagcggcgcctggcgtcagtaccggtacggcaatggatgtaatggagtcgctggttcgccagttgccaacggggtttgggcttgaatggacggcgatgtcttatcaggaacgcctctctggcgcgcaggcgcctgcgctgtacgccatttcgctgctggtcgttttcctgtgtctggccgcgctgtatgaaagctggtcggtgccgttctcggttatgctggtggtgccgctgggcgtcattggcgcgctgctcgccacctggatgcgcggactggaaaatgacgtttacttccaggtcgggttgctaacggtgatcggcctttccgcgaaaaacgcgatcctgattgtcgaattcgccaatgagatgaacgagaaaggccacgatctgctggatgccacgctgcatgcctgccgccagcgtttacgcccaattctgatgacctctctggcctttattttcggggtgctgccgatggcgattagcaacggggcgggttccgggagccagcatgccgtcgggaccggcgtcatgggcgggatgatctccgccaccattctggcgatttacttcgtaccgctgttctttgtgctggtacgtcgccgcttcccgctgaaaccgaagccggaataa

SEQ ID NO: 74620 - DNA, 357 bp, Citrobacter koseri
atgatcaccgtctacggcatcaaaaattgtgacacgattaaaaaggcgcggcgctggctggaggcgcacgatattgactaccgctttcacgattaccgcgcagacggaatcgatgccgcgttattgaatacgtttattgcggagtcaggctggcagcccttgctgaatacacgcggaacgacatggcgtaaacttgatgaagccacgcgtaacggcatcacggatgcggcgtccgccgcagcattaatgactgaaatgccagcaattatcaaacgcccattgctctgcgcgaccgggaagcctatgctgctgggttttagcgaatccagttatcagcagttttttgatgaggtgtag

SEQ ID NO: 74621 - DNA, 1128 bp, Citrobacter koseri
atgtcgtgcccggttattgagctgacacagcagcttattcgccgcccttccctgagtccagatgacgcaggatgccaggcgttaatgattgaacgcctgcgtgcaatcggttttaccgttgagcatatggattttggcgatacacagaatttttgggcatggcgcggacaaggcgaaacgctggcctttgccgggcataccgatgtcgtacctgcgggtgatgtcgatcgctggatcaacccgccttttgaaccgacaatccgcgacggaatgctgtttggccgtggtgcggcggacatgaaaggctctctggcggcgatggtcgttgcggctgaacgtttcgtcgcccagcatccagatcatcaggggcgtctggcgttccttatcacctcggatgaagaagccagcgcgaaaaacggcaccgtgaaggtggtcgaaacgctgatggcgcgtaacgaacgtctggattattgcctggtcggcgaaccgtccagcactgaaatcgtcggggatgtggtcaagaatggccgtcgcgggtcgctgacctgcaacctgacgatccacggtgtgcaggggcacgtcgcttatcctcatctggcggataacccggtgcatcgcgcagcgccgatgttgaatgaactggtggcgatcgagtgggatcagggaaatgaatttttcccggcgaccagtatgcagattgccaacattcaggctggcaccggcagcaataacgtcattccgggcgagctgtttattcagttcaatttccgcttcagcaccgaactgaccgatgagactctcaaagagcgcgttcacgcgctgctggataaacatcaattacgctacacggtggactggtggctttccggccagccgtttctgacggcgcgcggcaagctggtggatgcggtggtgaacgctattgagcactataatgagataaaaccgcagttactcactacgggtggaacgtccgacgggcgctttattgcgcgtatgggggcgcaggtagtcgaactcgggccggtcaacgccaccattcataaaattaatgaatgtgttaatgcagccgatctgcaactgcttgcccgcatgtatcaacgtatcatggaacaactcgtcgcctga

SEQ ID NO: 74622 - DNA, 201 bp, Citrobacter koseri
atggactggctggcaaaatattggtggattctggtgctggtatttttggtgggcgtactgatcaatgtgatcaaagacctcaagcgggtcgatcacaaaaaattcctcgccaataaaccggagctgcccccgcatcgtgattttaacgataagtgggacgatgacgacgactggccgaagaaagatcagccaaagaaatag

SEQ ID NO: 74623 - DNA, 699 bp, Citrobacter koseri
atgaaacatgaccattttgttgttcaaagccccgataaacccgcgaaacaactgctgttgctgtttcatggcgtgggcgataacccggtctcaatgggagaaattggctcctggttcgcaccgttatttccagaggcgctggtggtcagcattggcggcgcggaaccttgtggcccggcgcctgggcgtcagtggttttcggttcagaatgtgacggaagagaaccgccaggcgcgggttgatgcgattatgccggtgtttatcgagacggttcgctactggcagaaacagagcggcgttgggccggaggctaccgcgctgattgggttttcgcagggggcgattatgtctcttgagagcatcaaggccgagccgggtctggcatcgcgcgtgattgctttcaacggacgctacgccagcttgccggaaatcgccacgaccgccacaacggtacatttgattcacggcggtgaagaccgggtgattgagttatctcatgcggttgccgcacaggaagcgttagtccgtgccggaggcgatgtgacgctggatatcgtcgaggatttaggccatgcgattgacgatcgcagtatgcagtttgcgctcgaccatttgcgctataccgtgccgaaacactactttgatgaagcgttgagcggcggtaaaccgaatgatgatgatattatcgaaatgatataa

SEQ ID NO: 74624 - DNA, 2016 bp, Citrobacter koseri
atgtctgacaatgacgcattgcgggcgctaaccgcacaaatggcgcaggaagggattcgtcggctgctggtgctcagcggcgatgtgtcctggtgtcgtgaacgggcgctggcgctgcgagaagcattggctggcgactggctgtgggtggcaaccgatgcgcccgccgcgccgcactgtacgccgcaggcgttacaaacgctgctgggacgcgagttccgccacgcggtttttgatgcgcagttagggtttgatgcctcggcattcgcggcgctgagcggcacgctgcgagccggaagctggctggtgctgctgacgccgccgtattctgcatgggaatcccgtcccgatgcggattcgctgcgctggagcgactgcccgcagcctgttgcaacgccacattttatccagcacctcaaacgcgtgatggcccgtgacgagcagacgctgcactggcagcagtctcaaccgttttcatggccgcgctttcctgcccgtccccactggcaacccgctacgggtgaaccacagcctgagcaggccgcgattttgcggcacctgctgcgaatgccacccggcgtggccgccgttacggcagcgcgagggcggggtaaatcggcgctggccgggcagttcatttcgcggatgagcgggacggccattgtaactgcgccatcgaaagcggcgacggacgtgctggcgcagtttgccggtgagaaatttcgctttctcgctcctgatgcgctgttggcgggcacggagacggccgactggctgattgtcgatgaagcggcggcaatccccgcgccgctgctgcatcgcctggcgtcgcgtttttcacgcatattgttgaccaccaccgttcagggctatgaagggacgggacgcggttttctgctgaagttctgcgcccgttttcctcatctccggcgttttgaactgcgacagcctgttcgctgggcgcaggggtgcccgctggaacaatgggtcggcgaagcgctgatattcgacgacgagacgtttgcccatgcgccgcagggggcgattcggttctctgcttttacgcaggcgctctggcataccgggccggcgcagccgctggcggtgtatcagctgctttccggcgcgcactaccgtacctctccactcgatctgcgtcgcatgatggatgcgccggggcagcattttctcggcgcttttacggctgagcgggtagcgggggccgcctggctggtggaggagggcggattatcggccgcgctgagccaggccgtgtgggcgggctatcgtcgcccgcgcggaaatcttgtcgcgcagtcgttggccgctcatggcggcgatccgctggcggcgacgctgaccgggcgtcgggtgagccgtattgccgtccacccggctcgccagcgggaagggattgggcagcagctgatcgctgaggcatacggcggcgccagccagtgcgactatctctccgtcagttttggttataccgccgaactctggcgattctggcagcgttgcggttttgtgctggtgcggatggggaaccacaaggaggcgagcagcggctgttatacggcgatggctttgctgcccatcagcgaggccggcgcgcggctggcgcaccgcgagcaccagcgtctgcgccgggatgcggagatactggctcgctggaacggagaagcgatcccggttatcccgctgaaagcgtctacgcttaatgatgatgactgggatgaactggcgggctttgcgtttgcccatcgaccgttgctcacgtcgttaggctgtctgagtcgattgcttgagcgctgcgagctggcgctccccgcgctgcgtggacgcctggaggagaagtgcagcgacgcgaatctgtgtatccggctgggtttgcctgggcgtaaagcgctgcttgtcgcccagcgccgggaagtcgcccatgcgcttaccgcactggatgacgaacgggcgcagcggttacgcgaacgcgttttgcaatggcaattttttcactaa

SEQ ID NO: 74625 - DNA, 864 bp, Citrobacter koseri
atgcgctggcaagggcgtcgtgaaagtgacaatgtagaagacagacgcaatagctccggcggcccgtcaatgggcgggccgggttttcgtttgcccagcggcaaaggcggaatcattctgctgattgtcgtgctggtggcgggctattacggggtggatcttaccggtttaatgaccgggcagccgatttctcagcaggaaacgacgcgttcgatcagtccaaatgacgacgaggccgcgaagtttacctccgtcattctggcgaccacagaagatacctggggtcagcagtttgagaaaatggggcgcacatatcagcagcctaagctggtgatgtaccgtggcgcgacgcgcacaggatgcggtgcgggtcagtccgtgatggggccgttctattgcccggcggatggcacggtctacatcgatctttccttctacgatgacatgaaaaacaaactgggcgcggatggcgattttgcccagggttacgttatcgcccacgaagtggggcaccatgtgcaaaaactgctgggcatcgaaccgaaggtccgtcagctgcaacagaccgcatcgcaagcggaagtgaaccgactctccgtacgtatggagctacaggcggattgcttcgcgggcgtctgggggcacaacatgcagcaacagggcgtactggaatccggcgatctggaagaagcgttgaatgcggcgcaggcgattggcgacgatcgtctgcaacaacaaagtcagggacgcgtggtgccggacagcttcactcacggcacttccgagcagcgctatacctggtttaaacgcggttttgatagcggcgatccggcacaatgtaataccttcggcaaaggtttttaa

SEQ ID NO: 74626 - DNA, 714 bp, Citrobacter koseri
atgcaaaagcaagctgagttgtatcgtggtaaagcgaagaccgtatacagcacggaaaacccggacctgttggtgctcgaattccgcaatgatacgtcagcaggggatggcgcgcgcattgaacagtttgatcgcaaagggatggtgaacaacaagtttaaccatttcatcatgactaaactggcagaagcgggcatcccgacccagatggagcagctgctgtccgataccgagtgtctggtgaaaaagctggatatggtgccggtcgagtgcgtggtgcgtaaccgtgcggctggttctctggtcaagcgtctgggcattgaagaaggcatcgagctgaacccgccgctgttcgacctgttcctgaaaaacgatgcgatgcacgatccgatggtcaacgattcttactgcgaaaccttcggctgggtgagcaaagagaatctggcgcgcatgaaagagctgacctacaaagctaacgacgtgctgaaaaagctgtttgacgatgccggtctgatcctggtcgatttcaaactggagtttggtctgtacaaaggcgaagtagtgctgggcgatgaattttccccggacggcagccgcctgtgggacaaagagacgctggataaaatggacaaagaccgtttccgccagagtctgggcggcctgatcgaagcctatgaaaccgtcgcacgtcgcctgggcgtgcagttagattaa

SEQ ID NO: 74627 - DNA, 1035 bp, Citrobacter koseri
atggcttactcagtacaaaagtcgcgcctggccagggttgcgggtgtttcgctcattatgctgctcgcggcctgtagctctgactcgcgctacaagcgccaggtgagcggtgatgaatcctatctggaagccgcgccgcttgctgaacttcatgcgccagcagggatgattctgccggtaacgacgggcgactataacattccggtgaccaacggcagcggcgctgtcggcaaagcgctggacattcgtccgcctgctcagccgttagcgctggtgaccggcgcgcgtacccagtttacgggtgataccgcaaccttgctggtggaaaatggtcgcaataccaacctgtggccgcaggttgtcagcgtgattcagtccaaaaactacacgattgaaaaacgtgatgacgccagccagaccctgacgaccgattgggttgaatggaaccgtctggatgaagaccagcagtaccgtggacgttatcaaatctcggtgaaaccgcagggttatcagcaggctgtaacggtgaaactggtgaatctggaacaggctggcaagcctgccgcagatgccgcttcgctacagcgttatagcgctgagatgatgaacgtaatctcggcgggtctggataaaaccgccaccgacgctgcgaacgccgcgcaaaaccgttctgccgccacgatggatgtgcagagcgccgcagatgacaccggtttgccaatgctggtcgtccgtgggccgttcaacgtggtgtggcagcgtctgccagccgcgcttgaaaaagtgggcatgaaagtgaccgacagcacgcgttctcagggcagcctggcagtgacctacaaaccgctgtctgacagcggctggcaggatctgggcgcaaccgatccggggctgtcgtccggcgactataaattgcaggtgggcgatttagacaaccgcagtagcctacagtttatcgatccgaaggggcataccctgacgcagagccagaacgacgcgctggttgccgtcttccaggcagcgttcagcaagtaa

SEQ ID NO: 74628 - DNA, 879 bp, Citrobacter koseri
atgttcacgggaagtattgtcgcgcttgttacaccgatggatgaaaaaggtaatgtctgccggtcaagcctgaaaaaactgattgattatcatgtcgccagcggtacctcggcgattgtttctgttggcaccaccggcgaatccgccacgctgagccatgacgagcatggcgatgtggtcatgatgacgctggagctggcggacgggcgtattccggttatcgccggaacgggcgcgaacgcgacggcggaggccattagcctgacgcagcgtttcaacgacagcggcgttgtcggttgcctgacagtgacgccttactacaaccgcccgactcaggaaggtctgttccagcatttcaaagccatcgctgaacatactgacctgccgcaaattctgtataatgtgccgtcccgtacaggctgcgatatgctgccggaaaccgtcggccgtctggcgaaagtaaaaaatattgtcgcaatcaaagaggcgacagggaacttaagtcgggttcaccagatcaaagagctggtttcagacgattttattctgctcagcggtgatgatgcgaccgggttggacttcatacagctcggcggtcatggcgtgatttccgttaccgcgaacgttgcggcgcgtgatatggcggaaatgtgcaaactggcggcggaaggtcgttttgccgacgcgcgggtgattaatcagcgtctgatgccgttacataacaaactatttgtcgaacccaatccgatcccggtgaaatgggcatgtaaggagttgggacttgtggcgaccgatacgctgcgcttgccgatgacgccgatcaccgatacgggtcgtgagattgtcaaagcggcgctcaagcatgccggtttgctgtaa

SEQ ID NO: 74629 - DNA, 573 bp, Citrobacter koseri
ttgacatcgtcatcacaacattacctggttatcactgcgctgggtgccgatcgcccgggaattgtgaatactatcacccgccatgtcagcagctgcggctgtaatatcgaagacagccgactggccatgctgggtgatgagttcacgtttatcatgctgctgtctggctcctggaacgccatcaccctgattgaatcaaccttgccgttgaaaggcgcagagctggatttattgattgtgatgaagcgcaccaccgctcgcccccgtccggccatgcccgcaacggtatgggtacaggtcgaggtggaagattctccgcatttaattgaacgttttaccgcgcttttcgacagccatcagatgaacatcgctgagctggtctcccgcacgcaacctgctgaaaatgaaaaggctgcacagctgtttgttcaaatcaccgcgcacagtccggcatcccatgatgccgtaaatattgagcatgcctttaaagcactatgtacagaactcaatgcgcaaggcagtattaacgttgttaattactcacaacatgatgaacaggatggagttaagtaa

SEQ ID NO: 74630 - DNA, 471 bp, Citrobacter koseri
atgaatccactgaaagccggtgacatcgcaccgaaatttagcttgccggatcaagacggagaacaagtaaatttgaccgacttccagggacagcgcgtactggtgtatttctaccctaaagccatgacgcccggctgtaccgtacaggcctgtggtttacgcgataacatggacgatctgaaaaaagcaggcgtagacgtgttggggatcagcaccgataaacctgaaaaactgtctcgtttcgccgaaaaagagctgcttaactttacgctcctgtccgatgaggatcatcaggtctgcgagcaattcggcgtctggggggaaaaatcctttatggggaaaacctacgacggcatccatcgcatcagcttcctgatcgacgctgacggcaagatcgaacacgtatttgacgactttaaaaccagtaaccaccacgatgtagtgctgaactggctgaaagaaaacgcctga

SEQ ID NO: 74631 - DNA, 1164 bp, Citrobacter koseri
atggactgttccattcttaatctgacgctttttcagcgcggacacgtatatgccccggacgatctgggccagcaggacattctggttgccaacggcaaaattgtcgctattgcgccgactatcgctgcgaaagacttccccggttgccagcagatcgatcttcacggtgatatcgtctgcccgggatttatcgatcagcatgttcatcttatcggcggtggcggcgaagccgggccgcatacccgtacgccagaggtgcggctgtcacggttggttgaagccggtattacctccgttgtcgggctgctgggaacggacggcatcacccgtcatcctgaatctctgctggcgaaaacgcgcgcgctggaatatgaagggatcagcgcatggatgttaacgggggcgtattctctgccttcgccaaccatcaccgggagcgtcgatcgcgatgtggcgttgattgataaagtgattggcgtgaaatgcgccgtctccgatcatcgttcttcggcgccgaattccgccgcgctggcgacaatggcggcgcagtcccgcgtggggggattactgggccagaagccgggaatcagcgtctttcatatgggcgacagcccacacatgctggaaccgctgtacgatattctcgccaacgccgatgtccccatcacgaaactgctgccgacgcatgttaaccgcgccgaaccgctgttccaggcggcgctggagtatgcgcttgatggcggctacatcgatattaccagcagcattgatgaaccgatcgatccggcgacggccatcgtgacagccttgcgccatgaggttccgctgtcgcgcattaccctgagttctgatggcaacggcagccagccggaatttgatgagcatgggaatttgacgggcattggcgtggcgggttttgagtcgctgatcggcacgctgcgtcagttagttacgcagcataaactgccgctggagcaggcgctgcgtccgcttacccgcaccgtcgcggaatttctcggctttgagcataaaggacgtctggcggcaggttgtgacgccgacattctggtgctgaatcaggcgctggaagtcagccatctgtgggcgaaaggcaaagcggtggtgaaagacggtaaagcgtgcgtgaaaggaacgtttgaataa

SEQ ID NO: 74632 - DNA, 462 bp, Citrobacter koseri
atgagcgcacaggtacgtaaaaacgtcatggatctgtttatcgacggcgcgcggcgcggttttaccatcgccaccaccagcctgttgcccaacgtcgtcatggcctttgtcattattcaggcgctgaaggtgacggggttgctggatatcgtcgggcgagtgtgtgaaccggtaatggcgctatggggtttgccgggagaatcggcgaccgttctgctggctgcggtgatgagtatgggcggcggcgtgggcgtctgcgccagcctggtggttactggcgcgctgtccggtcacgatgccactgtgctgttacccgccatttacctgatgggcaacccggttcagaatgtagggcgctgcctgggaacggcgggcgttcatccgcgttattacccgcatattattgcggtgtgcgtgattaatgccctggtctctatttgggtaatgcaggctattgtttaa

SEQ ID NO: 74633 - DNA, 660 bp, Citrobacter koseri
atgggtcatcagatgcacacgcagcaaaaagtggggtggggcggttatctcgccttttttattaccattatccttttttcaggcatgttcgcgaaaagtacggaatggtggcgagtgtttgattttaccgtgctcaatggcgcgtttggcctggttaacgcagcaggcgacacggcggtttcatttcgcggcactggcggtaccggggcgagagatggctttttattcgcactggagctggcgccatcggttattttatcgctcggcattatttccgtgacggaagggctgggcggactgcgcgccgcacagcagttgatgacgccgatactcaggccgatcctgggcatccccggcatttgctccctggcgcttatcgccaatttgcaaaatacggatgccgccgccgggatgaccaaagagctggcggaagagggggtgattaccgaacaggaacgggcaattttcgcctgctggcagacaagcggcagcgcgattctgacgaactacttctcatcaggcgccgcgctatttgccacgataaccgtaccggttattacgccgctggcggtcattttagtcttcaaatttatcggtgcgaacctgttgcgggtgtggatcgcgcagcttgaacatcgtcgtatgaaacaggaggcctga

SEQ ID NO: 74634 - DNA, 1062 bp, Citrobacter koseri
atgcttgagatgttgatgcagtggtatcgccgtcgttttagcgacccggaggcgatcgccttgctggttatcctggttgccggttttggcatccttttctttttcagtgggcttctggcgccgttgctggtggctattgtcctcgcttacctgctggagtggcctacggtccgtctggaggcgattggctgctcccggcgttgggccacctcaatcgtactgattgtgtttgtcggcattttactgctgatggcgtttgtcgtgatgccggtggcctggcagcaggggatctatttgattcgcgatatgccgggtatgcttaataagctctctgattatgccgccacgttaccccgtcgttacccggcgctgatggatgccgggatcattgatgcgatggcggaaaacatgcgcacccggatgctgacgttaggtgattcggtcgtgaaatactccctggcctctctggtcgggttgttgacgctggcggtgtatctggtgctggtgccgctgatggtcttcttcctgatcaaagataaagagcagatgctgaatgccgtgcgccgggtgctgccgcgcaatcgcggtctggccgggcaggtctggatggagatgaaccagcagatcaccaactatattcgtggcaaagtgctggagatggtggtggttggtgtggcgacctggcttggcttcctgctctttggtctcaactactcgctgctgctggcggttctggttggattctcggtattaatcccctacatcggcgcgttcgtggtgaccattccggtgattggcgtggcgttattccagtttggcctcggaacggagttctggagctgcttcgccgtgtatctgatcattcaggcgctggatggaaacctgctggtgccggtactgttttcagaagccgtcaacctgcacccgctggtgattattctgtcggtggtgattttcggcggtctgtggggtttctggggcgtgttcttcgccatcccgctggcgacgttaattaaagccgtggtacatgcctggccggacggacaggtcagcgacggttaa

SEQ ID NO: 74635 - DNA, 1464 bp, Citrobacter koseri
atgttcaggctgttgaagaaaaacctggttgctaccctcatcgctgcgctgactatcggtcaggtagcccccgcgtttgcagattccgcagacacgctaccggatatggggacctcagcaggaagcacgctttctatcggtcaggaaatgcaaatgggcgactattacgttcgccagttgcgcggcagcgcgccgttgatcaacgatccgctgttaagtcagtacatcaacgcgctggggatgcgtttagtctctcatgcagactccgtgaaaacgccgttccatttctttttgattaacaacgacgaaatcaacgccttcgcctttttcggcggcaacgttgtgctgcattccgcgctctttcgctattccgataacgaaagtcagttagcctcggtgatggcgcacgaaatttcccacgtaacccaacgccatctggcgcgcgcgatggaagatcaaaagcgcagcgctccgctgacctgggtcggcgccttaggctctattcttctggcgatggccagcccgcaggccggtatggcggcgctgaccggtacactggcgggaacgcgtcaggggatgatcagcttcacccaacaaaacgaacaggaagcagaccgaatcggtattcaggtgctgcaacgttcagggttcgatccgcaagcgatgccgacgttcctggaaaaactgctcgaccaggcgcgctactccacgcgtcctcccgaaattttgctgacgcaccccctaccggaaagccgtctggcggatgcccgcaaccgtgcaaaccagatgcgcccggtggtagtggagtcgtctgaagatttttatctggcgaaggcgcgtacgctggggatgtacaattctggccgtaatcagcttaccagcgacctgctcgacgcatgggaaaaaggaaacgtgcgccaacagcgtgcggcgcaatatggccgggcgctacaggcaatggaagccagcaagtacgacgaagctcgcaaagcgctgcaaccgttgctgacggctgaaccgaataacgcgtggtatctcgacctggcgaccgacatcgatctggggcagaagaaaaccagcgaagcgattaaccgtctgaaaaatgcccgcgatctgcgcgcaaacccggtattgcagctaaacctggcgaatgcttatttacagggcgggcaagcccgagaagccacgaccatcctcaatcgctacaccttcaacaataaagacgacggcaacggctgggatctcctggcgcaggctgaagcggcgctcaataaccgcgatcaggagctggcggcgcgcgccgaaggctatgcgctggccgggcgactggatcaggcgatctctatgctcagcagcgcaagttctcaggtcaagctgggcagccagcaacaggcgcgttacgatgcccgtatcgaccagctgcgccagttgcaggaacgctttaagccatacaccaaaatgtag

SEQ ID NO: 74636 - DNA, 360 bp, Citrobacter koseri
atgtctgatgcagtaaaaatctaccacaacccgcgttgttcaaagagccgcgacacgctgagcctgctgaaatccaacggcgttgaaccggaagtggtgctttacctggaaacacctgccgacgcagcgacgctgcgtgaactgctgcgtatgttagggatgtccagcgcacgcgaactgatgcgccagaaagaagatctctacaagtctctcaatctggccgacagccatctgagcgaagaggcgctgattcaggcgatggtggaaaacccgaaactgatggagcgaccgattgtcgtcgccaacggtcaggcgcgtattggccgcccgccggagcaggtgttggaaatcgtgagctaa

SEQ ID NO: 74637 - DNA, 846 bp, Citrobacter koseri
atggaaataaaattgcacgccaatgccactaccacaccgcgtattcgtcgctatcttcagcagtctgaaaaaagcgacagagagcttgccgccgagcttgggatttctgttacgacagtgaggcgatggcgacatcgcgatcgggttagtgatgggcaaactacgccgaagacgatatacaaagcgatgagacaagagcaggttgttttggtgaacgccttgcgcgacgcaacaggtgcgccgctggatgacctcttattgttggtgaacgaggtgctgggcattgttgtgtcgcgcgcgacgttgaatcgttatcttaaaccggcgacacctcggcgacagcgggcgtcgttacaagggaaaaaagcgttaaaatccgggatgctgccgaatcatctggcgctgtatcaccttccactctcgttacatatggacgacggtggcgaacatcatttgttctgggcgcgcgagccgatgagcggctggtgctttgcccgactgtatgcgggtatttcaccgcagcgggtcgtggtctggctggatgaattgctggaaacctgcccggctgatatacaatctattgagacaaatatttctgatcgcatatgcccgcagctaaaaacgcacctggcgacgcgcggtatgtcatgccaaataaccggtacgatgcccggttgggtgccggtgacagtaccgctaaatgagattgttccccggctaaatagtgaatctgccagcgagttgcttatccgcttatgtgaatgctacaaccgtggtaagacacagaaaaaactgggggattgtacgccgcaggactttctggaagcgctgcggcgcatggattag

SEQ ID NO: 74638 - DNA, 1320 bp, Citrobacter koseri
atgaacaatgttctgggatttcttgaagcaaaactgatgcctctggcggcgaaaaccgctcagcagcggcatctcggcgcgattcgtggcgcatacgtttcgtttatgccgtttattatcgtcggctctattctgctggtgatctcttcgtttccgaatcaaaactatcagcagtttatgtctcaggcttttggcgagagctggagtgcgattattgagatcccgtttaacgcggtgttctcaacgatgtcgctgtttatcagtttcctggtcgcatttcgtctggcggaacactacggcgaagatcgcatctcctgcggcattctggcgctggtctgttttctgatccttacaccgtttatcaaagtggcggaaaacggcggtattaccgtgatccccgtagaatggattggcacaaaaggattgttcgtcgcgatgatcggttcactgctatggactgaacttttctgctggctaaagcgtaaaaatctggtgatcaaaatgccagaaggtgtgccaccggcggtgcaagaatcttttgccgcgctgatccccgctttactggtcatgatactggtactgagcattcgcatcttgtttgaaaacacccattaccagaccatccatcagtttatttacgaagtggtcgccacaccggttcgtcattacggcacctcttactttggcgcgctgatgacagtgttcagcatcactattttgtggtcggtcggtattaactccggctcaatggttaacggcatcatccgcccgctgtggatggaaaaccagaccgacaacattgcggctattcaggctggcaccacacccccacacatcattacggaacagttttttgacatgatttggatgggcggcgcgggcgcaacgttgtcgctggtgttagccatgcttttctttgcgcgcagtaaaaacatgcgggaagtggcgcggctcggtgccggagcgtctgtgttcaacatcaacgaaccgattctgttcggtctgccggtgataatgaatccgataatgctgatccccttcaacctggtgccgctggtgctggtcaccgtacagtataccgcgatgaagctcggcgcagtcgccgtcaccacgggcgtctttattccgtggacgctgccgccagtcattagcggttttatcgttaccggacatattagcggcagcgtcatgcagctcattaacctgctgattggcgcaatgctgtatctgccctttatgcggatcgtcgataaacagtaccgcgcggcggaactggctgccgtaacgcagcccgatgcaccacttgcaaaacaggagtaa

SEQ ID NO: 74639 - DNA, 960 bp, Citrobacter koseri
atgtggggaattatcgcaacctggcgaatggcgcttgaaggtgtggcggaatccgcgtctgcactggctgcgggaaacccggtcgcaatggcggtggtagacgccgtcgcaaccgttgaggactttccgttttataaatccgtgggctatggcggactgcctactgaaaatggcgaggtcgaactggatgccgcctatatggacggcgataccctcgcgtttggggcggtcgggaatctggtggatattgccaacccggtgcgcgtcgcacatgcgttaagccgtcagcgctataactgtctgctggttggccagggtgcgcgtgaatgggcactgagccagggatttgcggataaaaccatgctcaccgacagagccatccagcactatcaaaaacgctgccgggagacgctggataaaggcttaagtccatataacggccacgatacggtcggcattattggcctggataaactggggtcgatgagcgttgccacctccaccagcggcctgtttatgaaaaaacgcggccgcattggcgactctccggttattggttccggcttctattgcgacagtgaagtcggcgcggcgacggcaacgggcgtcggtgaagatctgatgaaaggctgcgccagctatgaaattgttcgtcgcatggcgcagggaatgacaccgcaacaagcggctgattctgtcgtgtttgagctggaagataaattgatgtcgcgatttggtcgcacaggcgacctctcggtggtctgcatgaaccgtaaaggcgagtttggcgcagccaccaacatcaaaacattctcgttcgttgtcgctaccgcacgccaaccgctcactgtatttcgcgccgaacgccagcacgagaaaacccattatcaccccgtcgatgaagaatggatgcaagactatgccgcacggatacgtgctccagtcgaggaagagaaatga

SEQ ID NO: 74640 - DNA, 1431 bp, Citrobacter koseri
atgatttcataccaactgatttgctcacccgcagaggttcaaccacaaggccatcttatcgcgcctcctggctgttctttattgcgggattccgctctgctcgcggaaatgcgcgtactggcgcaagataaagtagcggatacccgcttcggctgcgcgccttttacgcgaattaccctggtgcctgatgcgctctggcaggacagcctgaccgaaggtttactcaatacgatacgaccgctgctggcctcgccagtcagcgaaaatgtgctgattgatgtcaccgaaataaatgacactgtactggcgctgctgctgcgttttctgtttaatcaggcgtatacgctcaatgatttacaattgaaaaaaacggatgccaccgctacccgcatccgccatatcactgcgttctgccagccagaacaatacgagaaacgtgaaaaagtgttcaggcagcagcaggctattgccaacggcatggtcactgcaaggcggctggcggataccccctccgattgctgtacgccgcagttcgtggtcaacgaggcacaaaccctgtgcgcctcttttcctgcgctgcactgtgaagtccttgatgaacaacaaattgttgaacaaggcctcggactgctccatgcggttggcaaaggagcaacctgtccaccgcgtttgcttgccattcattacaacggcataagtgacggcccggtacgctgctacataggtaaagggataacgtttgataccggtggcctgtggttgaaagagggcgcgggtatgtacaccatgaaatatgacatgtgtggcgcagccaacgtgttaggactgctcctgacggttgcggagttaaaactgcccgtacgcataatgggcgtgctggcgctggctgaaaacgcgatcggcccgaacgcaatgcagcctggcagcgttgctcgcgcctgcaacggtatgacagtggaaatcaataacaccgacgctgaaggacgactggtgctggccgacgccattgcatggacgagccaacgacagccgcaggcccgttatatcatcgacatggcaaccttgaccggtgcggtggtgaaagcgcttggctacgaactcagcgggctgatgactcaggacgatgcgttaagacaggcgctaacagaggctggacggcagagcggagatgaagtctggtctttacctctggatgcacgactgaaaaagcagaccgaaagcgccatagccgatctctgtaatacgccgacgaacaatgcggcaatcagcgcttccgcagcctggttactgcatcatttttgcccgtcggatatcccgtgggcacatctggacattagcggtacggcgctatggcgagaaaacggcagaagcgtcgcgtccggcaggccgattccactgctggttgagcacttactggaagatattgcctga

SEQ ID NO: 74641 - DNA, 726 bp, Citrobacter koseri
atggaatcctggattgaggtatctctgaacactccggcacagctctctctgccactttatcttcctgacgacgaaactttcgcaagtttctggccgggggataacgcctctttactggctgcactgcaaaacgtgctgcgtcaggaacatagcggatatatttatctctggtcgcgtgaaggcgcgggccgtagccatctgctgcacgcggcgtgtgctgaactgtcgcaacgcggcgacgcggtaggctatgtgccgctggataagcgcacctggtttgtaccggaagtgcttgacggcatggaacatttgtcgctggtgtgtattgacaatattgaatgtgtcgccggagatgaactgtgggaaatggcgatctttgatctctataaccgcatccttgagtcgggaaaaacgcgcctgctgatcaccggcgatcgccctccacgtcagttaaagctgggattacccgatctggcttctcgtctggactgggggcaaatctacaagctgcaacctctctctgatgaagacaaactccaggcgttacaactgcgcgccagactgcgtgggtttgaactgccggaagatgtcgggcgttttctgttgaagcggctggatcgcgagatgcgtacgctatttattacgctggatcagctcgatcacgcctcaatcaccgcacagcgtaaactcaccattccgttcgttaaagagattctgacgctgtaa

SEQ ID NO: 74642 - DNA, 1290 bp, Citrobacter koseri
atgacgcgccgtgctatcggggtaagtgaaagaccgccgcttttacagacaatcccgcttagtttgcagcatttgttcgccatgtttggcgcaaccgtgctggtgccagtcctgtttcatatcaacccggctaccgttctgctgtttaacggcatcggtacgttgctgtatctctttatttgtaaaggtaaaattcctgcatatttagggtcgagctttgcctttatttcgccggttctgctgctgttgccgctggggtatgaagtggcgctgggtggttttatcatgtgcggcgtgctgttctgcctggtctcttttatcgtgaagaaagccggaaccggctggctggacgtgatgttcccgcctgcggcgatgggcgcaatcgttgccgttatcggtctggaactggcgggtgtggctgcgggtatggctgggttactgcctgctgaagggcaatccccggataccaaaaccattaccatctcccttgtgaccctggcggtgacagtctttggctccgtgctgttccggggtttcctggccattatcccgatcctgatcggcgtgctggcaggctatgcgctgtcatttgcgatgggagtggtggataccgcgccgattgccgaagcgcactggttcgcgctgccgacgttctatacgccgcgctttgaatggtttgccattctgacaattctgccagcggcgctggtggtgattgccgaacacgtaggtcacctggtcgtgacggcgaatatcgttaaaaaggatctggttcgtgaccccggtctgcatcgttcgatgtttgccaacgggttatcaacgatgatttccgggttcttcggttctacgccgaacaccacctacggtgaaaacatcggtgttatggcgatcacccgcgtgtacagcacctgggttatcggcggcgcggcgatttttgccattctgctctcctgcgtgggtaaactggccgctgcgattcagataatcccgctgccggtaatgggcggcgtatcgctgctgttgtacggcgtgatcggcgcatccggtattcgcgtattgattgaatcaaaagtcgattacaacaaagcgcagaacctgatcctgacctcggtgattttgatcatcggcgtcagcggcgcgaaagtgcatattggcgcggctgaactgaaaggaatggcgctggcgaccattgttgggatcggcctgagcctgatcttcaaactgatcagcgtcctgcgcccggaagaagtggtgctggatgcgaaagacgcggatacgccgcagcaataa

SEQ ID NO: 74643 - DNA, 627 bp, Citrobacter koseri
atgaagatcgtggaagtcaaacacccactcgtcaaacacaagctgggtctgatgcgtgaaaacgacattagcaccaaacgctttcgtgaactcgcctcggaagtaggcagcctgctgacctatgaagcgaccgcagacctggaaaccgaaacggtaaccatcgacggctggaatggcccggttgaaatcgaacaaatcaaaggtaaaaaaatcaccgtggttcctatcctgcgtgccggtctgggcatgatggaaggcgtcctggagcatgtgccgagcgcgcgtatcagcgtggtgggcatctaccgtaacgaagaaacgctggagcccgttccgtacttccagaaactggtatccaacatcgatgagcgtatggcgctggtggttgacccgatgctggcaaccggcggttcaatgattgcgacgatcgatctgctgaaaaacgcaggctgccacagcattaaagtgctggtgctggttgctgcgccggaaggtattgcggcgctggagaaagcgcacccggatgttgagctgtacaccgcatcgattgataagggacttaacgagcacggatacattattccgggcctcggcgatgccggcgataagatctttggtacgaagtaa

SEQ ID NO: 74644 - DNA, 1431 bp, Citrobacter koseri
atgtctggatttaaagcgaatttcatgtggggcggcgccgttgccgctcaccagttagaaggcggctggcaggaaggcggaaaggggattagcgtggcggatgtgatgaccgccggtgcgcatggcgttccgcgggaaattaccgacggcgtgatcgccgggaaaaattaccccaaccatgaggctatcgatttctatcaccgctacaaagacgatattaagctctttgccgagatgggctttaaatgttttcgcacctctatcgcctggacgcgcattttcccgcagggggatgaattacagccgaatgaagcgggtttgcagttttatgatgccctgtttgatgaatgcctgaagtacggtattgaaccggtgattacgctgtcgcattttgaaatgccttaccatctggtcacggaatatggcggctggcgtaaccgtaagctgatcgatttcttcgtgcgcttcgcgaaagtggtatttacccgctatcagcacaaagtgaaatactggatgaccttcaatgagatcaacaaccaggccaattatcacgaagatttcgcgccgttcaccaactcggggctgaaatacctgccgggcgaagatcgtgaaccggtgatgtatcaggcggcgcactatgagctggtcgccagcgcgctggcggtgaaagcggcgcgggagatcaacccggcattgcaggttggctgcatgatcgccatgtgtccgatctatccgctgacctgcgcgccggacgatatgatgatggcgatgaacgcgatgcaccgtcgctactggtttacggatgtgcatgtgcgcgggaaatatccgcagcatatcctcaactactttgcgcgtcggggctttgcgctggatatcaccgatgaagatcgcgcggcgctgttacagggctgtgtggactatatcggtttcagctattacatgtcttttgccacgaaagcgaccgcagataacccacagctcgattacgacgaaacgaaaagtctggtctccaatccgtatgtgcagaagtcggactggggctggcagatcgatcctgtggggttacgctactcgctcaactggttctgggatcactaccagctaccgctgtttattgtcgagaacggctttggcgcgatagatattcagcaggcagatggttccgttgacgatcggtatcgtatcgactatctcgcggcacacattcgtgaaatgaaaaaagccgttgtggaagatggcgttgatttgatgggctacaccccgtggggctgcattgatttggtgtcggcggggacgggcgagatgaaaaaacgttatggctttatctatgtcgataaaaataatgacggcagcgggacgctagcgcgccatccgaagagatcttttgcctggtatcaaaatgtgattaagaacaacggagaaaacatttaa

SEQ ID NO: 74645 - DNA, 1038 bp, Citrobacter koseri
gtgaccgacaaaacctctcttagctataaagatgccggtgttgatattgacgctggtaatgctctggttgatcgaatcaaaggcgtagtgaagaaaactcgccgcccggaagtcatgggtggtttgggtggcttcggcgcgctgtgcgcattgccgcaaaaatatcgtgagcctgtactggtttccggcactgacggcgtagggacaaaactgcgtctggcgatggatctgaaacgccacgacaccatcgggatcgacctggtggcgatgtgcgtcaacgatctggtcgttcagggcgcggaaccgctgttcttcctggattactacgcgaccggcaagctggacgtcgataccgccgccagcgtgatcaacggtattgccgaaggttgtctgcaatcaggctgcgcgctggtcggcggcgaaaccgctgaaatgccagggatgtatcatggcgaagattacgatgtcgccggtttctgcgtcggcgtggtggaaaaatcagaaattatcgacggttacaaagtggccgatggcgatgtgctgattgcccttggttccagcggcccgcactccaacggctattctctggtgcgcaagatcgttgaagtcagcggctgcgacccggaaaacaccgagctggaaggcaaaccgttagccgatcacctgctggcgccaacccgcatttatgtgaagtccattctggaactgattgaaaaagtcgatgtgcacgccatcgcccacctgaccggcggcggtttctgggaaaatattcctcgcgtattgccggacaacacccaggcggtgattgacgaatcttcctggcaatggccagccgtcttcaactggctgcaaaccgcaggcaacgtcagccagcatgaaatgtatcgcaccttcaactgcggcgtcgggatggtgatcgccctgccggaagcggaagtggataacgccctcgccctgctgaaagcaaaaggtgaaaacgcctggaaaatcggtatcattaaagcctctgattccgaacagcgcgtggttattcaatga

SEQ ID NO: 74646 - DNA, 639 bp, Citrobacter koseri
atgatgaatcttgtggtgcttatttccggcaacggaagcaatttgcaggcgattatcgatgcctgcaaagagaaaaaaatcaaaggcacccttcgggcagtattcagtaacaaggccgacgcgttcggccttgaacgcgcgcgtgaagccgaaattccggcacatgcgttaacggccgatcaattcgccagccgtgaagcgtttgaccgcgaactgatgcgtgaaatagacgcttacgcccccgacctcgtggtgctggcgggctatatgcgcatcctgagccccgcgttcgtcgcccactatgaggggcgtctactcaatattcacccttccctgctgccaaaatacccagggttgcatacgcaccgtcaggcgctggaaaacggcgatgaagaacacggaacctctgtccattttgttaccgatgaactggatggcggcccggttatcctgcaagcgaagattccggtctttgaaggcgacagcgaagatgaaattacggcccgcgttcagacgcaggaacacgctatctatccgctggtcgtcagttggtttgtggatggccgtctggaaatgcgtgataacgccgcctggctggatggcagtcgcctgccgccgcaaggctatgccgccgagtaa

SEQ ID NO: 74647 - DNA, 2067 bp, Citrobacter koseri
atgggtcaggaaaaactatacatcgagaaagagctaagttggttagcgttcaacgaacgcgtgctccaggaagctgcggataaatcaaatccgcttattgaacgcatgcgcttcctgggcatctattccaataaccttgacgagttctataaagttcgtttcgccgaactgaaacgtcgcatcattatcagcgaagaacagggttctaattctcattctcgccatctgctaggtaagatccagtcccgggtactaaaagccgaccaggaattcgacagcctgtacaacgaattgctgctggaaatggcgcgtaatcagatcttcttaatcaacgaacgccaactgtcggccaaccagcaaagctggctgcggcattattttaaacactacttacgccaacacatcacgccaattctgatcaatcgcgagacggatttagttcagtttctgaaagatgattacacctatctggccgtagagattattcgtggcgatgctatccgctacgcgctgctggaaattccatccgacaaagtgccgcgttttgtgaatctgccgccggaagcgccgcgccgccgtaagccgatgatcctgctggataacattttgcgctactgcctggacgacatcttcaaaggcttctttgactacgacgcgctgaatgcctactcaatgaagatgacccgtgatgccgaatacgatttggtgcacgagatggaatcgagcctgatggagctgatgtcctccagcctgaaacaacgcctgaccgccgagccggtgcgttttgtttatcagcgcgatatgccaaacgcgctggtggaagtgctgcgtgaaaagctgaccatctcccgctacgactccatcgtacccggcggccggtatcacaacttcaaagacttcattagcttccccaacgtgggcaaagccaatctggtgaacaagccgctgccgcgactgcgccatctctggtttgataaagagaagttccgcaacgggttcgacgccattcgcgagcgcgatgttctgctctattatccgtaccacactttcgaacatgtgctggaattgctgcgccaggcctcctttgaccccagcgtgctggcgatcaaaatcaacatctaccgtgtggcgaaggattcacgcatcatcgactcgatgattcacgccgcccataacggcaagaaagtcaccgtggtggtggaattgcaggcgcgattcgatgaagaggcgaatatccactgggcgaagcggctgaccgaagcaggcgtacatgtgatcttctcggcgccaggcctgaaaattcacgccaaactgttcctcatctcgcgtaaagaaggcgatgaggtggtgcgttatgcgcacatcggcacagggaacttcaacgaaaaaacggcacgcctgtacaccgactattccttactgaccgccgatgcgcgtatcacgaacgaagtccgtcgcgtgttcaactttatcgagaacccttaccgcccggtgacgttcgactatttgctggtctctccgcagaactcacgacgcttgctgtacgagatgatcgataaagaaatcgccaacgcccagcaaggtctcccctccggcattacgctgaagctgaataacctggtggataaggggctggtcgaccgtctgtacgccgcatccagctcgggtgtgccggtcaatctgctggttcgtgggatgtgttcgttgattccaaatctggaaggcattagcgacaatatccgcgtgatcagtatcgtggatcgttatctcgaacatgaccgggtttatatttttaccaacggcggcgacaagcaggtgtatctttcctccgctgactggatgacgagaaatatcgattaccgtatcgaagttgctgcgccgctgctcgacccgtgtcttaagcaacgcgtgctggatattattgacatcctgtttagcgacacggtaaaagcccgctacatagataaagaactgagtaatcgctacgtgccgcgcggaaatcgtcgcaaggtgcaatcgcaactggcgatttacgactacatcaaatcactcgagcaacctgactaa

SEQ ID NO: 74648 - DNA, 1542 bp, Citrobacter koseri
atgccaatacatgacaagacaccccggccgcaggagttcgcggcggtcgacctcggttcgaacagttttcatatggtcattgcccgcgtggtggatggcgccatgcagatcatcggtcggctgaaacaacgcgtacatctggcggatggtctcggcgaagacaatatgttaagtgaagaagcgatagaacgcgggttaagctgcttatcgttattcgccgaacgcctacagggattttccccgtcaagcgtgtgtatcgtaggcacccataccctgcgccaggcgctgaacgccaccgattttctgaagcgcgcggagaaggtcatcccctacccgatcgaaatcatttccggtaacgaagaagcccgcctgatttttatgggcgtggagcatacgcagccggaaaaaggccgcaagctggtgatcgatatcggcgggggttcgacggagttagtcatcggcgaaaacttcgagccaaaactggtcgaaagccgtcgcatggggtgcgtcagtttcgcacagatctattttcctggcggcgccatcagcccggaaaatttccagcgcgcccgaatggccgctgcgcaaaaactggagacgttaacctggcagttccgcattcagggctggaacgtcgcgctgggcgcgtccggcaccatcaaagccgcccatgaagtgctgctggaaatgggtgagaaggacggcttcattacgccagaacggctggataaactgatggctgaagtgctcaggcaccgctcctttgaagcgctgagcctgccgggtctgtctgaagagcgaaaagcggtctttgtaccgggtctggccattctgtgcggcgtttttgatgcgctggcgatccgcgaactccgcctttccgacggggcgctgcgcgaaggcgtgctgtacgaaatggaaggccgcttccgtcatcaggatgtgcgcagccgtacggccaaaagcctggcaaatcagtataacatcgacagcgatcaggcccggcgcgtgctggaaacaaccatgcagatgtatgaacagtggcagacgcaacagccaaagctggcgcatccacagctggaagcgttactgaagtgggctgcaatgctgcatgaggtggggctgaacatcaaccacagcggcctgcaccgccactctgcctatattctgcaaaacagcgatttgccgggttttaaccaggaacagcaactgatgatggcgacattagtccgttatcatcgtaaagccgttaagctggatgacttgccccgctttacgctgttcaagaaaaaacaattcctgccgttgattcagctattgcgcctgggcgttctgctgaataatcagcgccaggccaccacaacgccgccaacgctacggcttaaaactgacgacaatcactggacgttgcgcttcccgcatgactggtttagccaaaacgcgctcgtcctgctcgatctggaaaaagagcagcaatactgggaagcggtcacgggctggcgtctcaaaatcgaagaagagagttcgcccactatcgcggcgtaa

SEQ ID NO: 74649 - DNA, 2250 bp, Citrobacter koseri
atgaaactaaatcagacctatatcaaaatcagagataaatggtgggtgctgcctctcattttaccctctttgctgttgcccatattaagcattgccaatacctacgcgcataccaatacgggttccggcaatgtcacgcttttttatcttcccctggcattcaccattagcctgatgtcattttttgactgggcagcattaccgggcattgcggtcgcaatcttctggaatcgttatccgatagtgggattgtatgagacgctctccattatcggacatttcattatcccggtcgtgctctgctggggcgggtatcgcgtgtttactccccggcgtaatcaggtgtctcatggcgatgctcatctgatgtttcagcggatgttctggcaggtgttttgcccggcgacgttatttctggtgctctttcaatttgccgccttcctgggaatgtatgcgagcaaatcaagcatgatgggcgtaatgccttttaatatcaatacattgattaactatcaggctttgctggtgggaaatcttatcggcgttccgctgtgttattttattattcgcactgtccgcaatccgctatatctgcgtggatattatgcgcagctgaaacaacagtttgataagaaagtcacaaagaaagaggttgttatctggttgctcgtgctgacattgctcatgacaatgctttgcatgccattgaatgaaaatagttcaatatttagcactaactataccttgtcattattattgccggtaatgctatggggagcgatgcgctacggttatcgatttatttcgctgatatggtcggctgttctcattaccgcaattcattattaccagagctacatgccttattattccgggtatgacacacaactcactattacgtcttcaagctacctggttttctcttttattgtgagctatatggcggtgctggcgacgcgccagagaatcgtcagcggtcgggcgcgtcggctcgcgtatcttgatcccgtcgtgcatctgcctaacctgcgggcgctaaatcgcgtgctgaaaaattcgccctggtcagcactctgttttttacgcgtgcccggcctggaattactggggaagaactatggcgttatgctgcggattcagtacaagcaaaagctctcccactggataaacaccttgctggcgcccggtgaatgcgtgtatcagctgtcggggcatgatttgattctgcgtctgaatatggagtcgcatcaacagcgcattgaagcgctggacaaccatatcaagcaattccgtttcatgtgggatgatatgccgctccagccgcaggttggggtcagctactgctatgtgcgctctccagtcagccatatctatctgttattaggcgaattaagtaccatcgccgatctttctctgatgaccaacaaaccggagaatatgcagcggcgtggcgcaatgcatttgcagcgggacctgaaagataaagtggcgatgatgaaccgcttgcagtatgcgctggagcacgatcatttttgcctgatggcgcagccgatttcaggcattcgcggcgatgtttaccatgaaatactgctgcgactgaaagacgataatggcggcatgatcaatcccgatggttttctgcccgttgctcacgaatttggcctgtcgtccagcatcgatctgtgggtgattgaaaataccctgcgctttatggcggaaaaccgggataagctgccagcccaccgttttgccatcaatctgtcaccaacgtcggtatgccgcgcccagtttccgattgatgtcagtaacctgctgagccagtacgaagttgaagcgtggcaactgatctttgaagtgaccgaaagcaatgcgttcaccaatgccgaacagggtcaggcaacgttgtcacagttgcaacagttaggttgccagatagcgattgatgattttggaaccggttatgccagttatgcgcggctgaaaaatgtgagcgcgaatattctcaagatcgatggcagctttattcgcaatatcgtctctaacagtctcgattaccagattgtggcgtccatttgccatctggcgcgaatgaagaatatgcaagtggtggcggaatatgtggaaagcgaagaaattcgtagcgcggtgagcgcgttggggatcgattaccttcagggctatttgcttggcgaacccaggccgctggcggcgactctggaagaggtacaggcaccattgtctggtgcctga

SEQ ID NO: 74650 - DNA, 333 bp, Citrobacter koseri
atggaacagcaggtgacctttgagtacacgcttactgtaaaacactgcattgacacaatagcgggtttcctccgacgcgttgatgtcgaaccgcgcccggttatcgcagatattcttacacagtttgaaagtatcgttgggcagttcccgctgggatgccagatttgccctgaactgctaaaaattggctgtgcaaagtaccgggagtttaaccacgctgaaggctatcgagttttgtattcagtagacggcgcattagtgacagcacatgcgattttgtcacatcggcaggatatacagcagttgttgttcaggcgtctgattgccgcctga

SEQ ID NO: 74651 - DNA, 234 bp, Citrobacter koseri
atgaaagtagagacaattagctacgttaaaaagaacgcagcaacgcttgatctgtcggaaccgatcctggtcacgcaaaatggtgtccctgcttatgttatagaatcctatgaccagcagcaggagcgggaaaacgctattgcgttgctgaagctgcttaccctttcagagaaagataaagctgaagggcgcgtgttctcaaaaggccaactgctggatggacttgcggattaa

SEQ ID NO: 74652 - DNA, 1578 bp, Citrobacter koseri
atgacggaaaatattcataaacatcgcattctcatcctggattttggttctcagtacactcagctggttgcgcgtcgcgtgcgtgaactcggcgtttactgcgaactgtgggcgtgggatgttacggaagcacaaattcgcgaattcaacccaagcggtattattctttccggcggcccggaaagcaccactgaagaaaacagcccacgcgcgccggagtatgtgtttgaagctggcgtgccggtattcggcgtgtgctacggcatgcagacgatggcgatgcaactgggcggccatgttgaagcatccaatgaacgtgaattcggttacgcgcaggtggaagtgagaaccgacagcgcgctgattcgcggcattgaagactccctgaccgcagacggcaagccgctgctggacgtgtggatgagccacggcgataaagttaccgctatcccgtctgactttgtcaccgttgccagcaccgaaacctgcccgttcgccattatggctaacgaggaaaaacgtttttacggcgtgcagttccacccggaagtcacgcatacccgtcagggtatgcgcatgctggaacgctttgtgcgtgatatctgccagtgtgaagcgctgtggactccggcgaagatcatcgacgatgcggtaaatcgcatccgtgaacaggttggcgacgacaaagtgatcctcggcctgtctggcggcgttgactcttccgttaccgcgatgctgctgcaccgtgccatcggtaaaaacctgacctgcgtatttgttgataacggcctgctgcgtctgaacgaagccgagcaggtaatggacatgttcggcgatcattttggcctcaacattgttcacgttccggcggaagaacgtttcctgaccgcgctgaaaggcgaaaacgatcctgaagcgaaacgtaagatcatcggtcgcgtattcgttgaagtcttcgacgaagaagcgttcagactggaagacgtgaaatggctggcgcagggcactatctatcctgacgttatcgagtccgccgcttccgccaccggtaaagcgcacgtcatcaaatctcaccacaatgtgggcggcctgccgaaagagatgaagatgggtctggttgagccgctgaaagagctgttcaaagacgaagtgcgcaagattggtctggaactgggcctgccgtacgacatgctgtaccgtcacccgttcccggggccgggtctgggcgtacgcgtgctgggtgaagtgaagaaagagtactgcgacctgctgcgtcgtgcggatgcaatcttcatcgaagagttgcacaaagcggatctgtacaacaaagtgagccaggcgttcaccgtgttcctgccggttcgttccgttggcgtaatgggcgatggccgtaaatacgactgggttgtctccctgcgtgcggtagaaaccatcgactttatgaccgcgcactgggcgcacctgccgtatgatttcctcggccgcgtctctaaccgcatcatcaacgaagtcaacggcatctcccgcgtggtgtatgacatcagcggtaagccgccagcaacgattgagtgggaatga

SEQ ID NO: 74653 - DNA, 1467 bp, Citrobacter koseri
atgctacgtattgctaaagaagctctgacgtttgacgacgtcctcctcgttcccgctcactccaccgttctgccgaatactgccgacctcagcacgcagttgacgaaaaccattcgtctgaacatccctatgctctccgcagcaatggataccgtgacggaagcgcgccttgcaatcgccctggcacaggaaggcggcattggttttatccacaaaaacatgtctatcgagcgtcaggcggaagaagttcgccgcgtgaagaaacatgaatccggcgtggtcaccgacccgcaaaccgttctgccaaccaccacgctgcgtgaagtgaaagaactgaccgaacgtaacggttttgctggctatccggttgtcaccgaagataacgagctggtcggtatcattaccggtcgtgacgtgcgttttgtcaccgacctgagccagcctgtcagcgtgtatatgacgccgaaagagcgcctggtcacggtgcgcgaaggtgaagcgcgtgaagtggtttttgccaaaatgcacgaaaaacgcgttgagaaagcgctggttgtggatgacagcttccatctgatcggcatgatcaccgtaaaagatttccagaaagcggaacgtaaaccgaacgcctgtaaagatgagcagggtcgtctgcgcgttggcgcggcagtcggcgcgggcgcgggcaacgaagagcgcgttgacgcgctggttgccgctggcgttgacgtactgctgatcgactcctctcacggccactccgaaggcgttctgcaacgcattcgtgaaacccgcgccaaatacccggatctgcaaatcatcggcggcaacgtagcaaccggcgcaggcgcgcgcgcgctggcagacgctggcgtcagcgcggtgaaagtgggtatcggtcctggctctatctgtacgacccgtatcgtcactggcgtaggcgttccgcagatcaccgcggtttctgacgcggttgaagcgctggaaggcctgggcattccggttatcgccgatggcggtattcgtttctccggcgatatcgccaaagcgatcgccgcaggcgcaagcgcggtaatggtcggttccatgctggcgggtactgaagaatccccgggcgaaatcgaactgtaccagggccgttcttacaaatcctaccgtggtatgggttctctgggcgcgatgtccaaaggctcctctgaccgttacttccagagcgataacgcggcagacaaactggtgccggaaggtatcgaaggccgcgtagcgtataaaggccgcctgaaagagatcattcaccagcagatgggcggcctgcgctcctgtatgggtctgaccggctgtggtactatcgacgcgctgcgtaccaaagcggagtttgtacgcatcagcggtgcgggtattcaggaaagccacgttcatgacgtgaccatcaccaaagagtccccgaactaccgtctgggctcctga

SEQ ID NO: 74654 - DNA, 1374 bp, Citrobacter koseri
atgttatcctctcagacctcctcaatctttaccgtaagccgccttaatcagacggttcgtctgctgcttgagcaggaaatggggcaagtatggatcagcggtgaaatctctaatttcacgcagcccgcctccggtcactggtactttacgctaaaggatgacaccgcccaggtacgctgcgcgatgttccgtaacagcaaccgccgcgtcacttttcgcccgcagcacgggcaacaggtgctggttcgcgccaatatcaccctgtatgagccgcgcggcgactatcagatcatcgttgaaagcatgcagcctgcgggtgagggcctgctccagcagaagtatgaattactgaaagcaaaattgcaggctgaagggctgttcgatcagcagtataaacaaccgctcccctcgcccgctcactgcgtcggggtgatcacctcaaaaaccggtgccgctttacatgacattcttcatgtcctgaagcgccgcgatccctccctgccggttatcatctacccgaccgctgttcagggtgatgacgcgccgggccagattgttcgcgccattgaacgggctaacgcccgaaatgaatgcgacgtgctgatcgtcgggcgcggcggcggttcactggaagatctgtggagctttaacgatgagcgcgtggcgcgggcgattttcgccagccgcattccggtcgttagcgccgtcggccatgaaaccgacgttaccatcgccgattttgttgccgacctgcgcgcgccgacgccttccgcagccgccgagatagtcagccgtaatcagcaggagttgctgcgccagattcagtccgcgcaacaacgcctcgggatggcgatggattactatctggcaaaccgcaaccgccgttttacgcagcttttccatcggttacagcagcaacacccgcaactgcgcctggcgcgccagcagacgatgctggaaagattgcgccagcggatgaacttcgcgctggataatcaactcaagcgcgcggcttcgcgccagcaacgtgtcctccagcgtttaaaccagcaaaacccgcagccgcgaatttatcgcgcgcaaacgcgtattcagcaattggagtatcgtctggccgagaacgtgcgcgcacgtctgagcgccacacgcgaacgctttggcaatgcggtaacgcatcttgaagccgtcagcccactctccacgctggcgcgcggttatagcgtaaccacagcgacggacggcaaggtgctgaagcaaaccagacaggtgaaagccggtgatgtgctcaccacccggctgtcagacggctgggtggaaagcgaagtgaaaggcgtgacgaccgcgaagaaaacgcgcaggaaaaagacagattaa

SEQ ID NO: 74655 - DNA, 249 bp, Citrobacter koseri
atgctcagctcgcaacatatcaaaggagttaccgtgtcgattacctgcccggattgccatacagagctggaaccgcaaaacggtgcggcgcactgcgacagctgcaataaagatattgaacttgaagcgcgctgcccggattgccataggccgctccaggtgttaaaagcctgcggcgcggtggattatttctgccagaatggtcatgggctgatctctaaaaagcgcgtggagtttgtgccgctttaa

SEQ ID NO: 74656 - DNA, 1554 bp, Citrobacter koseri
atgcaatcctctgttaatcaaaaagaaagccgaacgttcttcggccatccttatccgctcggttcgctgttcttcaccgatatgtgggaacgtttctcgttttacggcatccgtccgttactgatcctgtttatggctgcgaccgtctatgacgggggcatgggactggcgcgtgaaaacgcctccgcaattgtcggtatctttgccggtacgatgtatctcgcggcgttgccgggtggctggctggcggataactggctcggccagcagaaagcggtctggtacggctcgattctgattgcgctcggccacctgtcgattgcgctctctgccgtgatgggcgacaacctgttctttatcggcctgatgtttatcgtgctcggttctggcctgttcaagacctgtatctcggtcatggtagggacgctgtataaaaaaggcgatgcgcgtcgtgacggcggtttctcgctgttctatatgggcatcaatatggggtcgttcattgcgccgctgatctccggctggctgattaaaagccacggctggcactggggctttggtatcggcggcatcgggatgctggtggcgttgatcatcttccgcgtgtttgccgttccggcaatgaaacgctacgacagcgaagtggggctggactccacctggaacagcccggtagtgaagagaaacggcgtgggcgcatggctgctggcgctggcagtaggcgtggtggttatcgttgcgctgatcgctcagggcgtgattgtgattaacccggtcgcggtagccagcatgctggtgtacgtgattgcggcgtctgttgcgctctactttatctacctgtttgtttttgcgggcctgaaccgtaaagagcgcgcacgactgctggtatgctttatcctgctggtttcagccgcattcttctggtctgcgtttgagcaaaagccgacctcattcaacctgttcgccaacgactacactaaccgcatgatcggcgattttgagattccggccgtatggttccagtcgatcaacgctctgtttatcatcctgctggcgccggtgttcagctgggcatggccaaagctggcgagcatgaacattcgcccgagcagcatcaccaagtttgttatcggtattctgtgtgcggcggcgggctttggcctgatgatgctggcggcgcagaacgtgctgaataacggcggggcgggcgtatcgccgttctggctggtaggcagcattctgatgctgacgctgggcgagctgtgcctgagcccgattggtctggcgaccatgacgctgctggcaccggaaagaatgcgcggtcagatgatggggctgtggttctgtgcgagcgcgctgggtaacctggctgcgggcctgattggcggccatgtgaaggccgatcagctcgatatgctgccggacctcttcgcgcgttgctccgtcgccctgctgatttgcgctgcggtgctgatcgtgcttattgttccggttcgtcgtatgctggaaaatacacagactaaaaatgagcagaagccggtcactaacgcctga

SEQ ID NO: 74657 - DNA, 1473 bp, Citrobacter koseri
atggtacctgtggtcgcgcttgtcgggcgccctaacgtcggaaaatccacgttatttaaccgtctaactcgcacccgagatgcgctggttgcggatttcccgggtctgactcgtgaccgtaagtacggtcgtgcggagattgaaggccgtgagtttatctgtattgataccggcggtattgatggcaccgaagacggtgtggaaacccgcatggcggaacagtcgctgctggcgattgaagaggctgatgttgtgctgttcatggtggatgcgcgtgctggcctgatgccagcggatgaagcgatcgccaaacatctgcgctcccgcgaaaaacccacgttccttgtggcaaacaaaactgacgggctcgatcccgatcaggcggttgtcgacttctatgcgctgggtttaggtgaaattcacccgattgcagcttctcacggtcgtggcgtgctcagcctgctggagcatgttctgctgccgtggatggacgacgtcgccccgcaggaagaggtggatgaagacgctgaatactgggcgaaactggcagcggaagagaacggggaagaggagccggaagatgacttcaaccctcaggatctgccaatcaaactggcgattgtcggtcgtccgaacgtaggtaagtccacactgactaaccgtattctgggtgaagaccgcgtagtggtctatgacatgccgggaacgacgcgcgacagtatctatattccgatggaacgcgacgagcgtgaatacgtgctgattgataccgcaggcgtacgtaagcgtgggaaagtcaccgatgcggtagaaaaattctccgtcattaaaacgttgcaggcgattgaagatgccaacgtggtgatgctggttattgatgcgcgcgaagggatttccgatcaggatctgtcgctgctgggctttatccttaatagtgggcgctcacttgtcatcgtcgtgaacaaatgggacggcctgacccaggaagtgaaagagcaggtgaaagagacgctggacttccgtctgggctttatcgactttgcgcgcgtacactttatctctgcgctgcatggtagtggcgtgggcaacctgtttgagtccgtacgtgaagcgtatgacagttcaacccgtcgcgtcagcaccgccatgctgacccgcatcatgactatggcggttgaagatcaccagccgccgctggttcgcggtcgccgcgtgaagctgaaatatgcccacgccgggggatataacccgccaatcgtggtgattcacggcaaccaggtgaaagacctgccggactcttacaagcgctatctgatgaactacttccgcaaatcgctggacgtgatgggaacgcctatccgtattcagtttaaagaaggggaaaacccgtatgcgaataagcgcaatacgctgaccccgactcagatgcgtaagcgtaaacgtctgattaagcacattaagaaaagcaaataa

SEQ ID NO: 74658 - DNA, 1179 bp, Citrobacter koseri
atgcaattgcgtaaattacttctgccaggactgctttctgttacgttattgagcggttgttcactgtttagtggcgaagaagatgttgtcaaaatgtccccgttgccgacggtggaaaaccagtttacgccgtctaccgcatggagtacgtctgtaggtagcggtattggcgagttctattccaacctgcacccggcgtatgccgataacgtggtctacgcggctgaccgtaaaggcaccgtaaaagcggtaaacgcggatgacgggaaagaagtctggtccgtgaacctggcggagaaagacggctggttctccagagcgcctgcgttgctgtctggcggcgtaacggtctccggcggccatgtctatgttggcagcgaaaaagcgcaggtttatgcgttgaacgcggctgacggtacgacggcatggcagacgaaagtcgccggtgaagcgttgtctcgcccggttgtcagcgatggcctggtgcttattcataccagcaacggtcagttgcaggcgctgaatgaggcggacggcgcgatcaaatggaccgtgaacctcgacatgccgtcgctttcgctgcgcggtgagtccgctccggctaccgcgtatggcgccgccattgtgggtggtgataacggtcgcgtcagcgccgtgctgatgcagcagggccagatgatttggcaacagcgtatttcccaggcgaccggttcgactgaaatcgaccgtttgagcgatgtcgataccacgccggttatcgtcaatggcgtcgtttacgcgctggcttataatggtaacctgacggcgctggatctgcgcagtggtcagattatgtggaaacgtgagctgggctcggtgaatgatttcatcgttgacggcgatcgtatctacctggtggatcagaacgaccgtattctggcattgaccaccgacggcggcgtgacgctgtggacgcaaagcgatctgctgcaccgcctgctgacatcgcctgcgctgtataatggcaatctggtggtaggcgatagcgaaggctatatgcactggattaacgttgaggacggtcgttttgtggctcagcaaaaagtggatagctccggcttcctgaccgaaccggtctctgccgatggcaaactgctgatccaggcgaaagacggtacgctgtactctattacgcgttaa

SEQ ID NO: 74659 - DNA, 621 bp, Citrobacter koseri
gtggaaatttacgagaacgaaaacgaccaggttgatgcgatcaaacgcttctttgctgaaaatggcaaagcgctggctgttggggtgattttaggggttggcgcgctgctcggttggcgctactggaccagtcatcagacggagtccgcacgctctgcttctctggcatatcaaaatgcggtgaccgcggtgagcgcgggcaaaccggatagcatctccgctgcggagaaattcgccacggagaataaaaatacctacggcgcgttagcttctatggaactggcgcagcagtttgttgatcaaaatgaacttgagaaagccgcagcccagctacagcaaggactggcggccaccagcgatgagaacctcaaagcggtgattaatctgcgtcttgcccgcgttcaggtgcagctcaagcaggccgataccgcgctgaaaacgcttgataccgtaaaaggtgaaggatgggctgcgattgtcgccgatctgcgtggcgaagcgttgttgagcaaaggcgataaacaaggcgcgcgcagcgcatgggaagcaggcgtgaaaagcgatgccagcccggcgctgagtgaaatgatgcagatgaaaatcaataatttgtccatctga

SEQ ID NO: 74660 - DNA, 1275 bp, Citrobacter koseri
gtggcaaaaaacattcaagccattcgcggcatgaacgattatctgcctggcgaaaccgccatctggcagcgcattgaaggcacactcaaaaacgtgctcggcagctacggttacagtgaaatccgtttgccgattgtagagcagaccccgttattcaaacgcgctatcggtgaagtcactgacgtggttgaaaaagagatgtacacctttgaggatcgtaatggcgacagcctgacgttgcgtcctgaagggacggcgggttgcgtacgcgccggtatcgaacatggtctcctgtacaatcaggaacagcgcttgtggtatatcgggccgatgttccgccacgagcgtccgcagaaagggcgttatcgtcagttccatcagttgggtgtcgaagccttcggtctgcaagggccggatattgatgcggaactgattctgctgaccgcgcgctggtggcgtgcgttgggtattgctgaacatgtgaatctggagctgaactccatcggttcgcttgacgcgcgcgccaactatcgtgatgcgctggtggcataccttgaacagcataaagagaagctggacgaagactgcaaacgccgcatgtataccaacccgctgcgcgtgctggattccaagaacccggacgttcaggcgctgctcaacgatgcgcctgctctgggcgactatctggatgacgactcccgcgagcactttgccggtctgtgcaaactgctggaagcggcgggtatcgcttacaccgtcaaccagcgtctggttcgcggccttgattactacaaccgcaccgtatttgaatgggtaaccaacagtctgggttctcagggcacggtgtgcgccggcggtcgttatgacggtctggtggagcaacttggcggtcgcgcaaccccggcggtgggctttgcgatgggtctggaacgacttgttttgttagttcaggcagttaatctggaatttaatgccgatcctgttgtcgatatatacctggtagcctcaggcgcggatacgcagtctgcggcgatgacactggcggagcgcctgcgtgatgaaaatccgggcgtgaaactgatgactaaccacggcggtggcaactttaagaaacagtttgcccgtgccgataaatggggcgcccgcgttgcactggtgctgggtgagtccgaagtggctgacggcaccgttgtagtgaaggatttacgctctggtgagcaaacggcagtcgcacaggatagtgtgaccgcacatttgcgcacgttattgggttaa

SEQ ID NO: 74661 - DNA, 1119 bp, Citrobacter koseri
atgcataaccaggctccaattcaacgtagaaaatcgaaacgtatttacgttgggaatgtgccgattggcgatggcgcccccatcgccgtacagtcaatgaccaatacgcgcacgacggatgtggaagcgacggtcaatcaaattaaagcgctggaacgtgttggcgcggatatcgttcgcgtctccgtgccgacaatggatgccgcagaggcgtttaaacttatcaagcagcaggttaatgtcccgctggttgctgatatccacttcgactatcgcattgcgctgaaagtggcggaatatggcgtggattgcctgcgaatcaacccaggcaacatcggtaacgaagagcgtattcgtaccgttgttgattgcgcccgcgataaaaatatccctatccgtatcggcgtaaacgccggatcgctggaaaaagatctacaggaaaaatacggtgagccgacgccgcaggcgctgctggaatcggcgatgcgccatgtggatcatctcgatcgcctgaacttcgatcagtttaaagtcagcgtgaaagcctcggatgttttcctcgcggtagaatcctatcgtctgttggcgaaacagatcgaacaaccgttgcatcttgggatcaccgaagcaggcggcgcgcgcagcggcgcggtgaaatcggcgattggcctcggtttactgctgtcggaaggcattggcgatacgctgcgcgtctctctggcggccgatccggtagaagaaattaaagtgggcttcgatattctgaaatcgctgcgcattcgtgcgcgtgggatcaactttatcgcttgcccaacctgttcccgtcaggagttcgacgtcatcggcacggtcaacgcgctggaacaacgccttgaagacatcatcacgccaatggacgtttccatcatcggctgtgtggtgaacgggccgggcgaagcgctggtttcgacgctgggtgtaacgggcggcaacaagaaaagcggcctgtatgaagacggcgtgcgtaaagacagactcgacaacgatgatatgattacgcagcttgaagcccgtatccgcgcgaaggccagcattatggacgaagcgcgtcgaatcgacgtgcagcaggttgaaaaataa

SEQ ID NO: 74662 - DNA, 1014 bp, Citrobacter koseri
atgaatactgaagccacgcacgaccaaaatgaagcacaatccaccggcgttcgtctgcgcaatgcccgtgaacaactcggactcagccagcaggcggttgcagagcgactttgcctgaaggtttccacggtacgcgatattgaagaagataaggccccggccgatctcgcttcaacgtttctgcgcgggtatatccgctcttatgcgcgtctggtgcacatccctgaagaagaactgctgcccggtctggaaaaacaggcgccggttcgtccttccaaagtcgcgccaatgcagagcttctctttaggtaagcgtcgtaaaaagcgcgatggctggttgatgacgttcacctggctggtgctgtttgtggtggttggcctgacgggtgcctggtggtggcaaaaccataaggcgcagcaggaagaactcaccacgatggtcgatcaatcctctgctgaactgaatgccggcggcgatagcgcccagagcgtaccgctggacaccagcgaagccgcaagccaggattcgacgccagcgccaactgcgcctgttgactctacggtgacaaacaccgtgccgcagacgccggatgcgtccgcgacgaccacggcgccagccgcagacgctcagcagaatgcggtcgttgcgccttctcaggcgaatgtggataccgcaaccacggcgcctgccgcgacgggtgatgcggcgtcattgccgaccgatcaggcgggcgtggctgcgtcagcggtcgatcagaacgcgctggtgatgaactttaccgccgattgctggctggaagtcaccgatgcgacagggaaaaaactgtttagcggaatgcagcgtaaagatggcaatttaaacctaaccggtcaggcgccttataagcttaaaattggcgccccggctgcggtacagatccagtatcaaggaaaacctgtcgatctgagccgttttatcagaactaaccaggttgcgcgtctgacccttaatgccgaacaatcaccggcgcagtaa

SEQ ID NO: 74663 - DNA, 1167 bp, Citrobacter koseri
atgtctgaacaaattgtcacgtctgaaatcatcaccccggttgttcctgataaaaatggaaaaattaacctgctggatctgaaccgtcagcagatgcgggagttttttaaagaattaggtgaaaaacccttccgcgccgatcaggtgatgaagtggatgtaccactattgcagcgataactttgatgagatgaccgacatcaacaaagtgttacgtggcaaactgaaagaggtggcggaaatccgcgcgccagaggtggtggaagaacagcgttcttcagatggcaccatcaaatgggcgattgccgttggcgatcagcgcgtggaaacggtctacatcccggaagacgatcgcgccacgctgtgcgtctcttcacaggttggttgcgcgctggagtgtaaattctgctcaactgcgcagcagggctttaaccgtaacctgcgcgtctctgaaattatcggccaggtgtggcgtgcggcgaaaatcgtcggcgcggcgaaagtcaccgggcaacgtccgatcaccaacgtggtgatgatgggcatgggtgaaccgctgctgaacctgaccaacgttgtaccggcgatggaaatcatgctggatgatttcggtttcggtctgtctaaacgccgcgtcacgctgtcgacgtcaggcgttgttccggctctggataaactgggcgacatgattgacgttgcgctggcgatctctttgcatgcgccgaacgatgaaattcgcgatgaaattgtaccgatcaacagaaagtacaacatcgaaacgttcctcgacgcggttcgccgttatttgcagaaatccaatgcgaatcagggacgcgtcacaattgaatacgtcatgctggaccacatcaacgatggaacggaacatgcgcatcaactggcggaactgctgaaagatacgccgtgtaagattaacctgattccgtggaacccgttcccgggcgcgccgtatggccggagttccaacagccgcatcgatcgtttttctaaggtgttgatgagctatggtttcacgaccattgtgcgtaaaacacgcggcgacgatattgatgccgcttgtggtcagcttgccggggatgtgattgaccgtaccaaacgtactctgcgtaagcgtatgcaaggtgaggctatcgacattaaggcggtctga

SEQ ID NO: 74664 - DNA, 432 bp, Citrobacter koseri
atggcgattgaacgtactttttccatcatcaaaccaaatgcggtggcaaaaaacgttattggcaacatctttgcgcgctttgaagcagcagggttcaaaattgtcggtacgaaaatgctgcacctgaccgttgagcaggcgcgcggtttctatgccgagcacgatggtaaaccgttcttcgacggtctggtcgagttcatgacctctggcccgatcgtggtttccgtactggaaagcgaaaatgctgtgcagcgtcaccgcgacctgctgggcgcaaccaacccggctaacgcgctggcgggcaccctacgtgccgactacgcggacagcttcaccgaaaacggcacccacggttcagattctctggaatccgctcagcgtgaaatcgcctatttctttggtgaaggcgaagtgtgcccgcgcactcgttaa

SEQ ID NO: 74665 - DNA, 2313 bp, Citrobacter koseri
atgatcgtcctgcgcagtctacgcggtggctggcgctggctggccatcgctccatttctgatgattctggcagtctgggcggcggacaaaatctggccgctgccgctgcatgaggtcaatccggcacgggtggtggtggcgcatgacggcacaccgctgtggcgctttgccgatgcggaggggatctggcgctatcccgtgacgattgaagacgtttctccccgctatcttgacgcgttaatcaattacgaggaccgctggttctggcagcatccgggcgtgaatccgttttcggtactacgtgccgcctggcaggatctgtcgtcaggacgcgtgatttccggcggcagtacgttgaccatgcaggtggcgcgactgctggatccgcatccgcgaacctttggcggtaaatttcgccagctctggcgcgcgctccagctggagtggcacctgtccaagcgcgatattctgacgctgtatctgaaccgtgcgccgtttggcggaacgttgcagggcatcggcgccgccagttgggcttatctgggtaaaccaccggtgcaactgagctattcggaagcggcgttgctggcggttttaccgcaggcgccgagccgcttgcgtcccgatcgctggccggaacgcgcgcaagcggcgcgcaataaagtgctggagcggatggcggcgcagggcgtatggtcggcccggcatgttcaggaggcccgcgaagaacccgtctggctggcgccccgacaaatgccgcaactggcgccgctgttctcacgcatgatgctgggtaaaagcaacagtgacaaaatcgtcaccacgctggatgccgggttgcagcgtcagcttgaagagctggcgcaaaactggaagggacggcttccggcgcgcagttcgctggcgatgatcgttgtcgatcataccgatatgagcgtgcgtggttgggttggatcggtggatatgaatgatgacagtcgttttggtcatgtggatatggtcactgcgatccgatcgccgggatcggtgcttaaaccctttgtttatgggctggcgctggatgacgggttgatccatcccgcctcgctgttacaggatgtgccgcgccgtaccggcgattatcgtccgggaaactttgacagcgggtttcatggccccgtcagcatgagcgaagcgctggtgcgttcgttaaatttgcctgcggtacaggtgctggaagcatatggcccaaaacgttttgcggcaaaactgcgtaacgttggcctgccgctgtatctgcctgcgggcgcggcccctaatctttccctgattctgggcggcgcgggcgcaaggctggacgagatggtggcggcatacagtgcgttcgcccgtcatggcaaggcggcaacattgcgcttgcagccaggggattcgttgcaggagcgtccgctgatgtcgccgggtgcggcgtggatcatccggcgggtgatggccgatgaagcgcagccgttgccggatagcgccctgccgcgcgtagtgccgctcgcctggaaaactggcaccagctatggctatcgcgacgcgtgggcgataggtgttagctcccgctacgtgactggcatctggacgggcaggcccgacggcacacccgttgccggacagtttggttttgccagcgcggtgccgctgcttaatcaggtgaataatatgctgatggcgcgcgccgcgacgcagcctgaagatccgcgtccggcgtcggtgagccggggcgttatctgctggccgggcggacaggcgctttcggcgggagacaataactgccgccgtcgactggcgacctggctgctggagaacagccaaccgccgacgctgctgttacctgaacaggaagggattagcggcattcgttttcctgtctggctggataatgacggaaaacgcgtcgccgccgattgtgctcaggcgcgggagcagacgttgattgtctggccgttgccgctggagccctggttgcccgctgctgaacgccgcgctgcgcgactgccgacggcttcgacgacctgcccgccgctggggcaggatgcgcctttacctctacagttaacgggcgtgcgtgatggcgcgatagtgaaacggttacccggcgcttccggggtggatttatcgattcagagcagtggtggcgcgggggcgcgctggtggttcctcaatggtgagccgttgggagaacgcgagcggaatattacgttacatcttgccgaaaaaggcgagtatcaattactggttatggatgctgctggacagatttctgcgctgcgatttactctgcaatag

SEQ ID NO: 74666 - DNA, 4935 bp, Citrobacter koseri
atgaaacacatacgcgtagccgcttgcatgcttatgctggcgttggcggggtgcgataacaacgataacgcgccaacggcggtgaaaaatgatgagacgcccgccgcgcaatccgctccgacgaaagatccggcacaactgcaaaagctggcgcaacagagcgaaggtaaagaactgacgctgctggacgcctccgaagtccagttggacggcgcggcgacgctggtgctgacgttctccattccgttagatcctgaacaagattttgcccgcaccgtacatgtggtcgataaaaaaagcggcaaggttgatggcgcctgggagctgtcgccgaatctgaaagagctgcgcttgcgccacctggaacccaaccgcgatctggtggtgtccgttgaacgtgatttaacggcgctgaataaaaccgcctttggccgcgcgtatgaaaaaaccattaccacgcgggacgttcagccgagcgtcggctttgccagccgtggctcgctgctgccgggaaaagtggtggaaggcttgccggtcatggcgctgaacgtgaacgaggtggatgtaaacttctttcgcgtgaagcctgagtcgctggcggcattcgtcagtcagtgggaataccgtaatgctctttcgaactgggaatctgacaacctgctcaaaatggcggatctggtctataccgggcgttttgatctcaatcctgcgcgtaatacgcgtgaaaaacgcctgctgccgctgagtgacattaagcccctgcaacaggcgggcgtgtacattgcggtaatgaatcaggccggacattacaactacagtaatcctgccacgctctttaccctcagcgacattggcgtttccgcccaccgttatcacaatcgtcttgatatctttacgcagagtctggaaaacggcgcggcgcagcagggggttgaggttgctctgcttgatgagaaaggtcagacgctggcgcaagccgccagcgatgcgcaggggcatgtacagctggaaaatagtcagcaggctgcgctgttgctggcgcgaaaagacgggcaaaccacgctgttggatctgaaactgcccgcgctggatctggcggagttcgcgattgcgggcgcgccgggctacagcaagcagttctttatgttcggcccgcgcgatctgtatcgtccaggggaaacggtgatcctcaacggactgctgcgcgacagcgacggtaaaaccttgcccgatcagcccgtcaaactggaagtggtaaagccggacggccaggtgctgcgcaccgttgtcagccagcctgaaaacgggttataccgctttacgtatccgctggatagcggtgcgccaaccggcatgtggcacatccgcgcgaacacgggcgataaccagccccggatgtgggatttccatgtcgaagattttatgccggagcgaatggcgcttaatctcagcgcgcagaaaacgccgttagccccgtcggaagaggtgacgttctccgttgttggttactacctgtacggagcgcctgccaatggcaacacgttacaggggcaactcttcctgcgcccgcagcgtgaagcggtacaggcgctgccgggcttccagtttggcgatattgcggaagaaaacctttcccgcagtctggacgaagtccagcttacgctggatgaaaatggccgtggcgacgtctccgccaacagccagtggcaggaagcgcattcgccgttacaggtgatcctacaggcaagcctgctggaatcaggcggtcgcccggtcactcgccgtgcggaacaggctatctggcctgccgataccttgccgggtattcgtccgcaattcgcctctaaagcggtgtatgactatcgtactgacgccacggttaaccaacccatcgtggatgagggcggtaacgccgcctttgatattgtctacgccgatgcgcaaggcaataaaaaagccgcttcgggtttgcaggttcgtttgatccgtgaacggcgcgattactactggaactggtcggaaagcgaaggctggcagtcgcagtttgatcaaaaagatctggttgaaggggagcagacgctggatctcagcgccgatgaaacgggcaaggtgagcttcccggttgactggggatcgtatcgtctcgaagtgaaagccccgaatgatgcgatcagcagcgtgcgcttctgggcaggttacagctggcaggataacagcgacggcagcggcgcggcgcgcccggatcgcgtcaccctgaagctggataaacccacctatcgtcctggggacaccatcaaactgcatgtcgccgcgccggtggcgggtaaaggctacgcgatggtggaatcaagcgacggcccgctctggtggcaggaaatagatgtacctgccgagggcctcgacctgtcgattcccgtcgataaatcctggagtcgacacgatctctacctgagcgcgctggtcgtgcgtccgggcgataagtcgcgttcagcgacgccgaaacgcgcggttgggctgctgcacctgccgttgggggatgaaaatcgtcgtctggatctgacgctggaaagcccggctaaaatgcgtccaaaccagccgctgacggtgaacgtcaaagccagcgctaaacatggcgaaacgccaaaacagatcaacgtactgctctctgcggtggacagcggagtgttgaatatcaccgattacgttacgccagatccgtggcaggcattcttcgggcaaaaacgctatggcgcggatatttatgatatctacggtcaggtgattgaagggcagggacgtctggcgacgctgcgttttggcggcgacggcgatgaactcaaacgcggcggcaaaccgccggtcaaccatgtcaacatcgtggcgcagcaggcgttgccggtcacgcttaatgagcagggcgaaggttccgttacgttgccgattggtgattttaacggcgagttacgcgttatggcccaggcatggacggcagaggacttcggcagcagtgaaagcaaggtgattgttgccgctccggttattgcggagctgaatcagccacgctttatggcgggcggcgatacttcgcgcctgacgctggatgtcactaacctgacagacaaaccgcagacgttgacgattgaactcgccgccagtgggttactggaactggtgagtcagcaacctgctccggtaaacctggcgccgggcgtgcgtacgaccttgtttatcccggtacgcgcaaaagaagggtttggcgagggagaattgcaggccacgctgaccggcctgaacctgcctggcgagacgcttcccgctcagcataagcagtggaaaattggcgtgcgtccggcctggcctgcgcagacggtaaatagcggaacggtgcttcaggcgggggaaacctggcatgcgcccgcccaaaatctggagaacttctcgccggtaacgttgcaggggcagttgttgcttagcggcaaaccgccgctgaacctggcgcgctatattcgggagctgaaggcttatccgtatggttgtctggaacaaaccgccagcggcctgttcccgtcgctctataccaacgcggcgcaactgaaggcgttggggatcgcgggtgataccgatgaaaaacgccgtgcggcagtcgacacggggatctcccggatgctgcaaatgcagcgtgataacggcggttttgccctgtgggataacaacgggccggaagaatactggcttaccgcatacgcgatggatttcctcgtgcgcgctggcgagcaagggtacagcgttccggccgatgcgattaaccggggaaatgaacgcctgctgcgctatttgcaggacccgggcatgatgtcggtgcgctatagcgacgatacccaggccagcaaatttgctgttcaggcgtatgcgggactggtgctggcgcgtcagcaaaaagcgccgcttggcgcgctgcgtgaaatctgggaacgccggagccaggccgcgtcgggcttgccgcttctgcaactgggcattgcgctgaaaaatatgggcgatgccagccgcagtgaacaggcgctgacgctggcgctgaacacgccgcgccgtgacgcgcagcaatggatggcggattacggtagcccgttgcgtgataacgcgctcatgctgtcgctgctggaggaaaataaactgcaacccgaggcgcaaaatacgctgctgacgacgctttctgaacaggcatttggtcagcgctggctttcgacgcaggagagtaatgcgctgttccttgctgcgcgcacgttacaggatctgccggggacatggcaggcgcagacctcgctcgctgaccagccgttgacgggcgataaagcgcaaacgcgtaatctggatgccgatcggctttccgcgttgcaggtgaccaacagcggcgaccaaccgctgtggctgcgtctggacagcagcggatacccgcaaacggcgcccgtacctgccagcaatgtgttgcacatcgagcgccagattctgggaaccgatggtcagagtaaatcgctcagttccctgcgcagcggtgaactggtgctggtctggctcgaagtgaaagcgagtcaaaacgtgccagacgcgctggtggtcgacctgctgcctgccggtctggagctggaaaaccagaacctggcaaacagcagcgccagcctgcaagacagcggcagtgaagtgcaaaacctgttaaatcagatgcagcaggcggatattcagcatatggaattccgtgacgatcgctttgtcgcggcggtggcggttaaccaggggcagccggtgacgctggtgtatctggcgcgcgcggtgacgccgggaacctatcaggttcctgtcccgcaggtggagtcaatgtatgttccacagtggcgggcgacgggatcaaccgaggggcttttgattgtcacgccataa

SEQ ID NO: 74667 - DNA, 843 bp, Citrobacter koseri
atgtccacctcctggtttgtcgccgccgactggctggcagagcatatcgacgatccgcaaattcaaattatcgacgcccgcatggcgcctcccggacaggaagacagggatgttgcgggtgaatatcgttcaggccacatccccggagcactctttttcgatattgaagcgctctccgatcacacctcgccgctgccgcacatgatgccgcgcccggaagccttcgccgtggcgatgcgtgaactgggcgtacaccaggacagacatctggtggtctacgatgaaggcaacctgttttccgccccgcgcgcgtggtggatgctgcgaacgtttggcgtagaaaacgtctcaattcttgccggtggtctggcgggctggcagcgcgatgagctgccgcttcaggaaggcgaagtggaactcccggaaggggaatttgacgttaaattcacggcggagaaggttgtgcgtctgaccgatgtacttctggcgagccatgaaagaaccgcgcaaatcgttgatgcccgcccggcgccacggtttaatgccgaagccgatgaaccgcgtccgggtctgaagcgtggccatattcccggcgcgttgaacgtgccctggacagagctggtgcgtgaaggggaattaaaaacgaccgatgaactggacgtcattttcttcagtcacggcgtcagttttgacagaccgattatcgccagctgcggttcaggtgtcactgcggcggtcgtggtgctggcgctcgccacgctggatgtgcccaatgtcgcgctgtatgacggcgcatggagcgaatggggcgcgcgtaatgatttaccggtagaaccggcctaa

SEQ ID NO: 74668 - DNA, 777 bp, Citrobacter koseri
atgtccgaaacaaaaaacgaattagaaaccctgctggagaaggcggcgactgaacccgcgcatcgtccggcatttttccgtaccttactggagtccaccgtctgggtgccaggcacagcggctgaaggcgaagcgattgttgacgatagcgcgctggatttgcagcactgggaaaaagaagacggcacgacggtcatcccgttttttacctctctggaagccttgcagcaggcggtagaagacgagcaggcattcgtggtgatgccggtgcgcacgttatttgaaatgacgctcggcgaaacgctcttcctgaacgcaaaactgcctaccggtaaagagtttatgccgcgtgagatcagccatctgatcggcgaagagggcaatccgctgagtacacaggaagtgctggaaggcggtgaatcgctgattctgtctgaggtggcggaaccacctgcgcagatgatcgactccctgaccacgctgtttaaaaccatcaaactggttaagcgcgcctttctttgcactattaaagagagcaatgacgctcagccgaatctgttgattggcatcgaagcggatggcgacatcgaagagatcattcatgcggcgggcagcgtggcgactgataccttgcccggcgatgaaccgattgatatctgtcaggtgaaaaaaggtgagcagggcatcagccactttattaccgagcacatcgcgccgttctacgagcgccgctggggcgggttcctgcgcgattttaaacagaatcggattatctga

SEQ ID NO: 74669 - DNA, 1284 bp, Citrobacter koseri
atgactgaagcgatgaaaattacgctctccacccaaccggctgacgctcgctggggagacaaagccacatacagcatcaataatgacggcattaccctgcacctgaacggtaaagatgattccggtttaatccagcgcgcggcgcgtaaaatcgacggcctgggcattaaacacgtacaactgaccggcgctggctgggatgtggagcgtagctgggcattctggcagggttacaaagggccgaaaggcagccgcaaggtcgagtggccagatcttgacgatgagaagcagaaggaactggacaaccgtctggcgatcattgactgggtgcgcgacaccattaacgcgccggcggaagagctggggccggaacagctggcgcagcgtgccgttgatctgctgtgcagcgtcgcgtgcgatcacgtctcttaccgcattaccaaaggcgaagatctgcgcgagcaaaactacatggggctgcataccgttggccggggttccgatcgcgcgccggtgctgctggcgctggattacaacccaaccggcgataaagacgcgccggtttacgcctgtctggtgggcaaaggcattacctttgactccggcggttacagcatcaagcaaagcgcatttatggactcgatgaagtccgatatgggcggtgcggcaacggtaacgggcgcgctggcatttgcgattacccgtggtctgaacaaacgcgtgaagctgtacctgtgctgcgcggataacctgatcagcggcaacgcgtttaaactgggcgatattattcattatcgcaacggtaagaacgtggaagtgatgaacactgacgcggaagggcgcctggtgctggcggatggcctgatcgacgccagcgcgcaaaaaccagagctgatcatcgatgcggcgacgctgaccggcgccgcgaaaaccgcgctgggtaacgactaccacgcgttgttcagttttgatgacgcgctggcggggcgtctgttggcgagtgcggcagaagaaaacgaaccgttctggcgtctgccgctggcggagttccaccgcaatcagttgccttctaactttgcggaactgaacaataccggtagcgcggcgtatcctgccggggcgagcaccgcagcgggcttcctgtcgcactttgtcgaaaactaccagcagggctggctgcacattgactgctctgcaacctaccgtaaagcgccggttgagcagtggtcggcaggggcgaccggtttgggtgtgcgcaccatcgctaacctgttaacagcataa

SEQ ID NO: 74670 - DNA, 201 bp, Citrobacter koseri
atgggactgaagtggactgatagccgcgaaatcggcgaggcgctgtacgacgcgttccccgatctcgatcctaagaccgttcgtttcaccgacctgcatcaatggatttgcgatcttgaggattttgatgatgacccgcaggcatcaaatgaaaagatccttgaggctatcctgctggtctggctggacgaagctgaataa

SEQ ID NO: 74671 - DNA, 336 bp, Citrobacter koseri
atgccaaagattgttattctgcctcatcaggatctctgtcccgatggcgcagttctggaagctgagaccggcgaaaccattcttgacgttgccctgcgtaacggtatcgagattgaacacgcctgtgaaaaatcctgtgcctgcacgacctgccactgcatcgtgcgtgaaggtttcgattccctgccggaaagcacggaagacgaagacgatatgctggataaagcctggggtctggagccggagagccgtttaggctgtcaggcgcgcgtcaccgatgaagatttggtggtcgaaatcccacgttacacaatcaaccatgcacgcgagcattaa

SEQ ID NO: 74672 - DNA, 1851 bp, Citrobacter koseri
atggccttattacaaattagtgagcctggtctgagcgctgcgccgcaccagcgtcgtctggcggcaggcatcgatttaggtactaccaactcattggttgcgaccgttcgcagcggccaggcagaaacgctggccgatcacgacggtcgccatctgttgccgtcagtcgttcactatcagcagcagggccacacggtcggttacgcggcgcgcgcgaacgcggcgcaggacacggctaacaccatcagctcggtaaaacgcatgatgggtcgctcgctggcggatattcagacgcgctatccccatctgccgtatcagttccaggccagtgaaaatggtctgccgatgattgaaacggcggcaggtctgctcaacccggtacgtatttctgccgatatcctgaaagcgctggcggcgcgggcgacggaagcgttgtcgggtgagctggatggcgtggtcattaccgtgcccgcttactttgacgatgcacagcgccagggaacgaaagacgcggcgcgtctggcggggctgcacgtcttgcgtctgctcaatgaacctacggcggcggcgatcgcctacggtctggactccggcaaagaaggcgttatcgcggtttacgacctcggcggcggcaccttcgatatctctattttgcgcctgagtcgcggcgtgtttgaagtgctggcgaccggcggtgattccgcactcggcggcgacgacttcgaccatctgctggccgattacatccgcgagcaggcgggcattgccgatcgcagcgataaccgcgtccagcgtgaactgctggatgccgccatcgcggcaaaaatcgcgctgagcgatgccgattccgttagcgtcaatgtggcgggctggcagggcgacatcacccgtgaacagtttaatgaccttatcgccgctttagttaaacgtactctgatggcctgtcgccgtgcattgaaagatgcgggcgttgaggcgcaggaggtgctggaagtggtgatggtcggcggctccacccgtgtgccgctggtgcgcgaacgcgtgggcgaattttttggtcgtccgccgctgacggcaatcgacccggataaggtcgtcgccattggcgcggcgattcaggcggatatcctcgtcggcaacaagccggacagcgaaatgctgctgctggacgtgattccgctgtcgctggggctggaaaccatgggtggcctggtggagaaagtgatcccgcgtaacaccaccattccggtggcgcgcgcgcaggacttcaccacctttaaagatggtcagaccgcgatgtcgatccatgtcatgcagggcgagcgcgagctggtgcaggattgccgttcgctggcgcgcttcgcgctgcgcgggctcccggcgatgccagcgggcggggcgcatatccgcgttaccttccaggtggatgccgatggcctgttgagcgtcaccgcgatggaaaaatccaccggcgttgaggcgtctatccaggtcaaaccgtcttacggtctgacggacagcgaaatcgccaccatgattcaggattcaatgagctttgccgaacaggatgtaaaagcccgtatgctggcagagcaaaaagtggaagcggcgcgcgtgctggaaagcctgaccggcgcgctcgctgctgatgccgcgctgctaagcgccgcagaacgtcaggtcattgatgatgccgccgcgcacttgagcgaggttgcgcagagcgatgatgttgacgcgatagaacaagccattaaaaacgtagacaaacaaacccaggaattcgccgctcgtcgcatggacaaatctgttcgtcgcgcgctgcaaggccattccgtggacgaggtttaa

SEQ ID NO: 74673 - DNA, 516 bp, Citrobacter koseri
atggactacttcaccctctttggcttgccagcccactatcaactcgatacccaggcgctgagcctccgttttcaggatcttcaacgtcagtatcatcctgataaattcgccagcggtacgcaggctgagcaactcgccgccgtacaacactccgcgaccattaatcaggcctggcaaacgctgcgtcaccctttgatgcgcgccgaatatttactgtcactacacggctttgatctggccagcgagcagcatacggtgcgcgataccgcgtttttgatggaacagctggaactgcgtgaagagcttgatgaaatagaacaggcaaaggacgaagcgcgactggaaagtttcatcaagcgcgtgaaaacaatgtttgatgcccgccatcagctgatggtggaacagttggacaacgagacgtgggacgtggcggcggacaccgtgcgtaaactgcgttttctcgataaactgcgaagcagcgccgaacaactcgaagaaaagctgctcgatttttaa

SEQ ID NO: 74674 - DNA, 324 bp, Citrobacter koseri
atgtcgattacacttagcgacagtgctgcagcgcgagtaaatacctttctggcaaaccgtggtaaagggtttggcctgcgcctgggggtgagaacctccggctgttcaggtatggcttatgtactggaatttgttgatgaaccggcggcagaagacaccgtgtttgaagacaaaggcgtaaaagtcgtgatcgacggtaagagcctgcaatttctggacggtacgcagttagacttcgtaaaagaaggtctgaacgaagggtttaaattcaccaacccgaacgtaaaagacgagtgtggttgcggcgaaagcttcaacgtgtaa

SEQ ID NO: 74675 - DNA, 387 bp, Citrobacter koseri
atggcttacagcgaaaaagtaatcgatcattacgagaatccacgcaacgtgggttcctttgacaacagcgacgaaaacgtaggcagcggcatggtgggtgcaccggcttgcggcgacgtgatgaagttgcagattaaagtcaacaatgaaggtatcattgaagacgcgcgtttcaagacttacggctgcggttccgctatcgcgtccagctccctggtcaccgaatgggtgaaagggaagtctctggacgaagcgcaggcgattaaaaataccgatatcgcagacgagcttgaactgcctccggtgaaaattcactgctccattctggcagaagacgcaattaaagccgctattgcggattacaaaagcaaacgtgaagcaaaataa

SEQ ID NO: 74676 - DNA, 1215 bp, Citrobacter koseri
atgaaattaccgatctatctcgattactccgcaaccacgccggtggacccgcgtgttgccgagaaaatgatgcagtttttgaccctggacggaacctttggtaacccggcctctcgttcacaccgtttcggctggcaagctgaagaagcggtagatatcgcccgcaaccagatcgcagaactggttggcgccgatccgcgtgaaatcgtctttacctccggtgcgactgaatccgacaacctggcgattaaaggtgcggccaacttttatcagaaaaaaggcaagcacatcatcaccagcaaaaccgagcataaagccgtgctggatacctgccgtcagcttgagcgcgaagggtttgaggttacttacctggcgccgcagagcaatggcattatcgatctgaaagaacttgaagcggcgatgcgcgatgacaccattcttgtgtccatcatgcacgttaacaacgaaatcggcgtggtgcaggatatcgcgaccatcggcgaaatgtgccgtgcgcgtggcattatctaccacgttgacgccacccagagcgtgggcaaactgcctatcgacctgagccagctgaaagtggacctgatgtccttctccggccacaaaatctatggcccgaaagggattggcgcgctgtatgtgcgtcgtaaaccgcgtattcgtatcgaagcgcagatgcacggcggcggtcacgagcgcggtatgcgttccggtacgctgcctgtacaccagatcgtcggtatgggcgaagcttaccgtatcgcgaaagaagagatggaaaccgagatggcgcgtctgcgcacgctgcgtaaccgtctgtggaacggcatcaacgatatcgaagaagtttacctgaacggtgacctggaacagggcgcgccgaacattctcaacgtcagctttaactacgttgaaggcgaatccctgattatggcgctgaaagatctggcggtgtcttcaggttccgcctgtacgtctgcaagtctggaaccgtcctatgtgctgcgcgcactgggcatgaatgacgagctggcgcatagctctatccgtttctctttaggtcgtttcactactgaagaagagatcgactacaccattgagctggtgcgcaaatccatcggtcgtctgcgtgacctttccccgctgtgggaaatgttcaaacagggcgtggatttgaacagcatcgaatgggctcatcattaa

SEQ ID NO: 74677 - DNA, 492 bp, Citrobacter koseri
atgagactgacatctaaagggcgttatgccgtgaccgcaatgttggacgttgcgctcaactccgaagcgggcccggtaccgttggctgatatttctgaacgtcagggaatttccctttcttatctggaacagctgttttcacgtttgcgtaaaaatggtctggtttccagcgtacgtggcccaggcggtggttatctgttgggtaaagacgcaggtagcatcgcggttggcgaagtgattagcgctgttgacgagtcggtagatgcgacccgttgtcagggcaaaggcggctgtcagggcggcgataaatgcctgacgcatgcgctgtggcgtgatttgagtgaccgtctgaccggtttcctcaacaacattaccttaggcgaactggtgaataaccaggaagttctggatgtgtctgatcgtcagcacacccatgacgcgccacgtagcacccgtacgcaagacgcaatcgacgtcaaattgcgcgcgtaa

SEQ ID NO: 74678 - DNA, 732 bp, Citrobacter koseri
atgctgcaaaatattcgaattgtgctggtggaaacctctcacaccggcaatatgggttctgttgcccgcgccatgaaaacaatgggtttaacaaacctgtggctggtaaatccgttggtcaagccggattcccaggctatcgcgctggcggctggcgccagcgatgtgatcggcaatgcgcagatcgtcgatacgctcgatgacgcgctggcagggtgtagcctggtggtcggcaccagtgcgcgttcccgcacgctgccgtggccgatgctggacccgcgcgaatgcggtctgaaaagcgtggcggaagccgcgaatacgccggttgcgctggtctttggccgcgagcgcgttggtctgaccaacgacgaactgcaaaaatgccattaccatgtggcgattgccgcaaacccggaatacagctcgctcaacctggcgatggcggtacaggtgatcgcctacgaagtgcgtatggcctggctggcaacgcaggaaaacgacgaggcggcggaacatgaagagacgccatatccgctggtggacgacctggaacgtttttacggccatctggagcagacgctgctttcaaccggcttcatccgtgaaggccatccggggcaggtcatgaacaaactgcgtcgtctgtttacgcgtgcgcgcccggaaagccaggaactgaacatcctgcgcggtattcttgcttctattgagcagcagaataaaggcaagtaa

SEQ ID NO: 74679 - DNA, 804 bp, Citrobacter koseri
atgcatccgatgctgaccatcgccgtgcgcgcagcgcgcaaggcgggtaatgtaattgccaaacactacgaaacgcctgactcagtagaaaccagccagaaaggcagcaatgattttgtgaccaacgtcgataaagccgccgaagcgattattatcgaaacgatccgcaaatcttacccacagcacaccatcattaccgaagaaagcggtgaacatgaaggtaccgatcaggatgttcaatgggttatcgatccactggatggcaccaccaactttatcaaacgtctgccgcacttcgcggtatctatcgccgtacgcatcaaaggccgtactgaagtcgcggtagtttacgatcctatgcgtaacgaactgttcaccgccactcgcggtcagggcgcacagctgaacggttaccgtctgcgcggcagcaccgcgcgcgacctggatggcaccatcctggcgaccggtttcccgttcaaagccaaacagtatgcgaccacctacatcaatatcgttagcaaactgttcaccgaatgcgctgacttccgtcgcaccggttctgctgcgctggatctggcgtatgtggctgcgggtcgcgttgacggtttctttgagatcggtctgcgtccgtgggatttcgccggcggcgaactgctggtacgtgaagcgggcggtatcgtcagcgactttaccggcggccataactacatgacgaccggtaacatcgtggccggtaacccgcgcgtggttaaagcgatgctggcaagcatgcgcgacgaattgagcgatgcgctgaagcgctaa

SEQ ID NO: 74680 - DNA, 981 bp, Citrobacter koseri
atgtcagtaatctcccaacaacgcccgcgctcccgacgttggctgccgctgtggccgctggcggtatttctgttgctggccatcgcgggcgggctgtggttatggcagacctggccgcaggtgatggtgaaaagcattgtctggcagcgggaagtgaatcagcagatgagcgccttattaaaagcggtggcggcgaatccggcgcaggcgggcggttcgctgctgttgtttagctttctgtatggcgtactccatgcgctggggccgggtcatggaaaagtggtgattaccacatggctggcgacgcatccatcaaagctgaaatcaagcatcggcctgacgctggcctcatcgttgttgcaggggctggtggccattgcgctggtggttgtggtgctgacggtattgcagcttccggcgaggcagttacatctgagcagcttctggctggagaagggcagttatgcgttagtcggcgtgctgggaatattgctttgctggcgggcgctaaagacgcttcgcgcgctgctgcgcaagccgaaatttatctcatttacgccgcatcatgttcaccacgaacattgcggctgtgggcatcagcatctgccgaacccagagcaactcaggaatggcgatgactggcgcgcgcggctgatgattattctgtcgatggggatgcgcccctgttccggcgcgattatggtgctgctgttcagtaaagttattggcgtctttagttggggaatggcgtcggcgctggcgatggcggcgggaacctcgctgaccattacctctctggcgttgctggttcacagtttccgcacgctggcggtaaaattaagcggcaataaaacgccggtattgtggcgacagattggctggacaacgctggcgttagccggtggcgtgattttggttgtggcggcggtggtgatgtggatgagtgcggtgccggtgggcaggggattaagaccgttttag

SEQ ID NO: 74681 - DNA, 639 bp, Citrobacter koseri
atgcaattagttaaacgcagcgctttaacactctttctcgctgttttatcttttacagcgcaggcgcaccctcatagctttattcgattacagacgcagctggtgagtgaaaacgatcggtttgtggcgctaaaaatgcgctggacgatggatgaaatcacctctgccgacctgctttacgacgcgggagacgcgaagcccggttcggagatctggaaaaagctggcggcggaagtgatggcgaacgtgctcggccagcactacttcaccgaagtgtggcacaacggacaaaaggtcaagtttaaaaatcgcccgacggaatacggaatggaacgggaagcgcaccaggcggtgttgacgtttgtcctgccgttggctgaaccgcagccgctgagcggccagacttatactttttcaaccttcgatcccacatactatgtagatatgagctacgccaacgatcgggacgcctcgttgccgcaggcgttaagcacacaatgcagcatgagcgtacatacgccgacgccgagtgaagagacgctcagttttgcgcagtcgctggataaagaagacgcgccgccggaggatatggatttgggtaaacagttcgcgcagaaggtaacggtgcaatgtcagtaa

SEQ ID NO: 74682 - DNA, 1278 bp, Citrobacter koseri
atgatgccaacgcttacttcgccgtctgtactttctgctccccagcgccgctgccaggttttactgacgcttttccagccggggcaaatcgccaccacggaaacattcagcgcgctcaatggcgtcgatgatgaaattgcccgtgaggatatcaccgaaacaggcctggagatccagcgctatcatcgactcgccatcacaacgggtcagaacggacgctaccgaatcgagggggctgcgctcaaccaacgtttgtgccttttacactggctcagacgcggcttacgcatatgcccgaccttcattacgcaacagtttacgccggcattaaaaaccgagcttaaacggagagggatcgcgcgtacgttgtatgacgataccaatctgcatgcgctgatcaacctttgctcgcggcggctgcaaaaaccgtttgaatgccgggatgtgcagtttctgcggctgtttttacaatattgcctgctacagcatcatgcgggcatcgcaccggcgtttaatccgctacagaaacagtgggcgcagtcctgcgccgaatatccgctcgcgctggagattggccgtcactggcagcgccgcgtcatgcaaaacgcgccgcccgacgaaacgctgtttatggctttactgttttccatgattcgcatccccgaccctatccacgacaaccatcagcaggatcgccgcctgcgcctggctgtcgcccggctggtgttgcgctttcgggaaatggggcaggtacgcttcagcgacgaacagggacttaacgaccaactctatgtgcaccttgcccaggcgctgagccgaagtttattcgccattggtattgataacacgctgccggaagagttcagtcgcctctaccctcggctggtgcgcaccacgcgtgacgccctcgccgggtttgaaagcgaatacggtgtgcgtttctctgatgaagagacagggctggtcgcggtgatttttggcgcatggctgatgcaggagaacgacctgcacgaaaagcagatcgtgttactgacaggcaataacggcgaactggaggcacatattgagcagcaattacgagaactgacgctcctgccgctcaatattaagcatgtgccgacgcagaccttccagaaagacggttcgccgcgcggcgtggcgctgattgtcaccccgtatgccacaccgctgccgctcttttcgccgccgttgattcatgcggacctgtcgcttaccgcacaccaacagcagcagatccgcaaaatactggaatcatga

SEQ ID NO: 74683 - DNA, 1140 bp, Citrobacter koseri
atggttttgcactccacgcgctggctggcgctcggttattttacctacttctttagctacggtatttttctgccattctggagcgtctggcttaaaggcctgggactgacgccggaaaccatcggtctcctgctgggggcggggctggtggcgcgtttcctcggtagcctgttgattgcgccacgggtgagcgatccttcccgcttgatttctgcgttacgccttctggcgctgctgacgctggtgtttgccctcgcattctgggcagggacgcacgttgcgtggctgatggtggtgatgatcggttttaacctcttcttctcgccgctggtgccgctcaccgatgcgctggccaatacctggcaaaaacagttaacgatggactatggccgggtgcgtttgtgggggtctattgcgtttgtgatcggctcggcgttgaccgggaagctggtgagcctctttgattatcaggcgattctggggctattgacgcttggggtggcctcgatgctgctaggtatgctgctgcgaccgagcgtattgccgcagggggaaagccgtcatcaggagagcgcgggctggcctgcctggcgtacgctcgttgttcagagctggcgctttctcgcctgcgtgtgcctgctgcaaggcgcgcatgccgcttattacggcttcagcgcgatttactggcagggggcgggctattccgcctcggcagtggggtatttgtggtcgctgggcgtggtggcggaagtggttatttttgcgctgagcaacaaactgttccgccgttttagcgctcgcgatctgctattgctctccgccgtatgcggcgtcattcgctggggattaatgggctggagcaccgcgctgccgtggttgatagcgatccagattctgcattgcggcacttttaccgtttgccatctggccgcgatgcgttacatcgccgctcgccagggaagtgaagtgattcgtctacaggcggtctattctgccgtggcgatgggcggcagcattgccatcatgaccgtattcgccggattcctgtatcagcatttagggaacggcgtattctgggtgatggcattggtggcgttgcctgctattttcttacggcctaacgtcgccgcgtcatcatga

SEQ ID NO: 74684 - DNA, 843 bp, Citrobacter koseri
atggacgatacgctgacattacaaaacacgcatctgcggatgcgtgttgatccacagggcggcagattgttgagtttattttcattagcgcatcagcaggccgttttacgtgaaggatgcggcgtaaaacccggcgaatgcggcctgttccccatgctgccggtcgccaatcgcgttgccgaaaaccgttttttgttccggggagaggtggtgaatcttccccggcatgaggaggatgccgttttctttctgcacggtgacggctggctcaggcgctgggatacgattgccgttcatgaggacgcctgtcatctgcgttcaggtcgtcaaatggcgtgcggttatgattatgtcgcggatcttcactatcagctggacgccgctgtgcttcatgcctcgctgacgataacgcaccggggggaacgaccgatgctttatggttgcggattccacccgtactttgcttttgatcgtcacagtaccgtgcagtttgctgccagcggttactggccggaaggtaagcagcatctgccgcaggaatggcaaagcgatattccccggcaggcggatttttccggcgcgcaatatggcgaggatgcgtggcttaacgtagggtattccggctggagcgggcgggcgattgtgcagcatgatgtgatgaaggtcacgcttttatcgcaaacgccctggcttatgctattcagaatgcaaggggagtcattcttgtgtctggaaccgcagtcgcacccggtaaatgcccacaacatgccggggcaaccgggactccaggctttagctcagggagaccagtgccatttcgcgatgcaaatcgctgttgtttag

SEQ ID NO: 74685 - DNA, 1440 bp, Citrobacter koseri
atgaataacacgcagacacatttaagaatcggttatgtctggactatctgtctggttgccgcctgcggcggcttgctgtttggctatgactgggtggtgattggcggcgccaaaccgttctacgaagcctatttttcaattaccgatcccgcgcagtccggctgggcgatgagttcagcgctggtcggctgtatctttggtgcactgatgtccggctggtgcgctgataaatttgggcgaaaaatgccgctgattctggccgcgatcctgttcagcgcatcgtcctggggaaccgctgtcgccagcaatttcgatatgtttgtgatttaccgtatcgttggcggcgtaggaatcggcctggcgtccgcccttagcccactgtacatcgcggaagtcagcccagcggaaaagcgtggacgttttgtggcggtcaaccaactcacgatcgtgatcggcgtgctggcggctcagctcattaacctgatgattgctgaaccggtggcgaccgacgcgacccggcaggcgattgttgaaagctggaatgggcagatgggctggcgctggatgttcggcgcggaactggtgcctgcgctggcgtttctggttctgatgttctttgtgccggaatcaccgcgctggctggtcaaagcgggcaaacctgaacgcgcccgcgccatgctgcaacggattggctcagcggagtatgccgggcagacgttgcgggaaatagaacatactctgctgaaagacaaccacaaagtggcctggtcaacgctgttgcagccgcagattaaaccgattgtcatcatcggcatggtgctggccgtcttccagcaatggtgcgggatcaatgtgatcttcaactatgcgcaggagatcttcgcttccgcagggtttgatatcaacggaacgttaaaatccattgtcgccacagggatcattaacctcgtcttcaccctcgcagcgctgccgctggtcgataaaattggtcgccgaaaactgatgctgtttggcgcttcaggactcacggtgatttatgtactgattgctgccgcttacgggatggggattatgggctggccggttctggtgctggtgctggcggctattgcgatttacgccctgacgctggcgcctgtcacctgggttctgttgtcggaaatcttcccgaaccgagtccgtggtctggcgatgtcgctggggacgctggcgctctggattgcctgctttctgctgacctacacgttcccgctgcttaatgcggggctgggagcagcgggtagtttcctgctttacggcgttatctgcgcgatggggtatttctacgtgctgcgcaatgtgcctgaaacgaaaggcgtgacgctggaagcgctggaagagcaactggcggcgcggcatgtgaaatccagcccgtcaactcaacagcgaagcgcacggtaa

SEQ ID NO: 74686 - DNA, 3267 bp, Citrobacter koseri
atgtacggttcagttaaggtctggcaggaaacactctcactccctacgtggacaaccggcgaagaagatccgaacccgatgttcctggaaaagcgggtttatcaggggtcttcaggtgcggtttatccttatggcgtcatcgatacgctgaccggtaaacgtgaaatgcgcgagtatcaggcagtctggatggagaatgattttattcgcatcatgctgttgccggagctgggcggacgtattcatcgcgcgtatgacaaagtacagcagcgtgattttgtttactacaacgaagtggtgaaacccgcgctggtcgggctgctggggccgtggatctccggtgggattgaatttaactggccgcagcatcaccgtcctaccacatttatgccggtggattttacctgtcagcagggcgaacacggagaacaaaccgtgtggatgggggaagtggaacccatgcgcggcttgcaggtgatgaccggatttacgctgtaccccgatcgggcattaattgaaatcaccggaaaagtctttaacggcaacgctacgccgcgccattttttgtggtgggcaaacccggcggtgaaaggcggagacgaccaccagagcgtcttcccgccggacgttactgccgtatatgaccacggtaaacgggatgtctccgcctttccgatcgcgacgggtacttattacaaagtggactactccgccggcgtggatatctcgcgttataaaaatgtgccggtgccgacctcttatatggctgaaaagtcagattatgattttgtcggcgcctggcatcatggcgaacgagggggactgctgcatgtggccgaccaccatatttcgccgggtaaaaaacagtggacgtggggatacggtgatttcggcgtggcctgggatcgcaacctgaccgatgacaacggcccgtacattgaactcatgaccggggtcttcaccgacaaccagccagattttacctggcttgcgccgtatgaagagaaagtcttcgtgcagaatttcctgccctacagtgaactgggcatggtgcaaaatgccagtacgcagcttgcgctgcgccttgagcgagaagggaaccagctttcatccggcgtttatgccgttgcgccgctacatgacgttcaggtaacgctttgtgcccaggggcaaccattctttgaaaaaacactcacgctggaacccggtcaaagctggcgcgccgatctttctgacgcgggccacgcgcgggtgaaaatgaccgttgcccgtcgtgatggcgtcacgctgctggcgtatgaggagcatatcgcggaggacttgccgttgccgaaagcggcctgtgcgcccgaactgccagaggcgctgtcctgtactgatgagctctattttattggtcagcatctggagcagtacaaccatgccagccgctatgcagaagagtattaccagcgagcgctggacgtggatccgcatgactatcgcaacaatgtcgcgctgggcacgctggcgctgaatcgtgcggactgggcgcaggcagagcgctgtgcgcagtccgccttacagcgggcgcataagctcaataaaaatccgcgtgatggggaggcgagtatgctgctggccgccgcgctggaacgccagggcaaggacgacctcgcccgcgagcactattacaaagccagctggagcggcaactgtcgtgacgcggccttctggtcgctggcgcgaatcgccatgaagcggaatgattacgccgatgcgctggagaaagtgaatctgagtttgcgctttaatggcagcaataatctggcgatggggctgaaagcactggttctggccggactcgggcgtacagccgaagcgctggcgtatatttcacagcagcttattgagtacccgctgagttacaccctgcattatgcgcgttgggctatccgtcaggatgaggcggcgaaagaggcgcttatcgccattaccgggcgccgtggcaccaacgcctgcgagctggcgggttggctggtctcttgtgggcaaaaagaggccgcccgcgcggtgctgacgctgctcgacagccaggagacgctgcccatgctgtggcgcgcatcgctgagtgatgatccgcaaccgtttattgcgcaggctcgcgactgtttgcacaaccgcgttcgttttcccaacacgctcgacgaagtgcaaatgctgcaaacgctgtcggattgcgccttcgctcgctatcttctgggttgtttctggtacagcaaacgttgttatgaagaggcggtgaattgctggcagtttacgctggagcaggaaccgaatttcgcgccggtgcatcggctgctggggatttacgcctggaacaaacagcacgatgcgcagaaagcgctgaaatacctgtctcaggcagtcgtgctggagccgaagaatgcccgcttcctgtttgagctggattatctgaacaaactgatggcagcgccagccggggcgcgtttacaacagctggaggccagcaaagagattgttttccatcgcgacgatctgaccgtggaattgcttagcgtatggaatagcctcggtcgctacgaagcggccgccggggtgttgcgcgaacgtgtttttcacccctgggaaggcggggagggcaaagccaccgggcaatatttactgaatcagatccatcaggcgctggaagctattcgccgtggcgagccgcaaaacgccaccgttttgcttcagcaggcgttgcactatccgcacaatctcggcgaggggcgtttaccgggacaaacggataatgacatctggtatttgctgggctattgcgcgcgccagcaaggtcatcatgatgaggcgcagcgctatttcacccgcgcgactcgcggaggcagctcgctggacgcgggacgttactacaatgaccagccggtggattatctcttctggcaggggatggcgctgaaagcgtcaggtgactgcactgaagcgaaccttcttttccagagtttcctgcaatgggtggagacgcagcgtgacaaggttcccgacgtcgatttcttcgccgtatcgttaccggatctggtcgtgctggatacacccgcgcaggagaaacaccagcagcactgcctgttcattaccgcgctgggccatctggggctgggcgatatcccggcgtgccagcaggcgctaaacgcgctcctgcaacgcaatccgacgcatgacaaggcgcagctgctgcgccatgcgctcaacgtaccgttatttcaatag

SEQ ID NO: 74687 - DNA, 1194 bp, Citrobacter koseri
atgcagcgtacagggttcaataacgcccgggtcaggcaagccaacaagcagatctttctgtcgcacctgtggcgtgaaaaacagctcagtaaatcccggctggcgcagctcagcggcctgtcgattccggcggtcagcaatattctggaggagttgatcgatgagggaagaatttgccattcccgggagacgttaagccaacgagggctgagtagcggcagctatcacctgcccgaacagggagactggacgctgtgcatgaacgtgacgcccaccagcatcaccagccagctggcagatgcgcgtctggtcgccgtgggcgactggcgccatgcggagatcaatgccggttcgccaaaagccttgctgaccgcgcttgccgcgcactggcgggaatatcgtcagcgctatcccgacgtgaccatcaatctggcattaggcgttcacggtcaggtcgatcccattaccggggcgtcaaaaaccatgccgcaggcaccgtggaaaaccccggttgagattaaatatttgctggaggagatgctcggcgtacaggtgcggttagacaatgactgcgtgatgctggcgctggcggagaagtggcaaaacccggcggcaaaccgcgatttctgcgtcattaacgtcgattacgggattggttcctccttcgtcatcaacgacaacatctggcgcggcagtttgtatggcagcggtcagatcggacataccatcgtcaacccggacggggtggcctgtgattgtggccgctatggctgtctggaaaccgtggcctcgctcagcgcgcttaaaaagcaggcccgacggtggatgaaaacgcagcccacggcggattgcgacccagaaactatcaccatcgatcaactgattaccgcctggcaacagggcgatgtccgcatccaggcctgggtggaacacgccgccagcgcgattggcctgagtttatataactttctgaatatactgaatattaaccaaatctggatttatggccgcagttgcgcctttggcgaaagctggctgaatacgctggtgcagcaaacggggtttaatccctttgatcatggcgataacccacaggcaaggtccacccggatcggctttggcacactcagtcgttcgcaacagttgatggggatcggctatctgtacgtcgaatcacagctaaacgcgctctga

SEQ ID NO: 74688 - DNA, 1254 bp, Citrobacter koseri
atgttaaagcgtgaaatgaacattgccgattatgatgccgaactgtggcaggctatggagcaggaaaaagtacgtcaggaagagcacatcgaactgatcgcctccgaaaactacaccagcccgcgcgtgatgcaggcgcaggggtctcagctgaccaacaaatatgctgaaggatatccgggcaagcgctactacggcggttgcgaatatgtggatgtcgttgagcaactggcgattgaccgcgcgaaagaactgtttggcgcagactacgccaacgtccagccgcactctggttctcaggctaacttcgcggtctacactgcgctgctgcaaccgggcgacaccgttctgggtatgaacctggcgcaaggtggccacctgactcacggttctccggtaaacttctccggtaaactgtacaacatcgtgccttacggcatcgatgagtccggtaaaattgactacgaagagatggcgaagctggctcagactcataaaccgaagatgatcatcggcggcttctctgcttattccggcgtcgttgactgggcaaaaatgcgtgaaattgccgacagcattggcgcgtacctgtttgttgatatggcgcacgtcgcgggtcttatcgccgcagacgtttatccgaacccggttccgcatgctcacgttgtgaccaccaccacgcacaaaaccctggcgggtccgcgcggcggcctgatcctggcgaaaggcggtgacgaagagttgtacaaaaaactgaactctgccgttttccctagtgctcagggtggcccgctgatgcatgtgatcgccggtaaagcggtggcgctgaaagaagcgatggaaccggagttcaaagtctaccagcagcaggttgccaaaaacgccaaagcgatggtggaagtgttcctgaaccgtggctacaaagtggtttccggcggtacagagaaccacctgttcctgttggatctggtggacaaaaacctgaccggtaaagaagctgacgccgcgctgggtcgtgccaacatcaccgttaacaaaaacagtgtgccgaacgatccgaagagcccgttcgtcacttccggtatccgtatcggttctccggccattacgcgtcgcggctttaaagaagctgaagctaaagagctggctggctggatgtgcgatgtgctggacaacatcaacgatgaagcggttattgagcgcatcaaaggcaaagtgctggacatctgcgcacgcttcccggtttacgcgtaa

SEQ ID NO: 74689 - DNA, 1191 bp, Citrobacter koseri
atgcttgacgctcaaaccatcgccacagtaaaagccaccattcccctgctggttgaaaccggtccaaaactgaccgcccatttctacgatcgcatgtttacccacaaccctgaactcaaagaaatttttaacatgagtaaccagcgaaatggcgatcaacgtgaagcgctgtttaacgccatcgcggcctatgccagcaatatcgaaaacctgcctgcgctgctgcctgcggtagaaaaaatcgcccagaagcacaccagtttccagatcaaaccagaacagtacaacatcgttggcggccacctgctggcaacgctggacgaaatgttcagcccgggccaggaagtgctggatgcctggggtaaagcgtatggcgttctggccaatgtctttatcaatcgcgaagcgcaaatctacagcgaaaacgccagcaagaatggcggctgggaaggcactcgtccattccgcatcgttgcgaaaacgccgcgcagcgccctgattaccagctttgaatttgaaccggtcgatggcggcccggtcgcagaatatcatccgggtcaatacctgggggtctggctgaaaccggaaggcttcccgcatcaggagatccgtcagtattccctgacccgcaagccggatggtaaaggttatcgcatcgcagttaagcgtgaagatggcggtcaggtttccagctggctgcacaaccacgcaagcgtcggcgatatcgtccacttagccgctccggctggtgatttcttcatggatgtcgcaacggacacgcctgtttctctgatttccgcaggcgtcggccagactccgatgctggccatgctggatacgctgaccaaagccaaccacaccgcgcaggtgaactggttccacgcggcggaaaacggcgacgtgcatgcgtttgcagatgaagtgagcgagctgggtaaaaccctgccgcgctttaccgcacatacctggtatcgcgaaccgacagaagccgatcgtgcgaatggcgcgttcgacagcacaggtctgatggatttaaacaaactggaaagtgcgatcagcgatccggcaatgcagttttatctgtgcggtccggtcggctttatgcagtttgctgcgaagcagctgacagggctgggcgtgaaaagcgaaaacattcattacgaatgcttcggcccacataaagtgctgtaa

SEQ ID NO: 74690 - DNA, 339 bp, Citrobacter koseri
atgaaaaagattgatgcgattattaaacccttcaagctggacgacgtccgtgaagcgctggctgaggtaggcattaccggtatgacggttactgaagtgaaaggctttgggcgtcagaaaggccataccgagctgtaccgtggcgcggaatatatggtggattttctgccgaaggtgaaaattgaaatcgtggtgaccgacgatatcgtggatacctgcgttgacaccattattcgcaccgcgcagacggggaaaattggtgacggtaaaattttcgtctttgacgttgcgcgcgtgattcgtattcgtaccggcgaagaagacgacgcggcaatttaa

SEQ ID NO: 74691 - DNA, 1338 bp, Citrobacter koseri
atgataagccgcaaaccggcacatctgctgctcgtggacgatgatccggggctgttgaaactgctggggatgcgcctgaccagcgaaggctacagcgtcgtgacggcggaaagcggtcaggaagggctgcgcgtactgaatcgcgagaaagtggatctggtcattagcgatctgcggatggatgaaatggatggcatgcagctgttcacggaaatccagaaagtccagcctggcatgcccgtcatcattttgaccgcacacggctccattcctgatgcggtggcggcgacgcaaaaaggcgtgtttagctttctgaccaaaccggtcgataaagatgcgctgtatcaggccattgatgacgcgcttgaacaatcggcgccagcaatggacgacagctggcgcgaatcaatcgttacgcgcagtccgttgatgatacgcctgctggaacaggcgcggatggtggcgcaatcggatgtcagcgtgctgattaacgggcaaagcggcaccgggaaagagattttcgcgcaggctatccataacgccagcccgcgcagcagtaaacctttcatcgccattaactgcggcgcgctgccggaacagctactggagtccgaactgtttggccacgcgcgcggggcgtttaccggcgcggtcagcaatcgcgaagggttatttcaggcggcggaaggcggcacgctgtttcttgatgaaatcggcgatatgcccgcgccgttacaggttaagctgctgcgcgttctgcaagagcgcaaagtcagaccgcttggcagcaatcgcgatatcgatattgatgtgcgcattatctccgcaacgcaccgcgatctgcctaaggcgatggcgcggggtgaatttcgcgaagacttatattaccgtctgaacgtggtgagtctgaagatcccgacgctggcggagcgtacggaagatattccgctgctggcgaatcatcttctgcgccagtcagcagagcggcataaaccgtttgtgcgggcgttttcaacggatgcgatgaagcgtctgatgaccgcaagctggccgggaaacgtgcgtcagttggtgaacgttattgagcagtgcgtggcgttaacttcctcgccggtcatcagcgacgcgctggtggagcaggcgctggaaggcgaaaatacggcgctgccgacgtttgttgaggcgcgtaatcagtttgagcttaactacttgcgtaaactgctgcaaatcaccaaagggaatgtcacccatgcggcgagaatggcagggcgtaaccggacggaattttataagctgctctcgcgccatgagttggatgcaaacgatttcaaagagtag

SEQ ID NO: 74692 - DNA, 681 bp, Citrobacter koseri
gtgccttgcctggtgctgatggggtgcgcgccacatgccgcgaagcatgtcgtaaatgatgcgtcgcaggaaaaaattccaccgtatcagctggcggattatctctctaccgactgttcggatatctggttactcaaaggaccatcgacggataacaatccgctttactggcagcgggcgattgattgtgccgatcgcctgttgcccgttcagtcacgcaatgaagcgcgggcgctggaagatggcagctggcagaacacgttcaaacgcgggattctgctggcggatgctaaaattacgccccttgaacggcgcgatatggtcactcgcctcgatgcgctaagcgcgcaaattcccgctcaggtgcgcccgctttatcagctctggcgcgacggtcaggcgctacaattacagcttgccgaagagcgccagcgttacagtaaactccagcaagcgtcggatagcgagcttgatacgttgcgtcagcagcatcagcacttacaggcgcagctcgatctcacgacgcgcaagctggagaatctgactgatattgagcgccagctctccacgcgcaaacccgcaggcaactacaatcctgacgcgacacacggaaatgacaaacccgcagcgcctgatgacggcgcatcttccacactgccacaagatgaggtaacgccatga

SEQ ID NO: 74693 - DNA, 1386 bp, Citrobacter koseri
atgctggcatttctgctgattctgttgcctttgttggtactggcctggcaggcctggcaaagtctcaacgcgctcagcgcccaggcggcgcagactaaccgcaccacgctgatagatgcccggcgcagcgaagcgatgaccaacgtggcgctggagatggagcgcagctaccggcaatattgcgtgctcgacgaccgtacgctggcgaaggtgtatcagagccagcgaaaacgctacagcgaaatgctggacgcacatgcgggagtattgccggacgctaaactttaccaggcgctacgcgatgatctgaacggtcttgcacaattacagtgtaaaaatagcggccctgacgctaccgccgccgcgcggctggaggcttttgccaatgccaatacggaaatggtgcaggcaacgcgcacggtggtgttctcgcgcgggcagcagttacagcaggaaatcgcagagcgcggacaattcttcggctggcaggcgctggtgctgtttctggtcagtctggcgatggtactgctttttacaaggatgatcattgggccggtgaaagggatagaacggatgattaaccggctgggagaagggcgctctctggggaataccgtgtcgtttaccgggccgcgcgagctgcgttcggtggggcagcgcattatctggttgagtgaacgtctgtcctggctggaatcccaacggcatcagtttttacgtcacctgtcgcatgagctgaaaacgccgctggccagtatgcgcgaagggacagagctgctggccgatcaggtcgtggggccgttgacgccggagcaaaaagaggtcgtcggcattctggacgatagcagccgcaacttacagaagttgattgagcaactgcttgattacaacaggaaactggcagacagcgcgattgagatggaaaccgtggagcttgaaccgctggtggatatggtggtttccgctcacagtttgcctgcgcgcgctaaaatgatgcataccgaggtcaggctggctatcgacagctgtctggccgagccgatgctattaatgagcgtgctggacaatctttattccaatgcggtgcactatggcgctgaatccggtaacatttgtattcgcagcaatgtatatggttcaaaggcgcacattgatgtgatcaatacgggcacgccgatcccggaagcggaaagggccatgatttttgaaccctttttccagggaagccatcagcgtaaaggtgcggtgaaggggagcggattagggttaagtatcgccagggactgcatccgtcgtatgcagggggaactgtatctggtcgatgagaatgcgcaagaagtttgctttcgtatcgaactgctgctatctgcatcgaaaaaccactaa

SEQ ID NO: 74694 - DNA, 201 bp, Citrobacter koseri
atgctaaccgaggggaacatcagatacaacaaagccgggattaacccggctttgttatggaataaggcggtgcctaactcgacgtttcgcccgggggttgataaagcgacgctattatcagaagttggacggcaggcaccttgttgtgcgtcattcgaagtttatgtagcgcttcccgaaggggctgacataagaaggtga

SEQ ID NO: 74695 - DNA, 3888 bp, Citrobacter koseri
atgatggaaattctgcgtggttcgcctgcactgtctgcattccgtattaacaaactgctggcgcgttttcaggcggccaatcttcaggtccacaatatttacgctgagtatgtccattttgctgacctgagcgcccccttaaacgaggatgagcacgcgcaacttgcacgtttgctgaaatatgggccgagcttaagcagccatacccctgaaggaaagctgctgctggtcacgccgcgtcctggcaccatctccccctggtcttccaaagcgactgatatcgcccataactgcggtctgcaacaggtaagccgcctggagcgcggcgttgcatactacgttgaagccgctacgctcacggctgaacagtggcagacgattgccgctgaactgcacgaccggatgatggagaccgtgttctcttctttatctgatgcggaaaaactgtttgttcatcaccagcctgcgccggttgccagtgtggatctgctgggtgaagggcgtcaggcgctgactgacgccaacctgcgtctgggtctggcgctggcggatgacgaaattgattacctgcaagacgccttcacgaaactggggcgcaatccgaacgatatcgaactgtatatgttcgcgcaggcaaactccgaacactgtcgccataagatttttaacgctgactgggttatcgacgggaaaccgcagccgaagtcgctgtttaagatgatcaaaaacacctttgaaaccacgccggatcatgtgttgtctgcctataaagataacgcggcggtgatggaaggttctgacgtgggacgctacttcgctgaccacgagagcggtcgctatgacttccatcaggagcctgcgcatattctgatgaaggtggaaacccataaccacccgacggcaatctcgccgtggccgggcgcggcgaccggttccggtggtgagattcgtgatgaaggcgcaaccggacgcggcgcgaagccaaaagcaggtctggtgggcttctccgtgtctaacctgcgtattccgggttttgagcagccgtgggaagaagattttggtaaaccagagcgtatcgttaccgcgctggacattatgaccgaaggcccgctgggcggcgcggcgtttaataatgaatttggtcgcccggcgttgaacgggtacttccgtacttacgaagaaaaagtaaacagccacaacggcgaagagctacgcggctaccacaagccgatcatgctggcgggcgggatcggcaacatccgcgccgatcacgtacagaaaggcgagatcgtcgttggcgcgaagctgatcgtgctcggagggccggcgatgaacattggtctggggggcggggcggcgtcctctatggcttctggtcagtcggatgcggatctcgattttgcctccgtacagcgtgataacccggaaatggaacgtcgctgccaggaagtgatcgaccgctgctggcagttaggcgatgccaacccgatcctgtttattcacgacgtcggggcaggcggtctctccaacgcgatgccggagctggtgagcgacggcgggcgcggcggtaaatttgagctgcgcgatatcctcagcgatgagccgggcatgagcccgctggaaatctggtgtaacgagtctcaggagcgttatgtgctggccgtggccgccgaccagttgccgctgtttgatgagttgtgcaagcgtgagcgcgcgccgtatgcggtgatcggtgaggccaccgaagaacagcatctgtccctgaacgacagtcatttcgataatcaaccgatcgatctgccgctggacgtgctgctgggtaaaacgccgaaaatgacccgcgacgtgcagacgctgacagcgaaaggcgatgcgctggatcgtgctgatatcacgatcgctgacgcggttaaacgggttctgcatctgccgaccgtggcggagaaaacatttctggtgaccatcggcgaccgtaccgtgaccggtatggtggcgcgcgatcagatggtcggcccgtggcaggtgccggtggcgaactgcgcggtgaccaccgccagcctcgacagctactacggcgaagcgatgtctatcggtgaacgtgcgccggtagcgctgctggactttgccgcttccgcccgtctggccgttggcgaagcgctgacgaacatcgccgcgacccagattggtgatatcaaacgcatcaagctgtccgcaaactggatggcggcggccggtcatccgggtgaagatgccggtctgtatgacgcggtgaaagcggtaggcgaagaactctgcccgcagcttggcctgacgattccggtgggcaaagactctatgtcgatgaaaacccgctggcaggaaggcaacgagcagcgcgaaatgacctcgccgctgtcgctggtgatttccgcgtttgcccgcgtggaagatgtgcgtcataccgtcacgccgcagctctcgaccgaagataacgcgctgctgctgatcgatttgggtcaggggcataacgcgctgggcgcaacggcgctggcgcaggtgtatcgtcaactgggcgacaaaccggcagacgtgcgcgatgtggcgcagttgaaaggcttctacgatgcgattcaggcgctggtggcgcagcgtaaactgctggcgtatcacgaccgttccgacggcggcctgctggtcacgcttgccgagatggcctttaccggtcactgcggcatccaggtcgatattgcaacatctggcgacgatcgtctggcggcgctgtttaacgaagagctgggcgcagtgattcaggtgcgggcggccgatcgcgaagcggtcgaggcgctgctggcgaagcatggtctgagtgactgcgtacactatttaggtcaggccgtttccggcgaccgttttgtgattgaatccaatgggcaggttgtcttcagcgaaagccgcaccacgcttcgtacctggtgggcggaaacgacctggcagatgcagcgcctgcgcgacaacccggaatgtgccgatcaggaacatgacgcaaaaaccaacgatgccgacccgggtctgaacgtgaaattgtcgttcgatatcaatgaagatatcgccgcgccgtatattgctaccggcgcgcgtccgaaggttgccgtactgcgcgaacagggcgtgaactcccacgttgagatggcggcggcgttccatcgtgcgggctttgacgcgattgatgtgcatatgagcgatctgctggctggccgtattgggctgggtaatttccaggcgctggttgcctgtggcggtttctcttacggtgacgtgctgggcgcgggtgaaggctgggcgaaatcgattctgttcaacaatcgcgtacgcgacgagttcgaaacgttcttccaccgcccgcagacgctggcgcttggcgtatgtaacggttgccagatgatgtctaacctgcgtgaactgattccagggagcgagctgtggccgcgttttgtgcgtaaccattctgaccgttttgaagcgcgcttcagcctggtggaagtgacccaaagcccgtctctgctgttgcagggaatggttggctcacagatgcctgtcgcggtgtcccacggtgaagggcgcgttgaagtgcgtgacgatgcgcatctggcagggctggaaagcaaaggtctggttgcgctgcgttatgtcgataacttcggtaaggttacggaaaactacccggccaacccgaacggatcgccaaacggcatcaccgccgttaccacggagaacggtcgcgccaccattatgatgccgcacccggagcgcgtcttccgcaccgtcagcaactcctggcacccggaaaactggggcgaagacagtccgtggatgcgtattttccgcaatgcgcgtaagcagttaggttaa

SEQ ID NO: 74696 - DNA, 1548 bp, Citrobacter koseri
ttgaaaaaattaaagattaattatctgttcatcggcatattgactctgctgctggcagcggccctctggccatcaatcccctggttcggcaaagccgacaatcgtatcgccgcgatccaatcgcggggagagttacgcgtctcgacaatagagtcgccgctgacttacgcccgcattaacggaaaaaagtacggtctggattacgaactggcgcagcagttcgccagctatcttggcgtaaagctgaaaattaccgtacgccagaatatcagccagctatttgacgatttagataacggcaacgccgatctgctggcggcaggactggtttacaacagcgagcgcgtgaagaattatcaacccggcccgacctactattccgtttcgcaacagctggtttaccgggtaggacaataccggcctcgcacgctggccacggtgaatgaaagccagctctctatcgcgcctgggcatgtcgtggtgaatgacttgcaggcgctgaaagagacaaaatttcccgatctaagctggaaagtcgatgacaaaaaagggacagcggcgctgctcagcgaagtcatcagcggcaatctggactataccattgccgattctgtcgcgatcagcctgttccagcgcgtacatcctgaactggccgtcgcgctggatgtcaccgatgagcagcctgtcacctggtttagccaactggacgatgacaacacgctttccgctgcgctgctcgatttcttcaacactattaatgaagacggctcactggcgcgtatggaagagaagtatctggggcacggcgacgattttgattatgtcgatacccgcaccttcctgcgggccgtggacggcgtactgcccgatctccagccgttgtttgaaaaatacgcgcaggagatagactggcgcctgctggccgcaatttcctatcaggagtcgcactgggacccgctggccacctccccgacgggcgttcgcggtctgatgatgctcaccaaaaacaccgcgcaaagtctggggctgacggaccgtaccgatgcggaacagagcatcagcggcggtgtgcgttatatccaggatatgatgggcaaagtgcctgaaaccgtgccggaagaggagcgtatctggtttgcgctcgccgcctataacatgggctatgcgcatatgcttgacgcccgtgcgttgacggtcaaaaccaggggcaacccggatagctgggccgatgtaaaacaacggctgccgctgctcagccagaaacaatattacagcaagctgacgtacggctatgcgcgcgggcatgaagcctacgcttatgtggaaaatattcggaagtatcagattagcctggtcggctatctgcaagaaaaagagaagcaggcggcagaagcgataaagctggcgcaggattacccggcagtgtctccggccgagtttgacacggagacatttcctttctcttctttcttatcgcagccgtcatcgaactacctgtcacactctccttctttgccgttttcactgaagaagaaagacgaaaactaa

SEQ ID NO: 74697 - DNA, 504 bp, Citrobacter koseri
ttgtctgatgttgaatttagccacgaatactggatgcgtcatgcgttgacgctggcgaaacgcgcctgggatgagcgtgaagtgccggttggcgcggtattggtgcataacaatcgcgtcattggcgaaggctggaaccgtccgataggtcatcatgatcccactgcgcacgctgaaatcatggcgctacgtcagggtgggctggtgcttcagaactaccgtttgctggataccacgctttacgtgacgctggagccgtgcgtgatgtgcgcgggagcaatggtacacagccgcattggtcgggtggtatttggcgctcgcgacgcgaaaaccggcgcggcagggtcgctgatggacgtattgcatcatccgggcatgaaccaccgcgtagagatcaccgaaggtgtgttacgcgatgagtgcgcagcgctgctcagtgatttctttcgcatgcgtcgccaggagatcaaagcgctaaaaaaatcttcgcaagaatcgttgtag

SEQ ID NO: 74698 - DNA, 636 bp, Citrobacter koseri
ttggttaatcacgagcgtcgtgtcgtattttttgatttggacggtacgttgcaccagcaggatatgtttggcagtttcctgcgttatctgttgcgtcgccagccgctgaatgcgttgctcgtgctgccgttattgccggttatcgggattggcttgttgattaaaggtcgggcggcgcgttggccgatgagcctgctgttatggggttgtaccttcggtcacagtgaagcgcggctcaaggcgcatcaggcggatttcgttcgctggtttcgcgataacgtcacggcgtttccggttgttcaggagcgcctgacgacctatctgttaagctctgacgctgatatctggctgattaccggctctccgcaatcgctggtggaacaggtctatttcgatacgctctggctgccgcgcgtgaacctgatcgccagccagatgcggcgtggctacggcggctggctgctgactatgcgctgtctggggcacgagaaggtcgcccaactggaacgccagattggtgcgccgttacgtctgtacagcggctacagcgacagtaagcaggataacccgcttctctatttttgccagcatcgctggcgcgtcacgccgcgaggggagctccagcaactcgaatag

SEQ ID NO: 74699 - DNA, 894 bp, Citrobacter koseri
atgaatctcggctcgttagtttcagaaacccgcaatccacagactatggatcttgacgcactccctacgcttgagctggttcatcgttttaatcaacaggatacgcttgtagcgcaagcagtaaaagagacgctgccagacgttgcccgcgcggtagatgccgccgccgacgccttaaaggcgggagggcgcattatttatatgggcgcaggcaccagcggacgccttggcgttctggacgcctccgaatgcccaccaacgtttggcgtaccgcacgggctggtgatcgggctgattgccggcgggcccggcgcgctgctgaaagcggtggaaggcgcggaagacagtcagcagttaggggaggacgatctcctggcgcttaacgtgaccgcgcaggatctggttgtcgggctggcggcgtccggtcgtacgccgtacgtcattggcgggttgaaatacgcacgtcaggtgggctgcgtcacggtggctatctcctgtaatcccgattctcccatcgcgcgtgaggctgacatcgccatttcgccggtcgttgggccggaggcgctaaccggttcgacgcgactgaaatccggtactgcgcaaaaactggtgctcaatatgatctccaccggggcgatggtgaagttcggcaaggtgtaccagaacctgatggtggacatgaaagccaccaacgttaagctcgtcgacagagcgtgccggatggtggttgaggctaccgggattacgcgtgaagaggccgaagcgctgcttaagcagacagattttgaggttaaaccggccattctgatggcgcttaccgggctgaatgccgaagacgcaagggcgaaattgtccgctcaccagggatttctacgggcggcgttagaacgctaa

SEQ ID NO: 74700 - DNA, 849 bp, Citrobacter koseri
atgaactgtttgattcgtatacgtcagcgttatccggacctcgcacaaagcgataaaaagcttgctgattatattcttgctcagccggatgatacacggcatctcagctcacaacagcttgccgttgaggcgggcgtcagtcagtccagcgtggtgaaattcgcgcagaaactgggctttaaaggctttccggcactgaagctggcgatcagcgaagcgctggccagcaatccaaatcctcactctattccggtacataatcagatccggggcgacgatccgatgcggcttgtcggcgaaaaattgatcgaggaaaatgtcgccgcaatgcacgcaacgctcgatgttaacagcgaagagaaattgttcgaaagcgtcatgatgctgcgcaatgcccggcgtgttgtcataaccggtattggcacatcgggcctggtggcgcagaacttcgcctggaagctgatgaagataggattcaatgtcgtcgccgaacacgatatgcatgcgctgttagccaccgtgcaggcgctggcgccggacgatctcctgctggctatctcctatagcggcgagcgcagagagttgaatatggcggcggatgaaacgttgcgggtgggaggaaaggttctggcgatcaccggctttacaccgaatgccctgcaacaacgcgccactcgttgcctgtatacgatcgccgaagagcaggccacgcgcagcgccgcaatctcctctacgcatgcgcagacgatgttgacggatttgctctttatggcgctggtacagcaggatttggggcgcgcgccggagcgtattcgccacagtgaggccctggtaaaaaaactggtctga

SEQ ID NO: 74701 - DNA, 261 bp, Citrobacter koseri
atggccctgttaatcactaaaaagtgtatcaattgcgatatgtgcgagcctgaatgcccgaatgaggcgatttcaatgggcgacagcatttacgagattaacagcgacaagtgcaccgaatgcgtgggccattacgaaacgccgacctgccagaaggtgtgcccgatccccaataccattctcaaagacccggcgcatgtcgaaacggaagaacagctgtgggataagtttgtcctgatgcatcacgcggataagctgtaa

SEQ ID NO: 74702 - DNA, 381 bp, Citrobacter koseri
atggcgattctggggttaggcacggatattgtggagatcgcccgcattgaggcggtgatctcccgttctggagagcgcctggcaagacgcgtgcttagcgacaacgaatggactatctgggagacgcatcagcaaccggtgcgttttctcgccaagcgttttgcggtaaaagaggcggcggcaaaagcgttcggcaccggcattcgcaacgggctggcgttcaatcagtttgaagtgtttaacgatgagctgggtaaaccgcgtttgcgtttgtggggcgaggcgttgaaactggcggagaggctgggcgtggcgcatatgcatgtgacattagcggatgaacgtcattacgcctgtgcgacggtgatcatcgaaagctag

SEQ ID NO: 74703 - DNA, 732 bp, Citrobacter koseri
atggctgaattactgttaggcgtcaacattgaccatattgccactttacgcaatgcgcgtggtactgcttaccccgacccggtacaggcggcgtttatcgccgaacaggcgggggcggatggtataaccgtacacctgcgcgaggatcgtcgccatattaccgaccgtgatgtacgcattttgcgccagacgctggatacgcgtatgaatctggaaatggcggtgactgaagagatgctggcgattgccgttgagacgaggccgcatttttgctgcctggtgccggaaaaacgtcaggaagtgaccaccgaaggcgggctggacgtcgcgggtcagcgtgacaaaatgcgtgatgcctgcaaacggctggcagatgcaggcattctggtatcgctgttcattgatgccgatgaagaacagattaaagccgctgcggacgttggcgcaccgtacattgaaatccatactggctgttatgcggatgccaaaacggatgctgagcaagcgcaggaactggcgcgtatcgccaaagcggcgacgtttgcggcaagcctggggctgaaagtgaacgccggtcatggcctgacttatcacaatgtgcaggccattgccgcactgccggaaatgcatgaactgaacatcggtcatgccattattgggcgggcggtcatgagcggcctgaaagaggcggtcgccgagatgaaacgcctgatgctggaagcgcgcggctaa

SEQ ID NO: 74704 - DNA, 738 bp, Citrobacter koseri
gtggaaggctggcagagagctttcgtcctgcatagtcgcccctggagcgaaaccagcctgatgctggacgtcttcacggaagagtcggggcgcgtgcgtctggttgccaaaggcgcacgctctaaacgttccagtctgaaaggcgcattacaaccttttacgccactgttgctccgctttggcgggcgcggcgaggtgaaaaccttacgcagcgctgaagcggtctctctggcgctccccttaagcggcatcacgctttatagcggtttgtacatcaacgaactgctttcccgcgttctggaatacgaaacgcgcttctctgaactcttttttgattacctgaactgtattcagtcgctggctggcgcgaccggttcgcccgaacctgcgcttcgccgtttcgagctcgccctgctgggacatctgggctacggcgtggattttctgcattgcgcagggagcggcgagacggtcgatgacaccatgacctaccgctatcgcgaagagaagggattcatggccagcgtggtcattgataacagcacctttaccgggcggcatctgaaagcgctggatgcacgagaatttcctgatgttgatacgttgcgcgcggcgaaacgctttacccgcatggcgctaaagccgtatcttggtggtaagccgttaaaaagccgggaactgtttcgacaatttatgccgaaacggccagggcgggcagaaaatacgaataatgattaa

SEQ ID NO: 74705 - DNA, 906 bp, Citrobacter koseri
atgagcgaagataaaagctattgcggatttattgccatcgtcggacgtccgaacgtaggcaaatccaccctgttgaacaagctgctcggacagaagatctcgatcacgtcccgtaaagcgcagaccacgcgtcaccgtatcgtcggtatccataccgaaggggcgtaccaggctatctatgttgatacgccggggctgcatatggaagaaaaacgcgccatcaaccgcctgatgaacaaggcggcaagcagctcgattggcgacgttgagctggtcatttttgtcgtggaaggcacccgctggacgccggacgacgagatggtgctgaataaactgcgcgacggtaaagcgccggtcattctggccgttaacaaagtggataacgtacaggaaaaagccgatctgctgccgcacctgcaattcctggcaagccagatgaacttccttgatatcgtgcctgtttctgcggaaactggcatgaacgtggataccatcgctggtatcgtgcgtaaacacctgccggaagcgactcatcacttcccggaagattacatcaccgatcgttcacagcgctttatggcgtctgaaatcatccgtgaaaaactgatgcgtttcctcggtgccgaactgccgtattccgtaaccgttgagattgaacgtttcgtttctaacgaacgcggcggttacgatattaacggcctgatcctcgttgagcgcgaagggcagaagaagatggtcattggcaacaaaggggccaaaatcaagaccatcggtatcgaagcgcgaaaagacatgcaggaaatgtttgaagcgccggtacacctggaactgtgggtgaaagtgaaatccggctgggccgatgacgagcgtgcgctgcgcagtctcggttatgtagacgacctctga

SEQ ID NO: 74706 - DNA, 681 bp, Citrobacter koseri
atgaaccccatcgtaattaatcggcttcaacggaagctgggctacacttttactcatcaggagctgttgcagcaggcattaacccaccgcagcgccagcagtaaacacaatgagcgtttagaatttttaggcgactcgattttgagctttgttatcgccaacgcgctttatcaccgcttcccgcgtgtggacgaaggtgatatgagccgtatgcgcgccacgctggtgcgcggcaatacgctggcggaattggcccgtgaatttgatctgggtgaatgcttacgtttagggcctggtgaactgaaaagcggcggctaccgtcgtgaatctattctggcggataccgtagaagcgttaatcggcggcgtttttctcgacagcgatatccaaaccgtcgagaagttgatccttaactggtatcaaacgcgcctgaatgaaatcagcccgggcgataaacaaaaagatccgaaaacgcgtttgcaggaatatttgcagggtcgtcatctcccgctgccgtcttatctggtggtgcaggtgcgcggcgaagcacacgatcaggaatttactatccactgccaggtcagcggcctgagtgaaccggtggttggcacgggttcgagccgtcgtaaggcggagcaggctgccgccgaacaggcgctgaaaaaactggagctggaatga

SEQ ID NO: 74707 - DNA, 975 bp, Citrobacter koseri
atggcgaatatgtttgccctgattctggtgattgccacactggtgacgggcattttatggtgcgttgataaatttatcttcgcgccaaaacgtcgggaacgtcaggcagcggcacaggccgctgcgggtgattcactggataaagccacgttgaaaaaagtggcgcctaagccgggctggctggaaacaggggcttcggtttttccggtactggcgattgtgctggtggtacgttcatttatctatgaacctttccagatcccgtcgggttcgatgatgccgacgctgttaatcggtgactttattctggtggagaaattcgcctatggaattaaagatccgatttaccagaaaacgttgattgaaacgggtcatccgaaacgcggtgatatcgtggtctttaaatacccggaagatccgcgcctggactacattaaacgcgctgtcggcctgccgggtgacaaagtgacgtacgatccggtagccaaagaggttactgtacagccagggtgccgttccggtcaggcgtgtgaaaacgcgctgccggtgacttactctgacgttcagcccagcgatttcgtgcagacctttgcccgccgtaatgggggagaagccagcagtgggttcttcgaagtgccgttaaacgaaacgaaagataacggcattcgtctggcggagcgtaaagagacgctgggagacgtaacccaccgtattctgaccgtaccgatcgcgcaggatcaggcggggatgtattaccgtcagccggggcagcaactggcgacctggatcgtaccgccaggacaatacttcatgatgggtgataaccgcgataacagcgcggacagccgttactggggatttgtaccggaagcgaatctggttggtaaagcgaccgcgatctggatgagtttcgacaaacaggaaggtgaatggccgaccggcgtacgcttaagccgtattggtgggatccattaa

SEQ ID NO: 74708 - DNA, 1800 bp, Citrobacter koseri
atgaagaacatacgtaacttttcgatcattgctcatatcgaccacggtaaatcgacgctgtctgaccgcattatccagatctgcggtggcctgtctgaccgtgaaatggaagcgcaggttctcgactcaatggatcttgagcgtgagcgcggtattactatcaaagcgcaaagcgtgacgctggattacaaagcggctgatggtgaaacctatcaactgaactttatcgacaccccaggccacgttgacttctcatatgaagtttcccgctcactggcggcgtgtgaaggcgcactgctggtggttgacgccgggcagggcgtcgaagcgcaaacgctggcgaactgctataccgcgatggaaatggatctcgaagtggtgccggttctgaacaagattgacctgccagccgccgatcctgagcgtgtggctgaagagatcgaagacattgttggcattgatgcgaccgatgccgttcgctgctcggcaaaaaccggcgtaggcgtacaggatgtgctggaacgtctggtgcgcgatatcccgccgccggaaggcgatccagaaggcccgctgcaagcgctgattatcgactcctggttcgataactacctcggcgtagtgtcgctggtgcgtattaaaaacggcaccatgcgtaaaggcgataaagtcaaagtgatgagcaccgggcaggtttataacgctgaccgtctggggatcttcacgccgaagcagattgaccgtactgaactgaagtgcggcgaggtaggctggctggtttgcgcaattaaagacattcatggcgccccggttggcgatacattaacgctggcgcgtaatccggcagagaaggcgctgccgggcttcaaaaaagtgaagccgcaggtatacgccggtctgttcccggtgagttctgatgactatgagaacttcagggatgcgctcggcaagctgagcctgaacgatgcctctctgttctacgagccggaaagttcaaccgcgctgggcttcggcttccgctgtggcttcctgggtctgctgcacatggagatcattcaggagcgtctggaacgtgaatacgatctggacctgatcaccaccgcgccgaccgttgtgtacgaagtggaaaccacggcgaaagagattatctatgtcgatagcccgtccaagctgccgccgctgaataacatctatgaactgcgcgagccgattgccgagtgtcacatgctgctgcctcaggcatacctgggcaacgtcattacgctgtgtgtcgagaagcgcggcgtccagaccaacatggtgtaccacggtaaccaggtggcgctgacttatgaaatcccgatggcggaagtggtgctcgatttcttcgaccgcctgaaatcaacgtctcgtggttatgcgtcgctggattataacttcaagcgcttccaggcgtccgatatggtgcgcgtcgacgtgctgatcaacaacgaacgtgtcgatgcgctggcgctgatcactcaccgtggtaattcgcagagccgtggtcgtgagctggtggagaagatgaaagagctgatccctcgtcagcagttcgacattgcgattcaggcggcgattggcacgcatattattgcgcgttctaccgtgaagcagttgcgtaaaaacgttctggccaagtgttacggcggtgatatcagccgtaagaaaaagctgctacagaaacagaaagaaggtaagaagcgaatgaagcagatcggtaacgtcgaactgcctcaggaagcgttcctcgccattctgcatgtcggtaaagacagcaaataa

SEQ ID NO: 74709 - DNA, 156 bp, Citrobacter koseri
atgatgcccgatggcgcgagcttatcgggcctgggaggtctgcttatctttccctggccggatcaggcgaagccgccatccggcaaaaatatcacgagttcgtttcggaagatggtgtttcaacgcgaaccagaccaggaggaagagcaacgttaa

SEQ ID NO: 74710 - DNA, 480 bp, Citrobacter koseri
atgattaaagagtgggcgaccgttgtctcctggcaaaatggccagacactggtgagttgcgacgtcaaagcatcgtgcagcagttgcgcctcacgggccggatgcggcagtcgtgtgctgaataaacttgggccgcagaccacacatactattgtggtgccaagtgccgaaccgctggcgcctggtcaaaaagtggaactgggcattgccgaaggcagcctgctggggtcagcaatgctggtttacctgtcgccgctggttgggctgtttatcttcgcggcgttgttccaggtactgtttggttctgatattgccgcgttgagcggcgcggtgctgggcggcgtcgggggttttctgattgcgcgcggctactcgcgtaaactggctgaacgcgaggcctggcagccggtcattcttaacgttgctcttcctcctggtctggttcgcgttgaaacaccatcttccgaaacgaactcgtga

SEQ ID NO: 74711 - DNA, 957 bp, Citrobacter koseri
atgaagcaactttggtttgccatgtcacttgtggcgggtagcctgttcttctctgttaacgcctcggccaatactgcgtccggggcgttattgcagcagatgaatctggccagccagtcactgaattacgagctgtcattcgtcagcatcaataaacaaggcgttgagtctctgcgttatcgacatgcacgcctggacaatcgtcctcttgcacaactgttgcaaatggatggcccgcgccgggaagtagtgcagcgtggtaacgaaatcagctacttcgaacctgggctcgaaccgttcaccctgaacggcgactatattgtcgattctctgccgtcccttatctatgccgactttaaacgtctttctccctggtatgactttatttccgtaggccgcacccgcattgccgacaggctgtgtgaagtcattcgtgttgtcgcgcgcgacggcacccgttacagctatatcgtatggctggataccgaaacaaagctgccgatgcgggtggatctccttgaccgggatggggaaacgctggagcagttccgcgtgatttccttcaccgtgaatcaggacgttggtaatagcatgcagatgctggcgaaagcgaatttgccgccattgctctctgttcctgtgggggaaaaggcgaagttcaactggagcccgacgtggttgccgcaagggtttagcgaagtctccagcagccgacgtccgctgcctacaatggataatctgcctatcgagtcacgcctttattctgacggcctgttcagtttctctgtgaacgtgaatcgtgcgacgcagaacagcaccgatcagatgctgcgaaccgggcgcagaacggtcagcaccagcgtgcgtgaaaacgctgaaattacgattgtcggcgaacttccgccgcaaaccgcgaaacgcattgcggacaatattaagttcggggcggcacaatga

SEQ ID NO: 74712 - DNA, 651 bp, Citrobacter koseri
atgcagaaagaaaaactttccgctttaatggatggcgaaacgctggacagtgagctgctgaaagaactggctcacgacccggaaatgcaaaaaacatgggagagttatcacctgatccgcgattccatgcggggtgataccgctgacgttctccatttcgatatttccgcccgcgtaatggccgccatcgaaaatgagccggtacgccagacggcgccgctgattcctgaggcccagcccgcaccgcaccagtggcagaaaatgccattctggcagaaaatgcgtccgtgggcggcgcagctcactcaaatgggtgtggctgcatgcgtatcacttgcagttattgttggcgtccagcactataatggacaatctgaaacgtcccagcagcccgaaacgccggtattcaatacattaccgatgatgggcaaagccagtccggtgagcctgggagtaccttctgacgcgacggctaacggcggtcagcaacagcaggtgcaggagcagcgtcgtcgcattaatgccatgttgcaggattacgaactgcaacgccgactgcactccgaacagcttcagtttgagcaggcgcaaacacagcaagccgctgtacaggtgccaggaattcaaactttaggaacgcaatcgcagtaa

SEQ ID NO: 74713 - DNA, 576 bp, Citrobacter koseri
atgagcgagcagttaacggaccaggtcctggttgaacgggtccagaagggagatcagaaagcctttaacttactggtagtgcgctaccagcataaagtggcgagcctggtttcccgctatgtaccgtcgggcgatgttcccgatgtggtgcaagagtcatttattaaggcctatcgcgcgctggattctttccggggggatagcgctttttatacctggttgtaccgtattgccgtcaatacggcgaagaattacctggttgctcagggacgcaggccgccttccagcgatgttgatgcgattgacgcagaaaacttcgaaagtggcggcgcattgaaagaaatttcgaaccctgagaacttaatgttgtcagaagagctgagacagatagttttccgaactattgagtccctccccgaggatttacgcatggcaataaccttgcgggagctggatggcctgagctatgaagagatagccgctatcatggattgtccggtgggtacggtgcgttcacgtatcttccgtgcgcgggaagctattgataataaagttcaaccgcttatcaggcgttga

SEQ ID NO: 74714 - DNA, 1623 bp, Citrobacter koseri
atgactacgactcctgaactttcctgtgacgtgctgattattggcagcggtgctgccggactctctctggcgctgcgcctggctgaaaaacatcaggtgattgtcctgagtaaaggcccggtgagcgaaggctcaacgttttatgctcagggcggtattgccgccgttttcgacgagacggacagtatcgattcgcatgttgaagatacgctgatcgccggggccggtatttgcgatcgccacgcggtggagtttgtcgccagcaatgcccgctcttgcgtacagtggcttatcgatcagggtgtattatttgacacccaggtgcaaccgaacggggaagagagctaccatctgacccgtgaaggcggccatagccatcgccgtatcctgcatgcggctgacgccaccggcaaagaagtggaaactaccctggtcagcaaggcgcagaaccatccgaatattcgcgtactggagcggagtaacgccgtcgatctgatcatctccgataaaatcggcctgccaggaacacgccgcgtcgtcggcgcctggatctggaatcggaataaagagtcggtcgaaacatgccacgcgaagtcagtcgttctggcgacaggcggggcatcgaaagtgtatcagtacaccaccaacccggatatctcttccggcgacggtatcgcgatggcctggcgcgccgggtgccgcgtcgcgaatcttgaatttaatcagttccaccctaccgcgctgtatcatcctcaggcacgaaactttctgctgacggaagcgctgcgtggcgaaggggcacatctcaagcgcccggacggcacgcgctttatgcctgattttgatgagcgtggcgaactggctccgcgcgatatcgtcgctcgcgccattgaccacgaaatgaagcgtctcggcgcagactgcatgttcctcgacatcagccataaaccggaagcatttgtccgtcaacacttcccaatgatttatgaaaaattgctggggttgggaatcgatctgactaaagagccggttccggtcgtacctgccgcccactacacctgcggcggcgtgatggtcgacgattttggacgaaccgatgtggacggtctgtatgccattggcgaagtaagctataccggcctgcacggcgcgaatcgcatggcgtccaattccctgttggagtgtctggtgtatggctggtcagcggcagaagatatcgacagacgtatgccgtatgcccggagcgttagtacgcttccggcctgggatgaaagtcgcgttgaaaacccggatgagctggtcgtgatccagcataactggcatgagctacgtctgtttatgtgggactatgtcggcattgtgcgcaccaccaaacgtctggagcgcgccctgcgacgcattacgatgctgcaacaggaaatcgacgaatattacgctaacttccgcgtatcgaataatctgctggagctgcgcaacctggtgcaggtcgcggaactgattgtgcgctgcgcgatgatgcgtaaagagagccgtggcctgcactatacgctggattaccccgcattgctgccggaatccggcccgtcggtgctttcgccgctcaacgcttacatgaacaaataa

SEQ ID NO: 74715 - DNA, 738 bp, Citrobacter koseri
atgtcccagtctacatccacacttcgtcgtaatggatttacctttaagcagtttttcgtggcgcacgatcgctgcgcgatgaaagtcggtactgatggtattttattgggagcatgggcaccagtcgcaggcgtaacgcggatcctcgatattggtaccggcagcggtctgctggcgctgatgttggcgcagcgtaccgacgaaagcgtcaccattgatgccgttgaactggacagcgaagcggcgacgcaggcgcaggagaatatcgcccactcaccgtggccgcagcggataacggtgcatacggaagatgtccggcagtgggtgccgcgccagaccgcgcgctttgatcttatcatcagcaacccgccttattatgaacaaggggtggaatgcgcaacgccgcagcgagagcaggcgcgttataccaccacgctcgatcacgaagcgttacttaccactgcggctgaatgtattacggaagagggatttttctgcgtggtgctgccagaacagactggcaacatcttcacgcagcaggcgttaagcatgggctggcatttgcgtttacgtaccgacgtagccgaaacggagtcgcgattgcctcatcgggtactgttggcattttccccgcgaacgggggaatgctttagcgatcgactggtgattcgtgggccagaccagctttactctgaagggtacacggcgctgacccaggcgttttatttgttcatgtaa

SEQ ID NO: 74716 - DNA, 1338 bp, Citrobacter koseri
atgactgtaacgactttttccgaacttgaactcgatgaaagcctgctggatgccctccaggataaaggctttactcgcccgaccgccattcaggctgccgccattccgcctgcgctcgatgggcgtgatgtactcggttctgcgccgacaggcaccggtaaaacggcggcatacctgctgccagcgttgcagcacctgctcgacttcccgcgtaaaaaatccgggccgccgcgtattctgatccttacgccgacccgcgaactggcgatgcaggttgccgatcacgcccgtgaactggcgaaacacacccatctggatattgcgacaatcaccggcggcgtggcttatatgaaccatgccgaggtgttcagcgagaaccaggatattgtggtcgccaccacgggtcgcctgctgcaatatattaaagaagaaaactttgactgccgcgcggttgaaacgctgattcttgatgaagccgaccgtatgctggacatgggcttcgcccaggatatcgagcatatcgcaggtgaaacccgctggcgcaaacagaccatgctgttctccgctacgctggaaggcggcgcgattaacgattttgcggaacgtctgctggaagatccggtcgaggtctcagcgaccccgtctacccgcgaacgcaaaaagattcatcaatggtactaccgtgctgatgatattcagcacaaaaccgctttgctggtacacctgttaaaacaacctgaagccacccgttctatcgtcttcgtacgtaaacgtgagcgtgtacatgagctggcaggctggctgcgcgaagcaggcatcaataactgctatctcgaaggcgagatggtacagggtaagcgtaacgaagcgatcaaacgtctgaccgatggccgcgtgaacgtgctgatcgcgaccgacgtcgccgctcgcgggattgatatccctgatgtaagccatgtttttaacttcgatatgccacgcagcagcgatacctatctgcaccgtatcggccgtaccggacgtgcagggcgtaaaggaacggcgatttccctggtagaagcgcatgaccatctgctgctgggaaaagtgggtcgctatattgaagagacgctaaaagcgcgcgtcattgatgaattgcgtccaaccactcgtgcgccgagcgaaaaactgaccggcaagccgtccaagaaagtgctggctaaacgtgctgagaagaaaaaacaagaaaaagagaagccgcgcgtgaagaaacgtcaccgtgataccaaaaacattggtaaacgccgcaagcctgctggtacgggtacggacgcgcagaagcagtccaacgaagagtaa

SEQ ID NO: 74717 - DNA, 384 bp, Citrobacter koseri
atgattacaggtatccagattactaaagccgctaacgacgacctgctgaattctttctggttgctggacagcgaaaaaggcgaagcacgttgcatcgcagcgaaagccggttttgccgaagatgaagtggttgcagtgaacaaactgggtgaaatcgaataccgtgaaattccgatggaagtaaaaccggaagttcgcgttgaaggcggtcagcacctgaacgttaacgttctgcgtcgcgaaacgctggaagatgccgttaagcacccggaaaaatatccgcagctgaccatccgtgtttctggctatgccgtgcgttttaactccctgacgccggaacagcagcgcgacgttatcgctcgtacctttactgaaagcctgtaa

SEQ ID NO: 74718 - DNA, 690 bp, Citrobacter koseri
atggccaccgatttaacctggcacgatgtgctggcagatgagaagcagcagccctattttgttaacacactccataccgttgcgggcgaacgtcagtcaggaatgacagtctatcctccacagaaggatgtatttaacgcgtttcgcttcactgaactcggtgatgtcaaagtggtgattctggggcaagacccttatcacggccctgggcaggcgcatggtctggcgttttctgttcgtccgggtattgccacaccgccttcgctgctgaacatgtataaagaactggaaacgtccataccgggctttacccgccctgctcatgggtatctggagagctgggcgcgtcagggggtattgttattaaataccgtgctgaccgtccgcgcaggccaggcgcattctcacgccagtctgggatgggaaacctttacagacaaagtgatcagccttgttaacgaacatcgtgaaggggtcgtctttttactctggggttcgcacgcacaaaagaaaggggcgattatcgatcgccagcgccattacgtgttgagagcgccgcatccgtcgccgttgtcggcacatcggggattctttggctgtaaccattttgtattggcgaatcagtggctggagcagcacggcgagaagccgattgactggatgccggtattaccggcagagagcgaataa

SEQ ID NO: 74719 - DNA, 1047 bp, Citrobacter koseri
atgaacgatgaattaaagaacaaaagcggcaaggtcaaagtgatgtatgtccgcagtgatgatgactctgataaacgcacccataacccgcgtaccgggaaagggggaggtcgtccaggaaagtctcgtactgacggtggccgtcgccccgcccgcgatgctcgtgatgaaagaagcggtcagattcgcgatcgtaagcgtgaagactcaccgtggcgtaccgtttcccgtgcgccaggcgatgacacgcctgagaaagccgatcacggtggaatcagcggtaaaagttttatcgatcctgaagttttacgtcgccagcgtgcggaagagacccgtgtctacggcgaaaacgcctgtcaggccctgttccagagtcgcccggatgcgattgtccgcgcatggttcattcagagcgtgacccctcgctttaaagaagcgttacgctggatggcggctaaccgcaaagcgtaccacgttgtggatgaagctgaactggcgaaagcctctggaactgagcaccacggcggcgtttgtttcctgattaaaaagcgtaacggtacgaccgttaagcagtgggtaagccaggcggacgcgcaggattgcgtgctggcgctggaagatgtggctaacccgcacaaccttggcggcatgatgcgtagctgtgcgcactttggcgtaaaaggcgtggtggtacaggacgcggcgcttcttgaatccggtgcggcgatccgtacggcggaaggcggcgcggagcatgttcagccgatcacgggcgacagcattgtggatgtgttggatgatttccgtcaggcgggttatacgatcgtcaccacgtccagcgatcagggcaagccgttgtttagtacggcgctgccagcgaaaatggtgctggtgttagggcgtgagctggagtccctgccggaagccgcgcgtgaacctggcgatctgtgcgtgaaaattgatggcactggaaatgttgaaaacctcaacgtctctgtcgcaaccggcgtattgctgggcgaatggtggcgtcagaataaagcataa

SEQ ID NO: 74720 - DNA, 420 bp, Citrobacter koseri
atgaataccgtttgtaccagctgccaggcaatcaaccgcattcccgatgatcgtattcaggatgcggcaaaatgtggacgctgtggtcacgacctgttcgatggagaggtgattaatgcgaccggtgaaacgctggataagctgttgaaagacgatctccctgtggtggtcgatttctgggcaccgtggtgcggcccatgccgtaactttgccccgatttttgaagatgtcgcggaagagcgcagcggtaaggtgcgttttgtgaaagttaacacagaagcggaacgtgaactcagcgcccgtttcggtatccgcagcatcccgaccatcatgatctttaagaacggcgaagtcatcgacatgttaaatggcgcggttcctaaagcgccattcgacagctggctgaacgaatcgctgtaa

SEQ ID NO: 74721 - DNA, 699 bp, Citrobacter koseri
atgactgataacgctgttctccagttacgcgccgaacgcctcgcacgcgccacgcgtccttttcttgccagaggaaaccgcattcgtcgctgtcagcgctgtctgctcccgttgaaactctgcctgtgcgataccctctcaccttctcaggcgacaagccgtttttgtctggtgatgtttgataccgagccaatgaaacccagcaatacggggcgtctgattgccgatattctgccggaaacaacggcctttcaatggtcgcgtaccgaaccgccgcaggcgttgctcgatctggttaacaacccggattatcagccgatggtcgtattccccgcctcctatgccggggaagaacgcgaggtcattttcacgccaccagccggaaaaccgccgctgtttatcatgctcgacggcacctggccggaagcgcgcaaaatgttccgtaaaagcccttatctcgataacctgccggttatttccgttgatttatcgcgtctttccgcctatcacctgcgagaagttcatgccgaagggcagtattgcactgccgaagtggcaatagcgctgctggatctggcgggcgacatggctgcggcaacccatttaggcgatcacttctcactatttaaaacgcgctatctggcaggaaaaacgcaacatcagggaagcgtcacaacagaaacagcagaaagcgtttaa

SEQ ID NO: 74722 - DNA, 2661 bp, Citrobacter koseri
atgagtcagagaggactggaagcactactgcgaccaaaatcgatagcagtgctaggggcgtcgatgaagcccaatcgcgcaggttacctgatgatgcgtaacctgctggcaggaggctttaatggcccggtattacctgtaacgcccgcatggaaagccgtcttaggcgtcctggcctggcccgacgtcgccagtttgccttttacaccggatctcgccgttctgtgcaccaacgccagccgtaatatcgcgttgctggaggcgctgggggaaaaaggctgtaaaacctgcattattttgtcggcgcccgcagcgcagcacgctgaacttctggcatgtgcccaacgctataaaatgcgactactcggcccaaacagcctgggtttactcgccccctggcaagggcttaacgccagtttctctccggttccgatcaaacgtggaaaactcgcgtttatttcgcaatccgccgccgtctccaatacgattctcgactgggcgcaacaacgggagatgggcttttcttattttatcgcgcttggcgacagtctggacattgatgttgatgaactgctggattatctggcgcgcgacagtaaaaccagcgccattttgctctatctcgaacatctgagcgacgcgcgacgctttgtctccgccgcccgtagcgcatcgcgaaataaacccattctggtgattaaaagcggtcgcagcccggcggcgcaacgtttgttaaataccagtgtcggcatggacccggcatgggatgccgccatccagcgtgcggggcttttacgcgtgcaggatactcacgaactcttctcggcggtcgaaacgctgagccatatgcggccattacgtggcgacaggttgatgatcatcagcaatggcgctgcgcccgccgcgctggcgctggatgagctgtggtcgcgcaacggcaagctcgccaccctgagcgaagagacccgacttaagctaagcgaagcactacctgctcacgtcgatatcgccaacccgctggatttgcgtgatgatgccagctgtgaacactacgtcaaaacgctgaatatcttactcgccagccaggattttgatgcgctgatggtgatccactcacccagcgccgccgcaccaggtaccgagagcgcacacgcgctcattgaagcggtaaaacatcatcccagagggaaattcgtcaccatactcaccaactggtgcggcgagttttcctctcaggaagcccgcaaaatgttcagtgaagcgggattacctacctatcgaacaccggaaggcaccatcactgcctttatgcacatggtggaataccggcgtaaccagaagcaattacgggaaaccccggtgttgccgggcaacctgacctcagacacggctcaagcgcataacctgttacagcaggcgattgcagagggcgcaacgtcgctggatacccatgaagttcagcctatcttgcaggcgtatgggttacacacgcttcctacctggattgctggcgacagcgcggaagcagtgcatatcgccgagcaaattggctacccggtagcgttaaaactgcgttcgccggatattccgcataaatcggaagttcagggggtaatgctctatctgcgcacggcaacggaagttcagcaagccgcgaatgccattttcgatcgtgtaaaaatggcctggcctcaggcgcgcattcacggtctgttagtccagagtatggcgaaccgtgccggcgcgcaggaacttcgcgtcgtcgtcgaacacgacccggtctttgggccgctgattatgcttggcgaaggcggcgtagagtggcgacccgaagagcaggccgtcgtcgcgctgccgccgttaaacatgaatctggcgcgctatttggttattcagggaatcaaaagtaaaaaaattcgtggccggagcgcgctacgcccgctggatatcacagggttaagccagctgctggtacaggtctcgaacctgattgtcgattgcccggaaattcagcgtctggatatccatcccctgctggcttctgctggcgagtttaccgcgctggacgtcacgctggatatcgccccttatgatggcgacaacgagagccgactcgctattcgcccctatccgcagcagcttgaagagtgggttgagatgaaaaatggcgaacgttgcctgtttcgccctatcctgccggaagatgagccttatctacagcagttcatttctcaggtaacaaaagaggatttgtattaccgttattttagcgagatcaatgaatttactcatgaagatttagccaacatgacgcagatcgactacgatcgggaaatggcatttgttgccgtgcgccgtattgatcaaactgaagaaatcctcggggtaacgcgcgctatctccgacccggataacattgatgcggaatttgccgtgctggttcgctcagatctcaaagggttaggattaggccggcgattaatggaaaaattgattgcttatacccgagatcacggactgagacgcctgaatggcattacgatgccaaacaatcgcggcatggtggcactggcccgaaagctcgggtttgatgttgatatccagctcgaagaggggattgttgggctgacgctgaatctggcccaatacgaggaatcgtga

SEQ ID NO: 74723 - DNA, 1356 bp, Citrobacter koseri
atgttgtcaaaatttaagcgtaataaacatcaacaacaccttgcccaactacctaagatctctcagccagttgatgatgtagatttcttttatgctcccgctaatttcagggagactctgctggagaagatagccagcgcgacgcagcgtatttgcattattgccctgtatcttgaacaggatgacggcggcaagggcatactcgacgcgctctatgaggctaaacggcagcgtcctgagctggatgttcgggtacttgtcgactggcaccgcgctcagcgtgggcgtattggcgcagccgcgtccaatactaacgctgactggtattgccgaatggcgcaagaaaacccaggcatcgatattcctgtctacggcgtgccgattaacacgcgtgaagcgcttggcgtactgcattttaaaggctttatcattgatgatagcgtcctttacagcggcgccagcctgaacgacgtctatctgcatcagcatgataaatatcgttatgatcgttaccagttgattcgtaatgcaaagatggccgacatcatgtatgaatgggtcacgcagaatctgcttaacggtcgcggcgtaaatcgcctggacagtgcccagcgtccgaaaagcccggagattaaaaacgacattcgtttgtatcgccaggaattgcgcgatgcgtcataccatttccagggcgatgccgacaacgagcaactttccgttacgccactggttggactgggaaaatcgagcctgctgaacaagaccattttccatcttatgccctgtgcagagcataagctcacaatttgcacaccttatttcaacttgcctgcactgctggttcgcaacatcatccaactgctgcgcgaagggaaaaaggttgagattatcgtgggtgataaaaccgccaacgacttttatatccctgaggatgagccgtttaaaatcatcggcgcgcttccctatctctacgagattaacctgcgtcgcttcctcagccgcttgcagtattacgtcaacaccgatcagctcgtagtgcgtttgtggaaagatgacgacaatacttatcacctgaaaggaatgtgggttgatgataagtggatgctgctcaccgggaacaaccttaacccgcgagcatggcgtctggatctggaaaacgcaattctgattcacgatccaaaacaggaacttgctccccagagagagaaagagctggagcttatccgcactcacaccacggttgttaagcattaccgcgatctacaaagcatcgctgactatccggtcaaagtccgtaagctcatccgcagactccgtcgtattcgaatcgacagattaatcagccgtattctgtaa

SEQ ID NO: 74724 - DNA, 273 bp, Citrobacter koseri
atgtccaatgacagctggagcgggcaggataaagcgcaacacttcattgcatcagccatgctttccgccgccgggaatgagtatgcccggcatcagggaatgagccacgatcgcagtgcaaccgttgggctgctgttctccattagtctcggtgcgtcaaaagagatgtgggacagccgccccggagggagcggctggagctggaaagatttcgcctgggatgtcgcaggcgcaaccacgggttacgccgtctggcaaatggcgcggaactag

SEQ ID NO: 74725 - DNA, 1299 bp, Citrobacter koseri
atgactgaaagcagtgtaactgtaaacgggtcgctggcaagcagtgacacccgtcgtcgcgtatgggcaattgtgggggcatcatcagggaatctggtcgagtggtttgatttctatgtttattccttctgctctctctactttgcgcacatcttttttccttcgggaaataccaccactcagcttttacagaccgccggagttttcgccgcaggcttcctgatgcgtcccattggcggctggctttttggtcggattgccgataagcatggtcgtaagaaatcaatgcttctctctgtttgcatgatgtgtatgggctcgttagtcattgcctgcctgccggggtatgccacgatcggcacctgggctccggctcttctgctgttggctcgtctgtttcaggggctgtctgttggaggtgaatacggaaccagcgcgacctatatgagtgaagtggctgttgaaggccgcaaaggtttttacgcatcgttccagtatgtcactctgatcggtggtcagttactggcactgctggttgtggttatcttgcagcaaacgctggaggaatcttccctcagagaatggggatggcgtattccttttgcattgggcgccgtactggccgttgtcgcgctttggttgcgtcgacagttggatgaaacctcaaaacaagaaacccgcgcgctgaaagaggctggatcgctcaaaggactatggcgtaaccgtaaagcgtttattatggtactgggatttaccgctgcgggttcgctgtgtttctataccttcacaacctatatgcagaagtatctggtgaataccgccggtatgcatgccaatgtcgccagcggaatcatgacggcggcgctgtttgtctacatgctaattcaacccctgtttggcgctctctcagataaaatcggccgacggacatcaatgctctgctttggcgctctggctgcgctattcaccgtacctattctgtcagcattacagaatgtcacttcaccttacgcagcctttgggttggtgatgtgcgccctgttgatcgtgagtttctacacctcaatcagtgggatcctgaaggcagaaatgtttcctgcccaggtgcgggcattgggggtagggctttcttatgcggtggcgaatgcgctgttcggcggctctgcggaatatgttgcgctgtctctgaagtccgttggtatggagacatcattcttctggtatgtgaccattatggctatcgtggcatttctggtgtcgctgatgctgcaccgcaagggaaaagggttacgtctctag

SEQ ID NO: 74726 - DNA, 1281 bp, Citrobacter koseri
atgagtgatgttcagtcgaatgtgaaaccgctgacgttgacgaccgggcgggtgatttttgctattgccggcgtctatgtgacgcagagcctggtatcggcgctgtctatgcagtccttacccgcgctggtgcgcgctgctggcggttcgctggcgcttgccggtgcgacaaccctgttcatgctgccctgggcgctgaagtttatttgggcgccgtggatcgagcgctggcggcttccgcccggtagccaggaacgccgttcgcggatgttaatcctgcgtggtcaggtcgcgttagcggcgatcctgatgattgccgcagcgattggctggtttgggcgagaagggggatttcctgatacgcaaatcgtcgcgttatttgttctgtttatggtggcaggcacggtcgcctccaccattgatatcgccagcgacggcttttgcgtcgatcaactgacccgcgcgggttacggctggggaaacagcgtgcaggtcggcggcagctatctgggaatgatgtgcggcggcggggtgtttctgatgctgtcggcggcatccggctggcctgtcgccatgctgatgatggcggtgctgattatggcgctgtcattcccgctgtggcgcattacggagccgacgcgaacagcgactatcccgcatgttccggcattaggttatgcgctacggagaaaacaggcgcgcctgggcttactgctggtattgatgctgaattcaggcatgcggtttgtgctgcctcttctggcgccgctgttattggatcatgggttaagcatgtccgcgttgggcgcgctgttcagcggcggcaatattgcagcgggcatagcaggaacgctggccggtggattactgatgaaatacacctcacccggcagagcgctgttgacggcttatggcgtccaggggatcgcgctgctggcggtggtgatgacgttcatgatggcgccgggtcatctgttgctgccgattctccagtgtctggtcattgtccagtccatttcgctggcctgcgcgctggtctgtctttacgccacgctgatgtcgctttcatcgcctttgcaggccggtgtcgacttcaccctctttcaatgtactgacgcggcaatcgccattctggcaggcgttatcggcggcgttgttgctcaacattttggctatgcggcctgcttcctgtttgccggggcattcacgttgctggcggcgtgggttgcttatatccggctgcattcggcaagaaaactgatgaccagcgcaattgattga

SEQ ID NO: 74727 - DNA, 1803 bp, Citrobacter koseri
atgaaagacaataatcctgcggataacctggcctggcgcgtcaactggcgccagcttatctccagcgttggcagtcaggccaggatgctgcgacgcagtatgctggcgctgttgctggcggcattcatgcaggggatcgcctttgcctgtctttatccgatcattgatgcgctgttacggggagacgcgccgcaacttcttaactgggctatggccttcagcgtcgccgcaattgtgacgctggtgctacgctggtatggcctgggctttgaataccgtggtcatctggcgcaggccacccatgagttgcgcctgcgacttggcgagcagttacgccgcgtgccgctggagaagctccagcgcggcagggcgggtgaaatgaacgccttgctgctgggcagcgtggatgaaaacctcaattatgttattgcgatagccaatattttgctgctcaccattgtcacgccgctgacggcgtcgctggcgacattgtggatagactggcggctggggctggtgatgttgctgatcttccctctgctggtgccgttttattactggcgccgcccggcgatgcggcgacaaatgcagacgctgggggaagcgcaccagcgactgagcggcgatatcgttgaatttgctcaggggatgatggtattgcgcacctgcggcagcgatgccgataaaagccgggcgttgctggcacatttcaatgcgctggaaaacttacagacccgcactcaccgccagggcgctggcgcgacgatgctgatcgccagcgtcgtggagttgggcctacaggtggtggtgttatccgggatcgtctgggtggtgacgggcactctgaacctcgcctttctgattgccgccgtcgcgatgattatgcgctttgcagaaccgatggcgatgtttatcagctacacctcggttgtggaactgatcgccagcgccctgcaacggattgagcggtttatggcgatagcaccgcttcccgtcgcagcgcaaagcgagatgccggaacgttacgatatccgctttgacaacgtcagctatcgctacgaagaaggcgacggccacgcgcttaatcatgtttctttgacgttcccggcagccagtatgagcgcgctggtgggcgcctccggcgcaggcaaaaccacggtcactaaactgttaatgcgctatgccgatccgcagcaagggcagatttctattggcggcgtcgatattcgccgcctgacgccggaacagctcaatagcctgatttctgttgttttccaggatgtctggctgtttgatgacacgctgctggcgaatatccgtatcgcgcgcccacaggcgacgcgacaggaggtggaagaggccgcccgcgcggcgcagtgccttgagtttatttcccgtcttccgcaaggctggctgacgccaatgggggagatgggcggccagctatcgggcggcgagcgccagcggatttccattgccagagcgttattgaaaaacgcgccggtcgtcattctcgatgaaccgaccgccgcgctggatattgaaagcgagctggcggtgcaaaaagcgatcgataacctggtccacaaccggacggtgattatcattgcccaccgtttatccaccattgccggggccggaaacattctggtgatggaagagggacaggtggtggagcagggtactcatgcgcaattgatctcccgtcatggacgttatcaggcactgtggcaggcgcaaatggccgcgcgcgtgtggcgcgacgacggggtttccgcgtctggagtgtgggaacatgagtga

SEQ ID NO: 74728 - DNA, 1803 bp, Citrobacter koseri
atgtcatctcaatcatccaatactgaatcgctgtcccgatttcctctctggcaggtgattacaccggttcgcaggaaggttattttagctatggcgctggcggggctggcggcattaaccagcctgggggcgctcctttttctggcatggagcctgcgcgacattcgcgcgacgcctgacgctattccggcctggccgatgggcggcgtgatcggctgcgtggtcttaacttttgttctgcgcttgcaggcgttcaacatctctcattacgcggcttttcatctggagaacattctgcgcagcaggttagcccgtaaagcattgcagcttccgcctggcgtgttacagcaaatgggcagcgggtcagtagcgaaagtgatgctggatgacgtgaagtcgttacatatttttgtggccgacagcacgccgctctatgcccgcgcgatcatcatgccgctggcgacaatcgttatcttgttctggctggactggcggctggcaatcgcgacgctgggggtactggcgtttggatcggttgttctcgtgctcgcccgccagcgctcggaagatatggctcagcgttatcataaggcgcgcgagcaggttagcgcggcggttattgagttcgtgcaggccatgcccgtggtgagaacgtttgatagcggcagcaccagttttttacgctatcaacgcgctcttgaagagtgggtcgatgtgctcaaaacctggtatcgcaaagccggtttttcagcgcgtttttccttctcgattctgaatcctctcccgaccctgtttgtcctgatctggtcgggatacggcctgttgcactatggcagtctcgattttatcgcgtgggtggccgttttactgctgggcagcggaatggccgaagccgtaatgccaatgatgatgctcaataacctggtcgcgcaaacgcgtttaagcattcaacgtatttatcaggttctcgcgatgccggagttatcgctgccgctgtccgaccagcagccgcaagaggcgagcattacctttgagcaggtgagctttcattatccgcaagcgcgtactggcgccgcgttgcaggaggtgagctttcatgtgcctgccgggcaaattgtggcgctggtcgggccaagcggcgccggaaaaagcaccgtggcgcgcttgctgctgcgttacgccgacccggacaaaggccatatccgtattggcggcgtggatctgcgcgatatgcagacggacaccctgatgaagcaactctcgtttgtgtttcaggacaacttcctttttgccgacacgatagccaataacattcgtctgggcgcgccggatacgccgctggaggcggtaatagcggcggccagagtggcgcaggcccatgattttattagcgcgctgccagaaggttacaacacgcgagtcggggaacgcggggtatttctctccggcggccagcggcagcgcatcactatcgccagggcgcttttgcaggatcgccccatcctggtgcttgatgaggcgacggcgtttgctgacccggaaaacgaagcggcgcttatcaaggcgctcgcggcggccatgcgcggccggacggtcatcatggtcgcgcatcgtctttcaatggtgactcaggccgatgtgatattgctgttttccgacggacagctcagggaaatggggaaccatacgcaactgttggcgcagggcggcctgtatcaacggctctggcaacactatcagcaggcgcagcattgggtgccgggtggaacacaggaagaggtggtggaaaatgaaagacaataa

SEQ ID NO: 74729 - DNA, 960 bp, Citrobacter koseri
atgacggagtcaccgcaaacgcaatctgaaatctctattcaccagttggtggtcgggaaacctgcaaacgatggcaatattcctgctcagtgtgaactgctgcgctgttcgttgcaggaaggtatggatattttgctctggaggggccattttgcgcggcctgagacgttgcagctacacgacgatctgggcaggattaacttctcgtgcatcctggaaggcacatcgcgctttgcgattcagggactccggcgccacaccgactgggagcttgcgcgcaatcgccattacattacccatacgccagactgccgcggcagcgcctcctattgtggccgattcgagagcattaccctctccttcagccctgaaactctcgcgctgtgggtaccggatattagcgcggtcattaagaataagatcgactcccactgctgttgccagcagcagcgttgtaatgctgaaacccacttaacggctcaggccttgcgtcacgcgctgatgcgcatgcacggcggcttcagccatgaacaaaagccgtcgacgctatggttgcaggggcaaagtctggtcatgctcagtctggtgctggatgaacatcgcgaagacgccagttgcctctcctgccacttcaacccgatggaacgccagaaactgctgcgggcgaaggatctgctgctggctgatctgacgcaagcgccgggcgtcgcggagctggccagagagtccggtctgagcgttctcaaaattaagcgaggcttccgcgttctgttcaacaacagcgtctatggcctgtttcaggctgaacgaatgcaggaagccagaagacgcctggctaacggcaatacctccgtcatgacggtggcggccgatctgggctatgccaacgccagccatttctctgccgccttccagaaacagtttggcgtaaccccttcgacctttaaacgcgtgatgtaa

SEQ ID NO: 74730 - DNA, 4575 bp, Citrobacter koseri
atgatttctggcgcaccatctcaggattcgctgttaccggacaaccgccacgcggctgattaccaacaattacgcgagcggcttatacaggaactgaatttaacgccgcagcagttacatgaagagagcaatctgatccaggctggcctggattcaataagattgatgagatggttacactggtttcgtaaaaatggctaccgccttacccttcgcgagctgtatgccgcccccacgctggcggcatggaaccagttaatgctcagccggtcgccggagaacgcggaagaagaaacgccgcccgacgaatcatcctggccgaatatgaccgaaagtacccccttcccattgacgccggtacagcacgcctacctgacgggccgcatgccggggcagacgcttggcggcgtgggttgccacctgtatcaggagtttgaaggccattgtctgacggcgtcgcagctggagcaggccatcacgaccttgctgcaacgccacccaatgctgcatatcgcctttcgccccgacgggcagcaggtctggctgccgcaaccttactggaacggcgtcaccgttcatgatttacgccataacgacgctgaaagccgccaggcctatctggacgcgctacgccagcgcctgagccaccgtcttttacgcgtggagatcggcgaaacgtttgattttcagctgacgctcttgccggacaatcgccaccgcctccatgtcaatattgacctgctgattatggatgcctccagctttacgcttttcttcgatgagcttaacgccctgctgaccggagaatcgctgtcggctatcgacacccgctatgatttccgttcgtatttgctgcaccagcagaagatcaatcaaccactgagagacgacgcgcgcgcttactggctggcgaaagcatcgacgcttccccccgcgcccgtcttgccgctggcctgcgaacccgccacgctacgtgaagtccgtaatacccgacgccgcatgattgtcccggcaacacgctggcacgcctttagcaaccgggccggcgagtatggcgtgacgccgacaatggcgctggcgacctgtttttctgccgtgctggctcgctggggcggcctgacgcgtctgctgcttaacatcaccttattcgaccgccagccgctgcacccggcggttggcgcgatgcttgccgacttcaccaatattcttctgctggataccgcctgcgacggcgataccgtcagcaatctggcgcgtaaaaaccagctcacgtttacggaggactgggagcatcgccactggtccggcgtcgagctactccgtgaactcaaacgccagcagcgctacccccacggcgccccggtggtatttaccagcaatctggggcgttccctctacagcagccgcgcagaatcgccgttgggcgagccggaatggggcatctcgcaaacgccgcaggtctggatagatcatctggcgttcgagcatcacggcgaggtctggctgcaatgggacagcaacgacgcgctgttccctccggcgttagtcgaaacattgttcgacgcctactgccagttgattaaccaactctgcgatgacgaaagcgcctggcaaaagccgttcgcagatatgatgcccgccagccagcgcgcgatacgcgaacgggtcaacgccaccggcgcccccattcccgaaggcttgctgcatgaaggcattttccgtatcgctctgcaacagccgcaggcgctggcggtaacggacatgcgttatcagtggaattatcatgagctgacagactatgcccgccgttgcgcgggcaggttaatcgagtgcggggttcagcccggcgataatgtggctatcacgatgtcgaaaggcgcaggacaacttgttgcggttctggccgtcctgctggccggggcggtttacgttccggtttcgctggaccagcctgccgcacggcgcgagaaaatctacgctgacgccagcgtccggctggtgctcatttgccagcacgacgccagcgccgggtcagacgatattcccgtccttgcctggcagcaggccattgaggcggagccgatcgtcaacccggtggtacgcgcccccacgcaaccggcctacattatctacacctccggctctaccggcacgccgaaaggggtagtcatttctcaccggggagcgctcaacacctgttgcgatatcaatacccgctatcaggttggcccgcatgacagggtgctggccctctccgccctgcattttgatttatcggtttacgacatttttggcgtactgcgcgcgggcggcgcgctggtgatggtgatggaaaatcaacggcgcgatcctcacgcatggtgtgagctgatccagcgccatcaggtcacgctctggaacagcgtcccggcgctgttcgatatgctgctgacctggtgtgaaggcttcgccgacgccacgccggaaaacctgcgcgcagtgatgctttccggcgactggatcgggcttgacctccccgcccgttatcgggccttccggccacaaggacaatttatcgcgatgggcggcgccaccgaggcgtctatctggtctaacgcctgcgaaattcacgacgtccccgcccactggcgctccatcccttacggttttccgctagccaaccaacgctaccgggtggtggatgaacggggccgggactgccctgactgggtgccgggcgaattatggattggcggtatcggggtcgcggaaggctatttcaacgaccccctgcgcagcgagcagcaatttttgacgctcccggacgagcgctggtatcgcaccggcgatctcggctgctactggccagacggcacaatcgagttcctcggtcgtcgcgacaagcaggtcaaagtcggaggatatcgcatcgagctgggcgaaatcgaaagcgcgctcagccagctggcgggggtgaaacaagcaaccgttctggcgatcggcgaaaaagaaaaaacgctggcggcatacgttgttcctcagggcgaggctttttgcgttaccgatcaccggaacccggcactgccgcaggcgtggcacacgcttgcgggaacgttgccctgttgcgccatctcgccagagatctccgcagaacaggtagccgatttccttcagcatcgcctgttaaaactaaagccgggtcacaccgctggcgccgatcctctccccctgatgaactcactcgctatccagccgcgctggcaggccgtggtggaacgctggttagcatttctggtgacgcaacggcgactgaagcccgctgctgaaggttatcaggtctgcgctggtgaagaacgcgaggatgagcacccgcacttcagcggacatgatttaacgttatcgcaaattcttcgcggcgcccgtgacgaactgtcgttactgaacgacgcgcagtggtcgccggaaagcctggccttcaaccatccggccagcgccccgtatattcaggaactggcgacaatttgccaacagcttgcacagcgcttacagcgcccgatacgcctgcttgaggtgggaacccgcactggccgcgccgcagaatcgctgttagcacagctcaacgccggacagattgagtatgtcgggcttgagcagagccaggagatgctgctgagcgcccggcagaggctcgccccctggcctggcgcccgtctgtccctctggaatgcagacacgctggcggcgcacgctcactcggcggacattatctggcttaataacgccctgcatcgtctgctgccggaagatcccgggctccttgcgacattacaacagcttgccgttcccggcgcgctgctctacgtgatggagtttcgccagttaacgccgtccgccctgctcagcacgctcctgttaaccaatgggcagccggaggccttgctgcataacagcgccgactgggcggcattatttagcgcggccgccttcaactgtcagcatggcgatgaggtcgcggggttacaacgcttcctcgtacaatgtcctgacaggcaggtgcgccgcgatccccgtcaacttcaggccgccctcgctggacgtctgccggggtggatggtgccgcaacggatcgtcttcctcgacgccttaccgctgacggctaatgggaaaattgactaccaggcgctgaagcgtcgtcatacccctgaagcggaaaacccggccgaagcggatttaccccagggcgacattgaaaaacaggttgccgccctctggcagcaactcttatcaactggcaatgtcaccagagaaaccgacttcttccagcaaggcggcgatagcctgctggcgacccgtctgaccgggcaacttcatcaggcaggttatgaagcgcaattaagcgacctgtttaatcatccccggctggcggattttgccgccacgctgcggaaaaccgacgtcccggtcgaacaaccattcgtccactcccctgaagatcgctaccagccctttgcgcttaccgacgtgcagcaggcttacctggtggggcgtcagccgggctttgccctgggcggcgtcggctcacatttctttgtttaa

SEQ ID NO: 74731 - DNA, 1464 bp, Citrobacter koseri
atgctgcgcgccatcgtgcgtgatggacagcaacaggtgctcgaacagacgcccccctgggtgatacccgcacacaccctccatacgcctgaagaggcgttgcgggtgcgcgaaaaactggcgcatcaggtactcaaccccgaagtgtggccggtattcgatctccaggtcggatacgtggacgggatgcctgcccgcctgtggctgtgtctggataacctgttgcttgacggtctgagcatgcagatcctgctggcggagctggagcacggctaccgctacccgcaacagctgcttccgccgctgcccgtcaccttcagggattatctgcaacaaccctcgctacagtcgcccaatccagattctctggcatggtggcaggcgcagcttgatgatattcctccggcgcctgcgttgccgctgcgctgcttgcctcaggaggttgaaacaccgcgcttcgcccgcctgaacggcgcgctggacagcacgcgctggcatcggctgaaaaaacgggcggctgacgcccatctcaccccgtcggccgtactgttgtcggtgtggtcaacggttctctctgcatggagtgcacagcctgagttcacgcttaaccttacgcttttcgacaggcgaccgctgcacccgcaaatcaaccagattctgggcgatttcacctcgctgatgttgctgagctggcatcccggcgaaagctggctgcacagcgcgcagtcactacagcagcggctgagccagaacctcaaccaccgcgatgtgtcggccatccgcgtgatgcgtcaactggcgcaacggcaaaacgtgccagccgttccgatgcccgtcgtctttaccagcgcgctgggctttgagcaggataacttcctcgcccggcgtaatctgctcaaaccggtctggggcatctcccagacgccgcaggtctggctcgatcaccaggtttatgaatccgaaggcgaactgcgctttaactgggattttgtcgccgcgctgtttcctgccgggcaggtggagcgccagtttgaacaatattgcgcattgctaaaccgaatggccgaggatgaaagcggctggcaactgccgctcgccgcgctggtgcctcccgttaaacacgcagggcaatgcgcagagcgctcaccgcgcgtatgccctgagcactctcagccacacattgcggcggacgagagcaccgtcagcctgatttgcgacgccttccgcgaggtggttggcgagtctgtcacgcccgcagaaaacttctttgaggcgggcgcaacgtcgctgaatctggtgcaactgcacgttttgttacaacgtcacgaattttccaccctgacgttgcttgacctcttcacccacccttctcctgctgccctggccgattatctggccggcgtcgccacggtggagaaaacaaaacgtcctcgccctgttcgccgtcgtcagcggcggatatag

SEQ ID NO: 74732 - DNA, 9492 bp, Citrobacter koseri
atggataacttgcgcttctcttctgcgccgacagcagattccattgatgcatcgatcgctcaacactacccggactgcgaacctgtcgcggttatcggctacgcctgccattttcctgaatcgccggatggcgaaacgttctggcaaaacctgctggaaggtcgtgaatgcagccgacgctttacgcgcgaagagctactggccgtcggtctggatgccgccatcattgacgatcctcattatgtcaatatcggtacggtgttagacaacgccgactgcttcgacgccaccctgtttggctattcgcgacaggaagcggagtcgatggacccgcagcagcgcctgtttttgcaggcggtctggcatgcgctggaacatgccggttatgcccccggcgccgtcccccataagaccggcgttttcgcctcttcccggatgagtacctaccccggtcgcgaagcattgaacgtgacagaagtcgcgcaggtaaagggtctgcaatctctgatgggcaatgataaagactatattgccacccgcgccgcgtacaaactcaacctgcacggcccggcgttatcggtacagaccgcctgctccagctcgctggttgccgtgcatctggcctgtgaaagcctgcgcgcaggcgaatccgatatggcggttgccggcggcgtggcgctctctttccctcagcaggcgggctaccgctaccagcccggaatgattttctctcctgatggtcactgtcgtccctttgacgcctcggctgagggcacctgggccggtaacggtctcggctgcgtggtgctgcgtcgcctgagagacgcgctgctgtcaggcgatccgattatctcggtgatcctctccagcgcggtcaacaacgacggcaacagaaaggtcggctataccgccccttccgtcgcagggcaacaggcggtcatcgaagaggcgttaatgctggcggccatcgacgacaggcaggtaggttacattgaaacccacggcaccggcacaccgctgggcgacgcgattgaaattgaagcgttacgcaacgtctatgcgcctcgcccgcaggatcagcgctgtgcgctcggttccgtgaaaagtaatatgggccatctggataccgcagcgggcattgccggactgctgaaaaccgttctggcagtcagccgcgggcaaattcctcccttactgaattttcacacccccaacccggcgctgaaacttgaagagagcccctttaccataccggtgtcggcacaggcatggcaggacgaaatgcgctatgcgggcgtctcctcctttggtattggcggcaccaactgccatatgatcgtcgcctcgctgcccgacgcgctcaacgcgcgcctccccaatacggatagcggcagaaaaagtaccgcgctgctgctcagcgccgccagcgacagcgcgttgcggcggctggcgacggattatgccggggcgctgagagagaatgcggatgccagctctctggccttcacagccctgcacgcgcgccgtctcgatctccccttccgcctggcggcgccattaaaccgtgaaaccgccgaggcgctcagcgcctgggccggtgagaaatcgggggcgctggtttacagcggccacggcgccagcggcaagcaggtgtggctgtttaccggccagggctcgcactggcgcactatgggtcaaacgatgtaccagcactcaacggcgtttgccgacacgctggatcgctgtttttccgcctgtagcgaaatgctcacgccgtcactgcgcgaagcgatgtttaaccccgattcggcgcaactggacaatatggcctgggcgcagccggcgattgtcgcgtttgaaatcgcgatggcggcgcactggcgtgctgaaggactgaagccagacttcgccattgggcattccgtcggtgaatttgccgctgctgttgtctgcggacactatacgattgaacaggtcatgccactggtttgtcggcgcggcgcgctaatgcagcagtgcgcaagcggcgcgatggtggcggtatttgcagacgaagacacgctgatgccgctggctcgccagtttgagctggatctcgccgccaataacggtacgcaacatacggtattttccgggccggaagcccgtctcgcagtattttgcgccacgctctcgcagcatgacattaactatcgtcgcctgagcgtaaccggtgcggcgcactccgctttactggagccgatactcgatcggttccaggacgcctgcgcgggactgcacgcggagccggggcaaataccgattatttccacgctcaccgccgacgtcattgatgagtcaacgctcaaccaggcggattactggcgccgacacatgcgccagccggtgcgttttatccagagtattcaggtggcgcatcagctcggcgcccgcgtttttctggagatggggcccgatgcccagttggttgcttgcgggcagcgcgaataccgcgataacgcatactggatagccagcgcccggcgtaacaaagaggcgagcgatgtcctcaatcaggccctgctccagctttacgctgccggcgtcgccctaccgtgggccgacctgctggcgggcgatggacaacgtatcgctgcgccatgttatccgtttgatactgagcgttactggaaagagcgcgtctccccggcctgcgagcctgccgacgcagcgctgtctgccgggctggaggtggcgagtcgcgccgcgacagcgctcgatctccctcgcctggaagcgcttaaacagtgcgccacgcgactgcacgccatctacgtcgatcaactggtacaacgctgtaccggcgatgccattgagaacggcgtggacgccatgaccatcatgcgccgtggacgtctgctgccccgctaccagcagctactccagcgcctgctgaataactgcgtggtcgacggcgattaccgctgcaccgacgggcgatacgtccgcgcccgccccattgaacatcaacagcgggaatcactgctgacggaacttgccggttattgtgaaggttttcaggctattcccgacaccatcgcccgtgccggcgatcggttatatgaaatgatgagcggcgcggaagaaccggtggcgattatcttcccgcaaagcgcctccgacggcgtggaagtgctgtatcaggaattcagctttggccgctatttcaaccaaatcgccgccggggtattacgcggcattgtccagacgcgtcagccccgccagccgttgcgtattcttgaagttggcggcggaaccggcggcaccaccgcgtggctgctgccggaactcaacggcgttccggcactggagtaccatttcaccgatatctcggcgctgttcacccgtcgcgcccagcagaaattcgccgactatgattttgtgaagtatagcgagctggatctcgaaaaagaggcgcagtctcagggtttccaggcacagtcttacgatcttatcgtggcagcgaacgtgattcacgccacccgccatattggccgcacgctcgataatctgcgccccctgctcaagccgggcgggcgcctgctgatgcgcgaaatcacccagccaatgcgtctgtttgacttcgttttcggcccgctggttcttccgctacaggatctcgacgcccgcgaaggtgagttattcctcaccaccgctcagtggcaacaacagtgccgccacgccggattcagcaaagtggcgtggctaccgcaggatggcagcccgaccgccgggatgagcgaacatatcattctcgccacgctgcccggtcaggcggttagcgccgtaacattcaccgcgccatcagaacccgtgttggggcaggcgctgacggataacggtgattatctcgccgactggtctgattgcgcaggtcagcccgaacggtttaacgcccgctggcaggaggcctggcgtctgctttcacagcgtcatggcgacgctctgcctgtggaaccgccccccgtcgccgccccggagtggctggggaaggttcgcttaagctggcaaaacgaagccttttcccgcggtcagatgcgcgttgaagcccgtcatcctgctggcgagtggctgccgctatcgcccgccgcgcctcttcctgcgccgcagacgcattatcaatggcgctggacgcccctcaacgtcgccagcattgaccaaccgcttaccttcagcttcagcgccggtacgcttgcgcgcagcgacgagctggcgcaatacggcatcattcacgatccgcacgcctcttcgcgactgatgattgttgaggagagcgaggatacgctggccttagcggagaaagtgatagcagcgctcaccgccagcgcagccggattgattgtggttactcgccgcgcgtggcgagtcgaggaaaatgaagcactctctgcatcccatcacgcgctatgggccttgcttcgcgtcgcggccaacgaacagccggaacggttgcttgccgccatcgatctcgccgaaaaccccccgtgggaaacgctgcatcaagggttgagcgcagtctcactatcacagcgctggctcgccgcacggggtgacaccctttggctcccttcactggcgcccaatacgggatgcgccgctgaattaccggcaaacgtgtttaccggcgatagccgctggcatctggtgaccggagcgtttggcggattaggccgccttgccgtgaactggctcagagaaaaaggggcgcgacgcatcgccctgctggcgccgcgcgtggatgagtcatggctacgcgatgcggagggcgggcagacgcgcgtctgccgttgtgatgtgggcgatgccgggcaactggccacggttcttgacgatctggcggccaacggcggcattgccggagcgattcatgccgctggcgtattggctgacgcgcccttgctggagcttgacgaccaccagctggccaccgttttcgcggtaaaagcgcaggcggcaagccagctgttgcaaaccctgcgcaaccacgacggacgctatcttattctctactcttccgctgccgccaccctcggcgcgccgggtcagagcgcccatgcgctggcctgcggctacctggacgggctggcccagcagttttccacccttgatgcgccgaaaacgctctctgtcgcctggggcgcatggggagaaagcggtcgggcggccacgccggaaatgctggcgacgctcgccagccgtggtatgggcgcgttaagcgatgccgaaggctgctggcacctggaacaggcggtgatgcgcggcgccccgtggcgactggcgatgcgcgtttttaccgacaaaatgcccccgttacaacaggctctgtttaacatcagcgccacagaaaaagccgcaacgcctgtcattcctcctgctgatgacaacgcctttaacggcagcctgagcgatgaaacggcggtgatggcatggctgaaaaagcggattgcggttcagctaaggctgagcgatccggcgtcactgcgtccaaaccaggatctgttgcaactcggcatggactcgctgctcttccttgaactcagtagcgatattcagcactacctgggcgtacgcatcaatgcggaacgggcgtggcaggatctgtctcctcatggactcacgcagcttatctgttctaagccagagacgacgcctgccgcttcgcagccggaagtgttgcagcacgacgccgacgagcgttatgcgcccttccctttgacgcccattcagcacgcctactggctggggcgaacccacctcattggctatggcggcgtcgcctgtcacgttctgtttgagtgggataaacgccacgatgagttcgatctcgccatactggagaacgcatggaaccagcttatcgcacgccacgacatgttgcgcatggtggttgatgccgacgggcagcagcgagtcctggcgacaacgccggagtatcacatccagcgcgacgatctgcgcgcgctttccccggaagaacagcgcatcgcgctggaaaaacggcggcatgaactgagctatcgcgttttgcctgccgaccagtggcctctttttgagctggtggtcagcgaaatcgacgattgccattaccgcctgcacatgaacctcgaccttttgcagttcgatgtgcagagttttaaagtcatgatggacgatctggcgcaggtctggcgcggtgaaacgctggcgccgctcgctatcaccttccgtgattatgtaatggctgaacaggcgcgccgacagacatcggcatggcacgatgcctgggattactggcaggaaaaactgccgcaattgcctttagcgccagagctgccggtggttgaaacacccccggaaacgccacacttcaccaccttcaaatcgacgatcggcaagacagaatggcaggccgtgaaacagcgctggcagcagcaaggcgtcacaccgtctgccgcgctgctcacgctgtttgccgccacccttgagcgctggagccgcaccacggcatttacgctgaacctgacgttcttcaatcgccagccgatccatccgcaaatcaaccagttgattggtgattttacctccgtcacgctggttgattttaacttctcagcgccggtgacgttgcaagagcagatgcaacagacccaacagcgcctctggcaaaacatggcgcacagtgaaatgaacggtgttgaggtgatccgtgagctgggccgcctgcgcgggtcacaacgtcaaccgctaatgccggtggtgtttaccagtatgctggggatgacgctggaaggcatgactatcgatcaggcgatgagccatctgttcggcgaaccctgctatgtgttcacgcaaacgccgcaggtctggctggatcatcaggtcatggagagcgacggcgagttgatgtttagctggtactgcatggacaacgtgctggaacccggcgctgccgaggcgatgtttaatgactattgcgccatcctgcaagccgtcatcgccgcccctgaaagcctgaagactctcgccagcggcatcgccgggcacattccccgtcgacgctggccgctgaacgcgcaggcggactacgacctgcgggatattgagcaggcgacgctcgaataccccggcatccggcaggccagagcggaaataaccgaacagggcgcgttgacgctggatatcgtaatggccgacgatccgtcgccatcagcggcgacgcctgatgagcacgaactcacccaactggcgctgccgttgcctgagcaggcgcagcttgatgagctggaggcgacctggcgctggctggaggcgcgtgcgctacaggggatcgcggctacgctaaatcgtcacggcctgtttaccacgccggagatcgcccatcgctttagcgcaatagtacaggcgctgtccgcgcaagcgtctcaccagcgtctgctgcgccagtggctacagtgtctgacggaaagagagtggttaatccgcgagggtgaaagctggcgctgccgcgttccgctcagcgagattcctgagcctcaggaagcgtgcccgccaagccaatggagccaggcgctggcgcagtatctggaaacctgcatcgcccggcacgacgccctcttctccgggcagtgttctccgctggaattgctgttcaacgagcagcatcgcgtgactgacgcgctgtatcgcgacaaccccgccagcgcctgtctgaatcgctataccgcgcagattgccgccttgtgcggcgcagaacggattctggaggttggcgccggaaccgcagccactaccgcgccggtgctgaaggccacgcggaacacgcgacagtcgtaccacttcacggacgtctccgcgcagttcctcaatgacgccagagcccgtttccatgatgaatcgcgggtgtcttatgccttgttcgacatcaaccagccgctggatttcaccgcccacccggaggcgggttacgacctgatcgttgccgtcaatgtgctccacgacgccagccatgtcgtccagacgttgcgcagattaaaactgttgctgaaagccggcggacgtttgctgatcgttgaagcgacggagcgaaacagcgtattccagctggcgagcgtgggctttattgagggattaagcggataccgcgatttccgccgccgggatgagaaaccgatgctcacccgctccgcatggcaggaggttctcgttcaggccgggtttgcaaacgagctggcgtggcccgcgcaggaatcgtcgccgctgcgccagcatctgctggtggcgcgttcgcctggcgtaaatcgcccggataaaaaagccgtgagccgctatttacagcagcgctttggcaccggtctgcccattttacagatccggcaaagagaagcgttatttacgccgctgcatgccccgtctgatacgccgactgagccagccaaacccacgccagttgccggggggaatccggcgctggaaaaacaggtggctgaactctggcaatcgctgctgtctcgccccgtggcaaggcatcacgactttttcgaactgggcggcgacagcctgatggcgacaaggatggtcgcgcagctaaaccggagagggattgccagggctaaccttcaggatctgttcagccattcgacgctgagcgacttctgcgcccatctacaggcggctacgtcaggagaggacaacccgatacccctttgccagggcgacggtgaggaaaccctgtttgtcttccacgcttcagacggcgatatcagcgcctggctgccgctcgccagcgcgttgaacaggcgcgttttcggcctgcaagcaaaatcgccgcagcgctttgccacgctcgaccagatgatcgatgagtatgtcgggtgcatccgtcgtcagcagcctcacggcccttatgtgctggcgggttggtcgtatggcgcgtttcttgcggcgggcgccgcacagcgcctgtacgccaaaggcgagcaggttcggatggtgttaatcgatcccgtgtgccgacaggatttctgttgcgaaaaccgggcggccctgctgcgcctgttagccgaaggacaaacgcctctggcactgcccgaacatttcgaccagcagacgcccgacagccagcttgccgactttatcagcctcgctaaaacggccggtatggtgtcgcaaaacctgacgctgcaagcggcagaaacgtggctcgacaacatcgcgcatctgctgcgtttactgactgagcatacgccgggcgaaagcgttccggtcccctgtctcatggtgtatgccgccgggagacccgcgcgctggacgccagcagaaaccgagtggcagggctggataaacaacgccgacgacgctgtgattgaagccagccactggcaaatcatgatggaagccccccacgttcaggcttgtgcgcaacacattacgcgctggctttgcgcaacctcaatgcaaccggagaacacgttatga

SEQ ID NO: 74733 - DNA, 1101 bp, Citrobacter koseri
atgatgccgtccgcctccccaaaacaacgcgtactgattgtgggcgccaaatttggcgaaatgtacctgaatgcctttatgcagcccccggaggggctggaactggtcggcctgctggcgcagggaagcgcccgttcaagagagctggctcatgcgtttggcattccgctgtatacctcgccggaacagataaccaagatgccggatatcgcctgtattgtcgtgcgttcgaccgtcgccggaggaaccggtacgcagcttgccagacactttctgacgcgcggcgtacacgtcattcaggagcatcccctccacccggatgacatcagttccttacaaacgctggcgcaggaacagggctgctgctattgggtaaacacgttttatccgcatacgcgcgcgggacgcacatggcttcgcgatgctcagcagctgcgtcgctgcctggctaagacgccgccggtagtccacgccaccaccagccgacagttgctctactccactctggatttgttgttgctggctctgggcgttgatgccgccgccgtggagtgcgacgtggttggcagctttagcgattttcactgtctgagactcttctggccggagggagaagcctgcctgctgcttcagcgctatctcgatcctgacgatccagatatgcatagccttatcatgcaccgcctgctgctgggctggccggaaggtcatctttcgctggaggcgagctacggccccgtcatctggtcatccagcctgtttgtcgcagaccatcaggagaacgcccacagcctctaccgcagaccggagatcctgcgcgatctgccgggtctgacgcgcagcgcggcgcccctgagctggcgcgactgctgcgaaaccgtcgggccggagggcgtcagctggttgctacaccagttgcgcagccatctggcgggcgaacatccaccagcggcctgccaaagcgtacatcagatcgcgttatcacgtttatggcagcagattttacgtaagaccggcaatgcggagatcagacgcctgacgccgccgcaccacgaccggttagccggtttctacaacgatgatgataaggaggcgctgtga

SEQ ID NO: 74734 - DNA, 804 bp, Citrobacter koseri
gtgacgcaatctgcaatgtgcatcccgctgtggcccgcccggaacggcaatactgcgcatctggtcatatgtcctttcgctggcggcagcagtagcgcgtttcgccactggcgagacaatcaaatggcgaacagcgcgctttctctggtgacctggccggggcgcgatcgccttcgccatctggaaccgctcagaagcattacgcaactggcggcactgctggcgaacgaactggaagcatccgtatcgcctgacacgccgcttttactcgccgggcacagcatgggggcgcaggtggcgtttgaaacctgccgacttctggagcaacgggggcttgcgccacaaggactgattatttccgggtgccatgccccgcatctgcattctgaacgccagctcagccatcgcgatgatgccgactttatcgctgaactgatagacattggcggatgttctcctgaactgcgggaaaacctggaattaatgtcgctgtttcttcctcttctgcgcgctgatttttacgccaccgagagctatcactacgactcgcccgacgtctgtccgccgctgcgcacgcctgcgctgttattgtgcggcagccacgatcgcgaagcctcctggcagcaggtcgatgcctggcgtcagtggctgagccacgttacaggcccggtggtgattgacggcgatcatttctatcccattcaacaagcccggtccttttttacgcagattgtccgccattttccccacgcattttctgcaatgaccgcgttgcaaaaacagcccagtacttcagaaaggtga

SEQ ID NO: 74735 - DNA, 1578 bp, Citrobacter koseri
atgaactcttcctttgaatctctgattgaacagtatcccttacccattgccgaacagttgcgccactgggcggcccgttatgcctcgcgaattgccgtcgttgatgcaaaggggtcgttaacctacagcgcgcttgatgcacgggttgacgaacttgccgcaggtctgtcatcactgggtttgcgttcgggggagcatgtaattgtgcagcttcccaacgacaacgcgtttgttaccctgctgttcgccttgttaagactgggcgttatccccgtgctggcgatgccctcgcaacgggcgctggatatcgacgcgctgattgagctggcgcaacccgtcgcttacgttattcacggggaaaaccacgcagagctggcccgacagatggcgcacaaacacgcctgcttgcgtcatgttctggtcgctggagagaccgtgagcgacgattttacgccgctcttctcccttcacggtgagcgacaggcgtggccgcagcctgatgtttccgccaccgcgttgttgttgctctcaggcggcacaaccggcacgcccaaactcatcccgcgccgacatgccgactatagctataacttcagcgcttctgctgaactgtgcggcatcagccaacagagcgtatatctcgccgtcctcccggtggcgcataactttccgctggcctgccccggcattctgggaacgcttgcctgcggcggaaaagtggtgctgaccgacagcgccagctgtgatgaggtgatgcctttaatcgcgcaggaaggcgtgactcacgtcgccctggttccggcgctggcgcaattatgggtgcaggccagggagtgggaagacagcgacctttcatcgctgcacgtcattcaggcaggcggcgcccggctcgacccgacgcttgctgagcaggttatcgccacctttgactgtaccctgcaacaggtcttcggtatggcggaaggcctgctctgttttacccggctggacgatccgcataccaccattctccacagccaggggcgcccgttgtcccctctggatgaaatccgcatcgttgatcaagacgagaacgacgtcgcgccgggcgaaaccgggcaattgttaacgcgcggcccttataccatttcgggctattaccgcgcccctgctcacaacgcgcaggcctttaccgcgcaagggttttaccgcacaggcgacaatgtcaggctggatgaggtggggaacctgcacgttgagggacgcataaaagagcagatcaaccgcgccggagaaaaaatagccgcggctgaagtggaatcggcactgctgcgtttagcggaagtgcaagattgcgcggtggtcgccgcgccggacacgctgcttggcgagcggatttgcgcgtttatcatcgcgcagcaggtgccaactgactatcagcagttgcgtcaacaactgacccgtatggggctcagcgcgtggaaaattcctgaccaaatcgagtttctggaccactggccgctcaccgccgtcggcaagatagacaaaaaacgcctgacggctctcgccgtcgaccgttatcgccattctgcccaataa

SEQ ID NO: 74736 - DNA, 2022 bp, Citrobacter koseri
atgaaaatgacacggctttatcctctggccttggggggattattgctccccgccattgctaatgcccagacttcacagcaagacgaaagcacgctggtggttaccgccagtaaacaatcttcccgctcggcatcagccaacaacgtctcgtctactgttgtcagcgcgccggaattaagcgacgccggcgtcaccgccagcgacaaactccccagagtcttgcccgggctcaatattgaaaatagcggcaacatgcttttttcgacgatctcgctacgcggcgtctcttcagcgcaggacttctataaccccgccgtcaccctgtatgtcgatggcgtccctcagctttccaccaacaccatccaggcgcttaccgatgtgcaaagcgtggagttgctgcgaggcccacagggaacgttatatggcaaaagcgctcagggcgggatcatcaacatcgtcacccagcagccggacagcacgccgcgcggctatattgaaggcggcgtcagtagccgcgacagttatcgaagtaagttcaacctgagcggccccattcaggatggcctgctgtacggcagcgtcaccctgttacgccaggttgatgacggcgacatgattaaccccgcgacgggaagcgatgacttaggcggcacccgcgccagcatagggaatgtgaaactgcgtctggcgccggacgatcagccctgggaaatgggctttgccgcctcacgcgaatgtacccgcgccacccaggacgcctatgtgggatggaatgatattaagggccgtaagctgtcgatcagcgatggttcaccagacccgtacatgcggcgctgcactgacagccagaccctgagtgggaaatacaccaccgatgactgggttttcaacctgatcagcgcctggcagcagcagcattattcgcgcaccttcccttccggttcgttaatcgtcaatatgcctcagcgctggaatcaggatgtgcaggagctgcgcgccgcaaccctgggcgatgcgcgtaccgttgatatggtgtttgggctgtaccggcagaacacccgcgagaagttaaattcagcctacgacatgccgacaatgccttatttaagcagtaccggctataccaccgctgaaacgctggccgcatacagtgacctgacctggcatttaaccgatcgttttgatatcggcggcggcgtgcgcttctcgcatgataaatccagtacacaatatcacggcagcatgctcggcaacccgtttggcgaccagggtaagagcaatgacgatcaggtgctcgggcagctatccgcaggctatatgctgaccgatgactggagagtgtatacccgtgtagcccagggatataaaccttccgggtacaacatcgtgcctactgcgggtcttgatgccaaaccgttcgtcgccgagaaatccatcaactatgaacttggcacccgctacgaaaccgctgacgtcacgctgcaagccgcgacgttttatacccacaccaaagacatgcagctttactctggcccggtcgggatgcagacattaagcaatgcgggtaaagccgacgccaccggcgttgagcttgaagcgaagtggcggtttgcgccaggctggtcatgggatatcaatggcaacgtgatccgttccgaattcaccaatgacagtgagttgtatcacggtaaccgggtgccgttcgtaccacgttatggcgcgggaagcagcgtgaacggcgtgattgatacgcgctatggcgcactgatgccccgactggcggttaatctggtcgggccgcattatttcgatggcgacaaccagttgcggcaaggcacctatgccaccctggacagcagcctgggctggcaggcgactgaacggatgaacatttccgtctatgtcgataacctgttcgaccgtcgttaccgtacctatggctacatgaacggcagcagcgccgtcgcgcaggtcaatatggggcgcaccgtcggtatcaatacgcgaattgatttcttctga

SEQ ID NO: 74737 - DNA, 477 bp, Citrobacter koseri
gtgatttctttccgaatgatgacaaaagatgagtatcctgcttatctcgaatattttgttaatgattatgcatatgagattgaatcaaactacggggcatcccttcgtgattctcttgccagagcgaagcaggaaatttcggaaatgcttcccgatggagttaatacacatgggcaagtattaatgtgtattgttgctcagtcggacaagactaacaaccatgtaggttatctctggtacaaaccagactcgactaagcgcactgtttttatctacgattttcatattttcaactccagtcagggggtggggcttggcaaacaatccctacgtgcttttgaagagtatctgcaagcgaagggttttaaagagatcagattgcgtgttgcaggtgataatgctcgcgcccggcatgtctatgaaaccagcggattcagggttacgggtatcaatatgagtaaacctattacggactga

SEQ ID NO: 74738 - DNA, 669 bp, Citrobacter koseri
atgaagaacgctgattttaaacgcccgcaactgacgctgccgaacggcgcagacaagctactgctgcactcgtgctgtgcgccctgttcgggggaagtcatggaggcgattcaggcctcgggcattgattacacaattttcttttataaccctaatattcatccgcaaaaggagtacctcatccgtaaggaggagaatatccgttttgccgaaaaacacggcgtgccttttgttgatgcggattacgacaccgacaactggttcgagcgtgcgaaagggatggagtgggagcctgagcgcggtgttcggtgtaccatgtgctttgatatgcgctttgaacgcaccgcgctgtatgccgcggaacatgggttcagcgtgatcagcagctcactcgggatttcccgctggaagaatatgcagcagattaacgactgcggacaacgcgctgctgcccattatccgggaatggcatactgggattacaactggcgtaagcagggcgggtcatcgcgcatgattgagatcagcaaacgcgaacagttttaccagcaggagtattgtggctgcgtctattcactgcgtgataccaatatgcaccgtaaatcgcagggcaggccgctcatcaaactcggtaaactttactacggtaaggaaggcgaagaacagtaa

SEQ ID NO: 74739 - DNA, 909 bp, Citrobacter koseri
atgaaaaatgatatcagaaccctcgaccttaaccttcttaaggcccttgatgcattactggatgagggaagcgtgactcgggctgcacagcgcctctccctgacgcagcctgccgtcagtggtatgcttattcgcttgcgtgattactttgacgatccactctttgttcgcaccagccacggtatggtccccacaatgcgggccaacgaactttctacgccggtaaaacaaatcctcaccgatatcgctatcctgctgaaaccaaagaaatttgatcccgtgacggtggaactgacttataccatcgtcgcaacggactatgcacttaaggctgttgtcgttccgttgatggctgagctaaaacaacgtgcaccgtatattaaaatcgccgtgcggcccgtggacaatgagcgaatgtatcagcagttgtctcggggtgaagttgatctggctttgataacaccgcaaacaacccccgaagacctgcatggaagagcgctctatgaagaagattatgtctgcgtagcacgacgtcatcatcctctggcagcgagttcagaaatgacgctcgaacaattttgcaaacaggaacatattctggtgtcttcagaaggtaacttcaccggtgttacagatgaagcactggctaagctcagtctgacacgacgagtaggcatgtcagttaatagttttcaggtgatacctgatatattgcgagtgactgatatgattgcagttgtacctcaccgcatggtcctgactaacaacgatctcatcattctccctttgcccctgaaagtacccggctttaccaagagcatggcctggcatgagcgaacccatcgtgacccaagtcatcagtggattcgtgctttatgcgcagaagtaagccaacatcccgcgtcctga

SEQ ID NO: 74740 - DNA, 507 bp, Citrobacter koseri
atgaacgcgattaactggccagaagactttgttccgggttttaccgataactttgtttctaatgaaataatcatctcaggtctgaacgtcaatgatgtctggccgctcctgagtcagccattgctatggccggaatactataaaaattccgccgatgtgcgcttttatgacaacaaaggtccagaattggaaaatggggttcgcttctacttcagcacgtttggtttcccagttgaagctcaggttgtggagtttgttccacctgctgaaggtaaacctgctcgtctggcatggcacggatgggccggtgaaaaagataccgctcaacgactcgatgtccatcatgcgtggctactggaggatctttccggtcacagggtccgtatcctaacgcaggaaacacagaacggagtcccggcaaaagatctggcaaatacccgcccgaacccaatgcttaatggtcatcaggaatggcttgacggcctgattcgagcagcaaagaaataa

SEQ ID NO: 74741 - DNA, 249 bp, Citrobacter koseri
atggccgcgcggtgtcacttgcgggggttacatgatttacctgtaatcaagtgcaatagcaaacgggcaaatattcttgaggctacggggaagtgcagcctcagtgatatgactgtggaaagcggtttattatttctttgctgctcgaatcaggccgtcaagccattcctgatgaccattaagcattgggttcgggcgggtatttgccagatcttttgccgggactccgttctgtgtttcctgcgttag

SEQ ID NO: 74742 - DNA, 534 bp, Citrobacter koseri
atgcatcatatctcttctgtcagtctcaattatcgctgtctccagcatacagactggccattttttttggcattaaatcaggatcgtcatgtgatgcattttattagtgattcacgtactgatgacgagattagaacccagtcttttgaaagccgtctacagccttggcataaaggcagtgaacgctggttatgtatgataatgagtcgaaaggatacagatataccaattggtgtaactggctttattgatcgtggtgaaggcatagcggaagtggggtttatcctggcatcagaatttcacggcaaaggttttggtacagaatcgttaaaagatattgcccgctttgctttcgatgagcatgggtatcgtaagctcactgctacggtaacagctggcaacaatgcatcgcggagaatattgcataaagtcggatttcagcaggagggaactctaagaaaaaactatttcctgcatggttgctggcatgatgattgggtatttggattgttgagagacgaatttagttactga

SEQ ID NO: 74743 - DNA, 480 bp, Citrobacter koseri
ttgttcactatcaaaactgacgatctctcccatccagcagtgcaagcgttagtggcctatcatatttccggcatgctggagcagtccccaccagaaagcagccatgctttagatattcgaaaactgcgtgacccaactgtgatattttggtcagcatgggaaggggtacaactcgcaggaattggcgcgctgaaaatactggatgatgaacatggtgagctgaaatcaatgcgtaccgcgccaaattttttgcgtcgtggcgtagcgaatcagcttttacagcatatcttgcaggttgcgcatatcaaaggcctacgacgtttaagtttagaaaccgggacacagccagggttttccgcttgccatcaactttatattaagcacggtttcgttaactgcgagccgtttgctgattatcagtctgatccaaatagccgttttatgacattagttttatgtgagaaagataaattgtcatga

SEQ ID NO: 74744 - DNA, 792 bp, Citrobacter koseri
atgcaacaaattgatttttacatggttgatgcctttagcacggctacttttggcggcaatgccgcagccgtgtgtccgctcaccgagtggttgcccgatgagacattattgaaaatgtctaaacagcataaccagtcagaaacggctttttttgtcccaaatgaaaacggcttcgagttgcgctggtttaccactcagggggaaataaatctgtgtgggcatgccacacttgctgctgcgcacgtcatctttgaacatcttgattacccgggcgcgactatccattttgatacccggtttgttggcccattgacagtagcacgcagcggcgagtggttgacgcttgattttcctgcctgggaaaccgagcctgtcatgccgccgtccttattgctggaaacgttgggcatcacagaatacaaagaagtgcgcgtggcgcgtgattacatggtcgtgctggataatcaacggcaggtagaagcgctacgcccgaacattaatgccatgctccctctgggaaaaatggtttgcataaccgcgcccggcgaagagaaatacgattttgtcagccgtttcttttgcccgggagaagccgtagcggaagaccccgttacaggttcagcacatagcatgctaattccgtactgggctgaaaaactgaaaaaaacacaaatgctggcgcaccagggcgccgaacgtggcggggatttacgctgccagcgagtgggggatcgagtccacatcggcggacaggcaacaacttatctgctgggtaaggtactgttgcgctag

SEQ ID NO: 74745 - DNA, 954 bp, Citrobacter koseri
atgcaaacgattctgggggcaagcggacagattgcccgggaacttgctcgcgagttaacgcattcttacagtgctgaactgaggcttgtaagccgtaatccacagaaggtaaatgacagcgatagccttatgcccgctgatttactggatgcccgtcagacactggaagcggttaaaggaagccgcattgtctattttgcggcgggtctgccgccggatgccgacctctgggaacagcagtttccggtaatgctgcaaaacgcgctgaacgcgtgtcggacagtgggggcaagttttgtttattttgacaatacttatatgtacccgcaggacagcagattgcagaccgaggaaacgccgttcctgccgtcagggcgcaaaggacgggttcgggccctgatggcaaacaaagtgctggaggagatgcgtcggggcgacatccctgtgcttatcgggcgcgcgcccgagttttatgggccgggaaaaacccagagttttaccaatgccttaattttagacaggcttaaagcagggaaaaaaccacgcgtgccattacgtgacgacacgttacgtacgctcatatggacccccgatgccagtcaggctctagcgcgtcttggcaacacccctgatgccttcggtcagacgtggcacctgccctgttgcgatgaacggctcacctatgcgcagttcgtttctctggcctgtaacgtgttcgggaaagaaacgtcatggtctgtcctgagcaaattcgccttgttcgccgccggtatcttttccaaaggcccacgggaactccgggagctcctgccccgctatcaacatgataacctgtttgattcatcaaaatttaagcggcgattcccggactttcagataacaacgtaccgtcagggactggaaaccctttaccgtgaatggaaagcgtcgctcaccgtaaagaaagacaaataa

SEQ ID NO: 74746 - DNA, 978 bp, Citrobacter koseri
atgaaactcattgagataacagaagctggcggccctgaagttctgaaggtaagccagggaaaaatgccggaatgtggcgagaacgatgtcctgatctcagttaaagcggccggcgtgaatcgcccggatattatgcagagagagggaaaatatcccatgccagagggtgttacgccggttcccgggctggaagtcgcgggtatcgtacacgcaatcgggaaaaacgttgctcacttttcagttggcgatcgcgtctgtgcgctcaccaatggcgggggatatgcagaattttgcgccgttccggcaggtcaggtattgcctgtcccacaaaatttaagttttacagaagcagcagcgctcccggaaacattctttacggtatgggccaatcttttttcgttgggaaaagtgaaaaaagaggatgttgttttgatccacggtggcgcaagcggcatagggacgaccgcgctggcgttgtgtaatgccatgaatattaaagcgttcagcaccgtcggaagtgacgataaaattccgttcctgcaacaatatggggaagtcattaactacaaaacccatgattttgaagaagaaatcctcagcagaaccgacggaaaaggcgttgatgttattcttgatattgtcggcgccgcttattttaacaagaaccttcgccttcttaaaaaggatggtcggctcgtactgattggatttatggggggcaggatggttaaggaatttgatatccaggaactgattcttaaaagagcggtggtaaccggttcaacgatgaggagccgggacgctgctgaaaaggaagaaatcgcccaacagctcatacaaaaagtatggcctttaatcgaagccggaaagtgtaaacccgtcattcaccagatagttaaatttgaggatgtccgtcaggcacatacgttactggatgccggaactcatatcggtaaagttatccttacccttgaataa

SEQ ID NO: 74747 - DNA, 1080 bp, Citrobacter koseri
atgaatgagcaacattcccatccagaatttccgcgctggatgatctatggcgcgaacggttataccggagaaatgattgcccgtgaggccgtacggcgaggattcaggccagttctggcggggcgcaggcaagaaacggtagactctctggctcgcaatctcgggcttgaggctcacgccttcgcccttgataacccggctgaactgctcagacagcttgaagggtgtgctctggtattaaattgtgcggggccgttctccgctactgcggcgcctttgatggaggcctgcctgcaaacccgaacccattatcttgatattacaggggagataggcgtgttcgaagcggcacaactgctgaatacccgtgcccgggatgccggtgttgtattgtgccccggcgtcgggtttgacgttattcctacggactgcgtggcggccgccctgaaggaggccctgccggatgcgatccgccttaacctgggattcgattcacgctctgttttttctccgggtacggcgaaaacagcgatcgaggggttggcgcagggcggaaaaattcggcgaggagggaagatcattaccgtgccgcttgcttatgaagttcgccgtattgacttcggcgatggcgagaaggacgcgatgacaatcccctggggggacgtgtccacggcgtattacacgacaggtattccagacattcaggtctttgtgccggggtcgacgcgcatgatttcccaggcccggagagcaaactacatcaggccattgctgcgactggcgtgggttcagaagctcctcaaggcttatatatcccgaacggtgaaaggccccggagaaatgaaacgtgaacagacgccctcttttgtgtggggagaggccatcaacgcccgtggcgacaaaaaaactgcccgtatccgtacaccgaatggttataccctgaccattatgggggcgttagcggtggttgagcacctgatgatgaaccggattgcaggaggggcctacacgccggcaacgttaatgggcgcaaatctgataacccggttaccaggggctggcccgctgaggattgtataa

SEQ ID NO: 74748 - DNA, 918 bp, Citrobacter koseri
atgattatcagaccagagcaacattggttttttcgattatttgattggcatggctcggtattgtcaaaaataacatttcggttatttttaaaccttgtcatgtcagctatcgcaattatcatttatcaatggtatgagcaactgggcatccacttaaccgttgccccttttagcctgctggggatcgcaatcgctatctttctcggctttcgcaacagcgccagctacagccgcttcgttgaggctcggggactgtggggaaccttactgattgccgagcgttccatcatccgtcagttaaaaaatttgttgccgaatgacgttgagctacataaaagaatttcaggttatctgattgccctttgctggagcctgaaacatgaattacgtaaaaccgacgccggatatgatatgtaccgaattctgccccggcatattcttacccaggtcatgttcagcccgatgaaaaccaaccggatattattattgatcggcgatgaaatggcagcattgcgtgaacaaggcaagctgagcgatattacatttggcctcatcgataataaaatagatgaaatcacccacgttattggcggctgtgaacgaattgcaaataccccggtgccgtttgcttatacattaatactccagcgaaccgtttatcttttttgtacccttcttccttttgcgctggttggcgacctgcattacatgacgccattcgtgtccgtttttatttcctatacctttttatcctgggattccctggcggaagaacttgaagatccctttggcacatcggctaacgatttaccgctcaacgcgatttgcaacaccattgagcgcaatctgaaagagatgaccgggcaacagcccctgccggagccgcatcagcccgatcgctacttcaatctgacctga

SEQ ID NO: 74749 - DNA, 987 bp, Citrobacter koseri
atgcaaccgcttatggactcatggcagcgtaaattcacctatttacgtctgtccgttaccgatgtgtgcaattttcgttgtacctactgtctgccggacgggtacaaacccggcggcgtgagcaacaagtcattcttgtcggtggatgaagttcgccgcgtcactcgcgcgttctccgcgctgggtacggaaaaagtccgtcttaccggcggggaaccctccttgcgccgcgactttatcgatattatcgcggcggtgcgtgaaaatgcggcgattcgccagattgcgataacgaccaatggctatcgcctggcgcgtgacgtcgcacgctggcgtgaggccggattaaccgccatcaacgtcagcgtggacagtctggacgctcgccagttttatgccatcaccgggcaggataaatttcaggacgtgatgaacggtattgatgcggcgtttgccgccggttttgaaaaggtcaaggtgaatacggttctgatgcgcgatgtgaatcatcatcaactggacacgtttctggcctggattaagcctcgtcgcattcagttgcgctttatcgaactgatggaaacgggtgagggcagcgagctgtttcaacgccatcatatttcgggcgtggtgctgcgtgatgaactgctgcgacgcggctgggtgcgccagattcgccagcgcagcgatggcccggcacaggtcttttgccacccggactttgcaggcgaaattggcctgatcatgccctatgaaaaaacgttctgcgccagttgcaaccggctgcgcgtctcttccatcggcaaactgcatttatgtctttttggtgatggcggggtcgatttacgagacgtgttgcaagacgatacgcagcaggatgcccttaagatgcgtattgccgatgcgctgacgcataaaaaacagacgcactttttacatcaggggaacaccggcattacgcaaaacctgtcgtacattggtggatag

SEQ ID NO: 74750 - DNA, 174 bp, Citrobacter koseri
atggcttcactatcagacacagagcacgctaaacctgcggataccgccccacgcgcctggtggaaaagggtgggctggatggtcatcatctgggcggcaagcgttatggcgctggccgtcgtcgcatccgggtttaagctgctgatgctggcggcggggatgaaaacccactaa

SEQ ID NO: 74751 - DNA, 1011 bp, Citrobacter koseri
atgggcatcgacctgtcaataatctggttcgtcatcattgttttcgcaacgttgatgtacatcgtgatggacggctttgatctggggatcggcattctttttccgttcaataagaacgagaaagagcgcgacatgatgatgaataccgtggcccccgtctgggatggcaatgaaacctggatggtgctgggcggcgcggcgttatatggcgcgtttccgttggcttatgcggtgattgtcgatgcgctcagcgtgccgttaaccgccatgctgctggggctgattttccggggcgtggcgtttgaatttcgctttaaagcgacgccggaacaccgcccgctttgggataaagcctttatcggcggttctgtgctggcaaccttcagccagggcgtcgccgtgggaacgctggttaacggtttgcaggtaaccggacgggcgttcagcggctcgacgatggactggctggcgcctttcccgctgttctgcggcgtggggctggtggtggcctatgcgttactgggctgcacctggcttatcatgaaaacggaaggcccgctgcaccgaagcatgtcggagaaggcgattatcctgacgctgctgctgctggcgatcatcgtcattatcagcctgtggacgccgttgacgcatccggcgattgctcaacgctggttcagcctgccagagatcatctggtttgcgcctgtcccgctgttagtgctggtttgctgctggggaattgtgcgttccgcctataaccgcaaagcgagctatgggccgtttatgctgacccttggactgattttcctgggattcagcgggctgggcatcagcatctggcccaatatcattccgccgtcgatctctatctggcaggccgcgtcaccgccgcaaagccagggctttatgctggtgggggggctactgattatcccggtaattctgatgtacacctgctggagttactacgtctttcgcggaaaaattaatcctgatgaggggtatcattaa

SEQ ID NO: 74752 - DNA, 1407 bp, Citrobacter koseri
atgtttggaatagatgcttttcaccttgcgaggatacaatttgcctttaccgtatcttttcacattctttttcccgcaataacaattggcctggcaagttttctcgccgtccttgaagggctatggctcaaaaccaaaaatgaaacgtatcgcgacctttatcacttttggtcaaagatctttgccgtcaattttgggatgggggtggtctcaggcctggtcatggcttaccagttcgggactaactggagcggcttttcacaatttgccggaagtatcaccggtccgttgctgacgtatgaagttctgacggcattcttccttgaggcgggctttctgggcgtgatgctgttcggctggaagcgcgtcgggccggggctgcatttcttcgcgacctgcatggttgcgctgggaaccttgttttcaacgttctggatcctctcttccaatagctggatgcaaacgccgcagggttacgcgattgagaatggcgttgtcgtgccggtggactgggtggccatcgtctttaacccgtcgttcccgtaccgtttattgcatatgtccacggcggcgtttctggcgagcgcgttcttcgtcggcgcctcggcggcctggcatttgctgaaaggaaacgacacgcccgcgatcagaaagatgttttcgatggcgttgtggatggcgctgtttgtcgcaccggttcagacggtgatcggcgatgcgcacggtctcaatacgctggaacatcagccggcgaaaattgcggcgattgaagggcactgggaaaacccgccaggcgaagccacgccgttggttctgtttggcgtaccggatatggatgcggaaaaaacgaagtacagccttgaaatcccttatctgggaagcctgattctgacgcacagcctcgacaaacaagtgcccgcgctgaagtcgttcccgaaagaggatcgcccgaactcaaccatcattttctggtcgttcaggataatggcggggctggggatgctgatgatcctgaccggggtggcgagcgcgtggctgcgctggcgtggccggttgtatcagtgtcgtcctttcctgtggttcgtattctgcatggggccatcaggattaatcgctattctggcgggctggtttaccaccgagattggccgccagccgtgggtggtctacggtttgcagcgcacgcgtgatgctgtttccgcacacggcgacatgcacatgtccgtcagcctgctggcgttcatcctcgtctattcgtccgtctttggggtgggctacctctacctggtgcggctgatcaaaaaggggccagtgcgcgagcatgcgcatgatatcgctcaggggggtacgccagcgcgtccgttatcggcggtgagcgaacccatgaacacacgcaggggagaataa

SEQ ID NO: 74753 - DNA, 2289 bp, Citrobacter koseri
atgaataagaaaagacgttcagttcccggagtcagacactatgacggtcctgctggcggctggggcgcgttaaaagcaacggccattgccgttcgtacacaaatggacgcgcttgaagcacccgttaccctgttgcgcacaaatcagccagacggctttgactgcccgggatgcgcatggccggataaagaacataaatcaacgtttcagttttgcgaaaacggtgcgaaggccgtaacgtgggaagcgacaagcaagcgcgtcacaccggcgtttctggccaaaaataccgtcagcgcgctgctgaagaaaacagatttcgaacttgaagggtatggtcgcctgactcatccgctggcctatcacaaagaaagcgacacatttcgccctgtcgaatgggaacaggcctttgcccgcatcggcgaagtgcttcgcggcctctcccctgaacaggtggaattttacacgtccggtcgcgcctccaacgaagcggcatatctgttccagctttttgcgcgcgaatacggcagcaacaattttcccgactgttccaatatgtgccacgaagccaccagcgtaggcctgccgcgctcaattggcatcggtaaaggaaccgtatcgctggatgattttgaaaagacggaactggtgatcgccatcggccataacccagggacaaaccatccccgcatgatggggacgctgcacgagcttgcacgccgcgacgtgccgattatcgtctttaacccgctgcgtgaaagagcgctggaacgctttgccgacccgcagagcatcatcgaaatggcgacctacagctcaaccgacattgcctcaacctatttccaggtcagggctggcggtgatgccgccgcgctgaaaggcattgccaaacatgtgttgcagctggaagccgagcgtggcgatgttctggatcgcgagtttatcgccgcccatacgctgggctttgacgattttgccgcagatattgccgcaacctcctgggaatccattgagcgcgaatcaggtttaaaccgtgagcaactggaaaaagtcgcggaagcctacgccaggtccaacgccaccatcatcacctacggcatgggcattacccagcataacaaagggacggcgaacgtgcgtctgattgccgacctgctgttaatgcgcggcaatattggcaaacccggcgcaggtatttgcccgcttcgcggccactccaacgttcaggggaaccgcaccgtcggcattaccgagaaaccggcgccagaattcctcgaacggttgagcgacgttttcgggtttgttcccccgtcgaaacacggacacgacgccgtacaggcgacgcaggccatgatcgacgggcgcgccagggcgctgatctgcctgggcggtaattttgccgtggcaatgcccgatcacgaacaggggttcccggcaatgcacaggctggacttgagcgtccacatcggcaccaaactgaaccgaacgcatctgttggtcgggaaagagacgttcatctttccctgcctcggacgcaccgaactggatattcagcgcaccggcagacaatccatcacggtagaagattctatgtcgatggtgcatgcctcctccggcaaactgaaaccggcgtcgccgttattgcgttcggaaccagccattattgccggaatggcgaaagccacgctgacaaacagcaaaatcggctggatggagctggttgctgattacgatctcatccgcgaactgattgaacaaaccattcccggtttcgacaattacaacgatcgtatccgggtgcctggcggtttccgtatgccgctgccgccgaccgaacgcgtctggccgacatcgacgggcaaagctatgttctccgtattccacggcgttaacgagaacgtgaccggcgaaggtgaaaatacgctgcgtctgattaccctgcgaagtcacgatcagtacaacaccaccatttacgcgatggacgatcgttatcgcggcgtatttggccgtcgtgacattatctttatgaacgaaggcgatatggagcagttagggcttgaacatggcgatcgcgtcgatatccgaacggccctgcctgacagcgatctctgcctggaagatatcaccgtcgtggcctacagcattgcggcaggttctgtcggcgcctattatcctgaggccaatgttctggttccgctcaattatattgataaagagagcggtacgccttcttataaatccgtaccggtaaatatcaccttgcgctcaaaagaaattcgcgcgctgtaa

SEQ ID NO: 74754 - DNA, 903 bp, Citrobacter koseri
atggacataaaacaactcaaatatttaatcgcgctggatcagacccgtcactttggtaaggccgcatcgcagtgtaatatcacgcaacccaccctctccatgcgcattcgcaatctggaggaggagcttggtctggtgcttatcgttcgcgggcaacgctttgaaggctttaccccggaaggcgaacgtattctggcatgggcaaaatccctgctggccgcgcacgatggcttacaggccgaggccgcgctctgcaaaggacaggttgtcggcgtgctccgtctgggtatggtgccgctcgccagcgtcgatcctatgctgtttattcgcgaattgacgcccaaatacccggaactgcaatttagtctctattccatgacctcggagcaaattgccgaaggcgtaaacagcaaccagctggagctgggaatatgttatctgaataacattgatgtcagtccgtttgatgttatcccgttagcgaaaacccggatgggtctgctgcacgacacgcgccattttaaaatagaaaatgagagcctctcctggaacgatctcattaatttcccgctgggttttctgaccaaaggtatgcattacagagagcacatggatatgagttttaaatcagccggaatctcgcctaagcatattttcgaaagcgattcaacattccagattattcaggccgtgcagcgtggcatatgttgcgccattatgccgctcaataatgggctggagaatttaaacagtaatttccatattacgccggtcgtcaattccaacattgaagcccctgtcggcctgatcatgcgtaagcaagcgccggtttcttcgctcgcgctgcgctgctttacggacgcgcgcgacatctacgccgcccacaacccacagcattcgtaa

SEQ ID NO: 74755 - DNA, 654 bp, Citrobacter koseri
atgaatattgtcatcaggtgtcaggatcgtttttatcaatacggattgcgcgcgttactgtgcgaaatatttccaccgaacctgaatcagaccacgctcacctttaacgactatgaccacgcaaacgccgcctgtgccgatatcttaattctgatgctgcaccccggtgaacagtatatttgtcatgctgaaatgcgatttcgtgcgccacgcctgatgattggcctggtggataaaaaacatattcccgcgcgaggagaaattccctcctgtataggaaacatcgtgtttattccgctgaatgcgaacgtcagtaagatcagtaaagtgattaagcagcattggttttctttacagctggcaaaaacgccccatgccgtacaccactgcggacattgcccgcataagacgcttaccgggcaacaaaaccagctcgctgcctttctttatgcggggatgacgtcaaagcagattgcttacaaaatggcgatcggtcagaaaacggtgctggcgcatcgaaacgcgttaatgacaaaattccgcttaagaaccgatcgtgaattattactgtttttaaatgccgtaaaggaaaaaaactggcacagaaacggcatgtgcgaatcctgcaatgatgacgatggatggcttgtgtaa

SEQ ID NO: 74756 - DNA, 519 bp, Citrobacter koseri
atgcctggaagaaaacgctggctgctggccctgatgctgcttactggtcaggtatggggtcagggcgatccgatcgcattaaacatcaaagggaatgtgaaagccgcgccgtgtcaggtgagcagcgacagcattactaaaaccgttgatttaacggcagggagtccggtaacggcttcatcaatgtataccgcagggtcaacgacgccgtgggtcagttttgatttcagcattgaacattgcccggaaggcacaaccggcgtgatgattcagtttaacggcaacgctgatgacatgcatcgcgatgatatgtatcgcaatctgggtaccgctacccctgtcgcgatacagttgcaggcggcggacggtcgaccgctgggcgacggtcaggttctgaccagtgaaattgtcgcacagcgttatacctggaatttacgcgcccggctctacagtgaacaagggcaggtctcaccgggaaccattgattcggttgtgacggtttcattgagctatcagtaa

SEQ ID NO: 74757 - DNA, 933 bp, Citrobacter koseri
atgaaacgaacttatctcttattcagtttactgatgcttttttcagggttcagcgttgccgatgactgtaccgtgaatacgacattatttaataccgtctcaatggggaatattgtcgtgcagcgagatgcgccggtaggggcagaaatcgcccgcgcccgggtttccgggtatgccaaattgttggtcacggcgcctggcggtgccgtctattgcaacggtgcttatgcgatcaattacctgtcagcgacgccttcgccgataaatcatgtttacaacaccaatctgaagggggtgggaatcaggctatccattcccgcaggggattttgtgctgccgtcaaatggcgccagctatatctataacctcggtaactatgacgtgatgctgattaaaacagcaacgatccaatcgggatatttgacgccgggagtggttgcacagggatggtttggtacgccggatcattcttttatgcagatttcaatgggcgccgatacccaggtgacggcgctcgcatgttcgttttccagccagattcttaattttcagctcggtgatattaatgccgccgagttcaccggccagcccggagccgtgctgtcgcacagcgatacgcaaaatctggggctgaactgcgatccgggggcgaatatcaatgttgaactggcgggaacgcaaaaccctgacgcgccggctgacaccagcgttctggcgctgaccgggcagggtagccccgaaacggcaggcggcgtgggagtccagatagtttataacgatgtgccgctgcaactgaataaccgcatcgtattgaaaaaatccgcaggcgggcaggagacatttccgctggtggcgcgttattaccagacgaaaagccaggtgaagccgggtagcgcgaatgccaccgccacgttgaatattacctaccaataa

SEQ ID NO: 74758 - DNA, 2487 bp, Citrobacter koseri
atgatgatagccaaatatataattaatccgtatccggccaggcttgtattgcttatctccctgggaatattcagcgtgctgaatgaggttctgggtcgggattactttaatccggcgctactggagcatatatcatccggtagcgagaatatcgatctttctggttttgaaatgggagggcaggcacagggcacttaccatgtcgatattatcctcaacgggcagtttctggacacgcaggatatcgcattcaataaaacaccaacgccttcaggtgaggatgcgcttgagccctgcctgtcgggggaaatgttgcaacgctatggcgttaacatcgcgcagtatccgggtgtgcagggcaaaggggattgcgccgatttgtccgctattccacaggcttcaagtgagttccagttttcgacgcaaaagctgttgttaagtattccgcaggcggcgttatctgccagagcgcggggggatgtcgcgccggaactctgggatgaaggcattaccgccgcgatgcttaactacagtctgagcggtgataacagtaatagtcagtacgctaatttgcgccccggaataaatatcggcccgtggcgtttgcgcaattacaccacctggcggcgcagcggtcagggcgatgaggactgggattcgatttatacctatgtccagcgcaatatcgtccctctgaaagcgcaactggtgctgggagacagcgcctctcctgcggatgtttttgacagcataccgtttcgtggcggtcagcttgcgtcagatgacgacatgctgcccgattcactgaaggggtatgcgcccgtggtgcgcggtattgcccgcaccaatgcgcagatcgtcatccggcaaaatggctaccaaatctaccaaagttacgtggcccctggcgcgtttgatattaccgacatgttccccacgggaggcgccggcgatctggaggtcacggttaaagaggcggatggcagtgagcagcacttcaccgtcccgttcgcatcattaccggtgttacagcgtgaaggccggttcaaatatgcgttaaccggcgggcgctatcgctccagcgacagtcgtgtggaacaaactgatttcggccagggaaccgcgatttatggtttgccgggcggtttcacgctttatggcggcgtccagacttcccgtaactatcgggcgatagcgtccggcgtcggtaaaaatctgggaacgattggcgcgctttctgccgacgtaatccagtcatgggcgcaacccgctgatggcagcaagactcaggggcaatcctggcgtgtgcgctatagcaaaaatagcatcgcgacaggaacaaacttttcgattgcgggttaccgatattcaacgcgcggttactacggtatgcaggacgctttcgatacgtatggcggtagttccgggcagataacgaaacgacgtaaccgtatggaagccaacgtcaaccagtccctgggcgcaggcggcggatcgttggcgttaagcgcggtacaggaggactactggcataccggaaaaccgatgcagtcgtggagcgtggggtatcacaatgcctggaacggcgtgagctatagcgtcgcctggacgctgagtaaaaatggcagcggcgatcgttatgataaagaccaacagctggcgctgaatatcagcattccgctggatcgctttatgagcaatacctgggccagttatggcatgaatgccagcagcgggaagggcgcgactcatagcacagggctgagtggaacggcgatggctggaaacgcgctgaactggaatattcagcaaggttacggcacggatgatgtggggtataccggtagtctgagcgcggattataagggtacttacgccgatgttagcggggggtatcgttacgatcgccactcgcagcgcgtgaattacgctctcgcggggggcgtgctggcatatgccgatggcgtaacgttctctcagcctctgggggaaaccaacgtgctgattggcgcgcctggcgcatcgggggtcgggattaaaaaccagagcggcgtacgaactgattttcgtggctacaccgtttccgccaatgtttcaccgtatcgcaaaaatgatatcggcctggatacggcatccgttgcggacgatgttgagctggcgctcaccaacaaaaccgttgtgccaacccgtggcgcggtcgtgagggcggactatgtcgctaatgttgggctgcgcgtgctgttgacgttgaccaggccccacggttcgacggtgccatttggggcgatggtgacgttaaaaggcgcgcaagaacaacaatttattgttggtgacgaggggcaggtctatttaagcggcatgccgccggaagggacgctgaatgtggtctggggacgtgacggcgagcagcgctgcacggcaaattattcattaaccgcagccgagaactacagcggcgttagcgtgaccggctctctttgccgctaa

SEQ ID NO: 74759 - DNA, 678 bp, Citrobacter koseri
atgagagtattacgtgtttgcgccaccgcgttggcgctgtttgttaccggcgtttccagtgtgaatgctggcgtttccattggcggaacacgggttatttacgatggcggtaaaaaagaagcgtcattaagcgtcagtaatcccgataatattccgtatttaattcagtcgtggatcgaaacgcaaaatgacggtaagggcaaagccccttttattattacaccgccgctttaccggcttgataacgggcagcaaaacgtaatgcgtattattcgggcgggaaatctgcctgaagataaagaatctctgttttggctgaatattaaatcgataccgtcggcccaacgtaaggataatacgttacagattgcggttaaaacacgaataaaactgatttatcggcctgctttgctgagcaagtcaacgcctgaagcacagctcggaaagttaagctggagccggagcggggcgtttattcaggtaaataaccccacgccttattacgttaatttcaatgaaattatcgtatccggtaagaaagttgacaatgtaacgtttgtggcgccggggagtaccgcccgttttgcactgccttcgggcggaaatggcggaagcgtgaaattcaggattattaatgattacggtggaatcagcgaggagtacagcggttctgtttaa

SEQ ID NO: 74760 - DNA, 534 bp, Citrobacter koseri
atgatgaaaaaaaatatgatagcaatggcgctttccgctgcggccattttgtcaatatcacatgcgatagcgtatgacggcacggtcaaatttgtgggtcaggttcttgataccgcctgtaccgtagatattggcgccaataatacgatgaccgttgatatgggaagtgtctataaaacagcgtttaccaacgcaggggatgaagcgtcaacgaccaaatttaccttgcgtctgattaactgcccctcttccgtcacgtccgcgcgggtgaaatttgatggcgttaatcattcgggtaataccgatctgttggcgctttccgccgatcccggttcggcaagcggggtggccattcgactgatgacggcagacagagcgcctttaggccttaatcagatcaatggctattcctattcactgttagatatggttgacaaccaactggatttctacgccgcctatgtcgccaccagcgtgcctgttgtgccgggcgtcgtgaacgccgtagcgaacttcaccgttaactataactga

SEQ ID NO: 74761 - DNA, 663 bp, Citrobacter koseri
atgcctgaaaccaaaatagctattgaatcaagtatgtataaggctctgcctctgaagccaattgaacatgtagaaaaactgattgcgcacctgaagccacacgcaaacacacgagaaacaaaatgcagacaaattattaacaacgaaaataatagaccacatcaatgttatttattgctgaagggaaccattggggttttcagagcacgggacggcttcatgcttaactcagaagtcgccccctttatttttggcctcagcaatcaactggttgatgctgaatatttgctgatgcgcagtgaggagtgctctgagatcgcctttattccgctggagaaagttaatgacgttatagcaaatgagaatctttgggaaagcctggcgaaggtgcttatctacaccgccggtcgggtgtacgaccactgtacgcgcatttcagcgccgacatcctatgatattattcgcgctcagttgtatgaattaatgcgtgagtctaatgaattcaggcaaaatataactgccgcaaattatattcagtcaagaacatttctgtcgcgcagcagcgtgatgaagatactggccgatttaaaaaaaggcggctacatcgtgaccgatcgtggtgttctgaagcaaattcagcagaatattcctctgaaatactag

SEQ ID NO: 74762 - DNA, 633 bp, Citrobacter koseri
atgccccaggattcttcctttaatcaactgaagcagccttcgccctacgcaattgcgctgctcaacgcactcacgtcagaacaggatttcaaacggtatcctcgcggaagtcgctttgtcttcgtccaggggggcgagcaccagtgcctgtttttccgcacgggcgtcgtaagcattgagaacatcgaaaatagtctgttgctggggatagcttctgccccggtctccctggggttcaccagcgccctgtcggataaactgctgattcgcacgctcgaagagtgcgaagcggcgacaattcccctcgatgacgtgatggaaaccattgagcgcaagcacctgtgggagatcatggcaaagcatatgatcatcgtcaccaataaattgtttatccagaatgaaatggcgacagcgccgaccgcttacgacctgttgtgctaccagttgcaggcgctaagccaggagccggaaagcatccgttctcagatggcggcctaccagtatattcttgaacgtacccgcctttcgcgcagcagcgtgatgaagatgctgtcagcgctgaaaaaaggcggctatatcgaactggaacagggcaaattaatcgcaattaatcacctcccttctcgtttctaa

SEQ ID NO: 74763 - DNA, 1071 bp, Citrobacter koseri
atgaaaaagctgattaaccgtgtagaagaggtgctgaacgaacaactcgctggtctggcaaaagcgtacccgacgctgacgctgcatcaggacccggtctacgttacccggtcagatgcgccagtggcaggaaaagtggcgctgctttccggtggcggcagcgggcatgaacccatgcactgcggctatattgggccaggcatgctctccggcgcctgcccgggcgaaatttttacctcgccgacgccagacaaaatgtttgagtgcgccatgcacattgacggcggcgaaggcgtcttactgatcattaagaattacaccggcgacatcctgaattttgaaaccgccacggagctgctgcacgacagcggcgtaaaagtcaccaccgttgtggtagatgatgatgtggcggtcaaagacagcctttataccgccggtcgtcgcggcgtcgccaatacggtattaattgaaaaactggtgggcgcggccgcagaacgcggtgacacgctggaagcctgcgcggagcttggccgtaagctgaataatcaggggcattcaatcggcatcgcgctcaatgcctgtaccgtgcctgcggcgggcaaaccgtccttcacattgcaggataacgaaatggagtttggcgtgggaattcacggcgaacccggcattgaccgtcgccccttctcttctctcgatcaaactgtcgatgaaatgtttgacacgctgctggaaaacggcgcatacagccgcacgctgcgtcactgggatcatcatcagggaagctggcaagaagataagcagagcaaacagccgttgcagcgtggcgatcgcgtcattgcgctggtcaacaacctcggcgccacgccgctgtctgaactgttcggcatctataaccggcttgaaagccgctgtcaggaaaccggcattaccattgaacgcaacctgatcggctcttactgcacctctctggatatgaccggcttttccatcaccctgttaaaagtggatgatgaaacgctcgcgctctgggatgcgccggttcacacgcctgcgctcaactggggcaaataa

SEQ ID NO: 74764 - DNA, 633 bp, Citrobacter koseri
atgtcactcaacagaacacacattgttaactggctctaccgctgcggtgagattttcaccaaagagagtgattatctgacgggtctggacagagagattggcgatgccgaccacgggctgaatatgcatcgcggcttcagtaaagtcgtcgaaaaattacccgcgattgcggataaagacatcggcttcattctgaagaacacagggatggtgctgctctccagcgtcggcggcgccagtggcccgctgttcggcacgttcttcattcgcgccgcccaggtgacacaggcgcaccagagcctgacgctcgacgagctgtaccagatgatgcgggaaggcgcagaaggcgtgaccagccgaggtaaagcagagcctggcgataaaaccatgtgtgacgtctgggggccggttgtggagtcgctgcgccagtcatgcgaacagcacctgtcggtacaggcggcgctggatgccgccagcgcccaggccgaagcggcggcgcagagcaccatcaccatgcaggcccgcaaagggcgcgccagctatcttggcgagcgcagcatcggccatcaggacccgggcgcaacctccgtgatgttcatgatgcaaatgctggcggcagcggcaaaagagtaa

SEQ ID NO: 74765 - DNA, 1434 bp, Citrobacter koseri
atggtaaacctggtcattgtttcgcacagcgccctgctgggtgaaggcgtcgggcagttagcccggcagatgttaatcggcgatggttgtaaactcgcgattgcagccggtatcgacgacccacaaaatccgattggcaccgatccgctcaaggtgatggaagccatcgaatccgtggctgatgcggaccatatcctggtcatgatggatatgggcagcgcattattgagcgccgaaaccgccctggatttgctcgacccggcgattgcggcgaaagtccgcttatgcgcggcgccgctggtagaaggcacgctggcggcgacggtcagcgcggcaatgggcgccggtattgataaagtcatcaatgacgccatgagcgcgctggatgccaagcgtgaacaactgggtttaccgtcacccactcaaaccgggggcgtcgccacaaaaccagcatttcaggataacgacgcccactccatttctgttgtggtgaaaaatccaaacgggctgcatgttcgtccggcatcgcgcctggtctccacgttgtcggggtttcgggccgacatgctactggagaaaaatggcaaatgcgtgacgccggacagcctgaatcagatagcgttattacaggtgcgctgcaacgatactctgcgcctgatcgccaaaggagaacaggccgacgaggcgctggcggcattcaaacagctggcggcggaaaactttggcgagtccgtggaggagacgccagccagcagcacggcgcgtcagctccccgcgcgggtctccggcgtggtgttctgctattcccccgctgcaccggacgtcgcgaatccgacgaccgtcaatttgccggaagagcagcagcgcctgcaaacggcgattcgtcagacgctggacgatctcaacgcgctgaccacgctggcggaagataaatactccgccgatctggcggcgattttttccgggcatcacacgctgctggatgaccccgagctgtacgagatggcgtgtgaagtgatgcgtgataaaccgtgtcgggcggaaacggcgtggcgcagcgtgctggacgatctccgcgatcagtaccgacagctcgacgacgcctatttgcaggcccgctatatcgatatcgacgatattctccatcggacgctgaggcacctgagcggaataaacgcgcgcttgccggtattcacgcgcccgactatcgtggcggcggaaaatatcttcccgtccaccgtgttgcagttcgacccacagacggttaaagggatctgcctgagcgcaggcagcaatgaatcacattcggcaatcatcgcccgtgaaatggggatcggctggctttgtcagcaaggggaagcggtatatgccctgagcaccggcgagtcgattacgctggatctcgcggcacagcgcattctcttttctgactga

SEQ ID NO: 74766 - DNA, 1713 bp, Citrobacter koseri
atgataacacctgcgcttcgccattccggcacgctctctttcgccataaaactgaccgttgcaagcaccctgctgacattcgcgtcgctctcggcgcatgctgaggaacagccggccagtcctccgcagcccccggatattctgctggggccgctgtttaatgacgtgcagagcgtcaaactgttccccgatcagaaaacgttcgccgatgccgtgcctaacagcgatccgctgatgatcctcgcggattaccggatgcaacgaaaccagtcaggcttcgatttgcgtcactttgttgatgtgaactttacgctgcccaaagaaggggaaaaatacgttccgccggaaggacagtcgctgcgtgaacatattgacggcctgtggcccgtgttgacccgcacaacggagagcgccggaaaatgggattcgttattgccgctgccggaaccgtatgtggtgcctggcggacgtttccgggaagtctattattgggatagctattttaccatgctgggacttgccgaaagcgatcactgggataaggtcgccgatatggtggcgaatttcggctatgagctggactcctgggggcatatccccaacggcaaccgtacctactatctgagccgctcgcagccgcctttcttcgcatttatggtggaattgctggcgcagcatgagggcgacgacgccctgaaaaaatacctgccgcagttgcaaaaagagtatgcctactggatggagggcgtggagaatctccagcccggcgagcagaataagcgcgtggtgaaactggatgacggcaccgtcctgaaccgctactgggatgaccgggacacgccgcgaccggagtcgtggatggaagatatcaccaccgcgaagagcaacccgaaccgcccggcaaccgagatttatcgcgacctgcgatctgccgccgcatcgggctgggatttcagctcgcgctggatggacgacccgaatcagctgagcaccattcgcaccaccagcatcgtccctgtcgatctcaacgccctgctgtataaactggagaaaatgctggcgcgcgccagcaaagcggcaggcgatgacgccaacgcaaaccagtatgaagcgctcgccagcgcccgtcagaaaggcattgaaacgcacctgtggaacaatcaggaaggctggtatgccgactacgatctgaaaagcaaaaaggtgcgtaaccaactgacggcggccacgctgttcccgctgtatgtcaacgcggcggcgaaagatcgcgccagcaaagtggctgccgcgacccaggcgcacctgttgcagcctggcggactgtccaccacctcggtgaaaagcgggcagcaatgggacgcccccaatggctgggcgccattacagtgggtggcgaccgaagggttgcagaattacgggcaggacaacgtcgcgatggatgtcacctggcgcttcctcactaacgttcagcatacctacgaccgcgaacaaaagctggttgagaaatatgacgtcagcagtacgggaaccggcggcggcggtggagaataccctcttcaggatggtttcggctggaccaacggcgtgacgttaaaaatgctcgacctgatctgtccaaaagagaaaccgtgcgacagcgtaccggccactcgccccgcagcgccaggcgcttcccagcctgcgccgcaaaaacaggttgaaaccacgccgtaa

SEQ ID NO: 74767 - DNA, 1023 bp, Citrobacter koseri
atgctgctcacaagacggagattcgctcaggcgatggcctctgcgctgctgtttcgccacctccctggcattgcgcagacaccgctgacgtttgctattggccgcccgccggaaggcaatattattcgccgcgtggtgagcgctggtgcgcccgccgatgtgttactgctggccgtcgcgccggaaaagctggtgggtttctcctcttttgatttctcgcgccaggcggcgattcccttccccgagtccattcgggcgttgcccaaactgggcaggctggcggggcgcgccagcacgttgtctctggaaggactgctggccctgcatcccgatctggtagtggattgcggcaacgccgatgaaacctggctttcgcaggcgcgccaggtcagcgctcagacccggattccgtggctgctgattaacggtgaactgcggcaaacgccggaacaactgcaagccgcgggacaagcgctgggaatggaggcgcgtactgccgctcaggcggcgctggctcagcgcttcattgcgcaagcgctcgcgttttcccacacgcctgctgccggtattcgtttttatgcggcgcggggcgcccgaggtctggagacgggattacagggatcgctgcatacggaagcggcagagttgctgggattacacaacgtagcgcgaatcccaggacgaagcggactggcccaggtctctatggaaaacttactcacctggcagcccgacatcattctggtacaggatgccgccacggcgcactacctgcgtcacgaccccgtctggcaaggcgttaaggcggttgcggacaaacgcattcttttcctgagcggcctgccgtttggctggctggatgcgccgccgggcattaaccgtttactcgggctgcgccggttgcatgcctggctggacccgaacgttaatcaacattttaaagacgatatggtgcgttatgcgcgcctgttctggcatacgtcgctgactgacgaacagtatcaacagtgggcgatcatctga

SEQ ID NO: 74768 - DNA, 987 bp, Citrobacter koseri
atgagaacgaccaccctttctgtcctgatgctggggattgcccttctctgtattgcctttgccactgtatcgggcgcttatcacctcgatgcccggcaggtgctggcgatgatcttcagccatgacacggtgccgacacaggatcaaatcgtgttctggcagatccgcctcccccgcattctcgccgcgctgctgctgggcgctgcgctggcgggcgcgggcacgacgtatcaggggatgtttcgcaacccgctggtctccccggatattctcggcgttgccgccggagcgggtttaggcgcatgtacggcgattttgctgggcctgccgattttgtttatccagctctacgcgttcggcggcggtctgctggtggttgctggcgtctggctgattacccgccgggtgacgcgtcacgaccccgtattaacccttgtgctggtgggtatcgcgctcggtacgctgtgcggcgcgggaatttccctgataaaaacgctggccgatccctatacccagttgccctccatcaccttctggttactcggcgggctctctaccatcacgctgcatgatctttgcttctcggcgccgctgattctgttcggcgccatccctttgctgctactgcgctggcgtatgaatttactgacgctttcagatgatgaagcccgttccctgggcatcaacgttacccgccttcggctcgcgctgattgtctgcgcgacgctcatcaccgccagcacggtggcgattgccgggattatcggctggataggcttagtcgtgccgcatatcggcaggttgctcaccggcaataaccaccagcagttgcttcctgtctcaatgggcgccggcgccattttactgctgctgaccgacacactcgcgcgcgcaatcagcagtacggagattccactcggtatcctcaccgcatttatcggcgcccctttctttttgctgcttctgctgcgcggaggacgccaatga

SEQ ID NO: 74769 - DNA, 759 bp, Citrobacter koseri
atgacacgactgacggttcaccacgccaacctgggatacgctcgacgcccggttttgcgcgacgtctcttttaccgtaccggcgggagaaatttgctgtttactcggcgcaaacggcagcggcaagaccacgctgatgcgcaccattcttggcgttctccccttgatcagcggcgacatcctgcttgatggcgtggcggtgcagcgtttttcagaccgggagcgcgccagcgccattgcctgggtgccacaggcgcacgacggcgcgttcgccttcaccgctctggatatggtgatgatggggctgacgccgaaaatggcggcattcgccgttcccggcgccagggagcgagaaattgcccaccagcagctcgccgcgcttgaaatcgtccatctggcgcaccgacgctggaacaccctgagcggcggagagcgtcaactggtgctgatcgcccgcgctctggcgcaacgccctcgcctgctactgctggatgaacccgcctccagcctcgactttggccaccagatccgcctgctcgacacgctggtgacactgaaaaaaacggggatggcgctactgatgtcaacccatcatccgctccatgccagggcgatagccgacagcgtcgtgcgcgtggagtccgacgaccaggtatcgcaaggcgcgccagagcgccagcttgctgccgacaatctggccgcgctttatcgggtctcgcccacacaaatccaccgccatctttttggcgatcagcaataa

SEQ ID NO: 74770 - DNA, 813 bp, Citrobacter koseri
atgctcattgatgacattgattttgcagacctctaccgccagcagctattgcaggcgaaacgaacggaaaaaacgcccgaccattgggataaacgggcagagaaaatggcagaaaactgcgcgtcgccgacggacacctacctgcaacagctgatggaaaaaatggatttgcagggcgtgaactcgctgtttgatatgggctgcggccctggcaccgtctcgctggcgttagcgggcaaaataccgcatatctgcggcgtggattacagccccggaatgctgcgcgttgccgcccgtcgtgcgacagagcaacgggcaacccatgttcactgggtgcaacgcgcctgggaagaggactggagcgatcttccgcgctgcgatatcgccgtggcctcccgctcaacgctcgttgcggatatgcgccaggcgatgacaaaactcaacaaccaggcgcggctgcgcgtctataccacgcacctggtcagttcctcttttgtttcccccactatccagcgcgcgttgggtcgcgaggttatcgagctgcctaactatatttatgccctcaatgtcctgtaccagatggggatctgcgcccatgtcgattttatccgtggacagaactgccagcaggacaacagcacctgggaacgctttgctgagaacgttcgctggagcatgggcgacatcagcgatgaagagcgtgagcgtctgtaccgctggtatcaacagcaggatgccagcgcccttgccccggccagccgggactgggcgctgatctggtgggacagcattccacaaaaggcgctgaaatga

SEQ ID NO: 74771 - DNA, 858 bp, Citrobacter koseri
atgatctacttctcacacgcacaaacggacgcattgctgctggaggatattcagggaggcgacctgaccacgcgcgctctgggcatcggcaatctgccaggccgcatgaccttccgccatcgccagggcggctgcgtgagcggcattgccgtggccagacaaatgttgcagtcgctggggctgaccgtcctggagcagatgaacgacggcgagcgcgccgcagccggtcaacgattgatcagcgtcagcgggaatgcggcggcgctgcaccagggctggaaggccgtacaaaacgtactggagtggagctgcggcgtttcacactatctcgacagcatgcttcacatcctacatagccgttaccccgacgggcaaatagcctgcacgcgtaaagccattcccggcacccggctgttagccgcacaggcggtgctcgccgcaggcggaatcattcaccgcgccgggtgcgcggaaaccgtgctgctgtttgcaaatcaccgccgctttctcgcccccggtaacgactgggccggggccatttcgcagttgcgccgtcatgccccggaaaaaaagatcgtcgtcgaagcagacacccccgaggaagcccttgaagcgctccgcgcaggccccgacgttttgcaactcgacaaatttaccccacatcaggcggcggaggtggcccgggcggcgccttcactggccccccattgcacgctggcgctgactggcggcatcaacctcgccactctggcgagttatctcgactgtggtatcaggctctttattacatccgcaccgtactatgcaccaccgatggatatcaacgtcatcctgaacccggacgaaagtgacatataa

SEQ ID NO: 74772 - DNA, 1971 bp, Citrobacter koseri
atgaaattcactcagagttgtctttacacggcattatcggtagcttttgcgcataatgcgtttgctgggcaagaaagcgacaccatgaccgtctggtcgagccccgcctctgcggcgaccaccacggtgcttggtcaacaaaccatgcaggatctggataagcagaatgtggcgcaggcattaagcgtcatccccggcgtggcgttgcaaaaatcaggcaaccgcaacgaacagcaggtcaaagttcgcggttttgacagccgccaggttccgatctttttcgacggcgtgccggtttacatcccttacgacggcaacctcgacttagggcgcttcctcacctcggacattgcctccgttgaggtgtccaaaggctactcatcgctgttgcaaggccctaaccagatgggcggcgcgatcaacatcaccaccaaaaaaccgacaaaacctctcgaagggagcatcggttatcgccagggatggagccggagcaaagataacgcccacgatatgcacgcctcgtttggcgccagtaatgagctgggttatctgcaagtcagcggtagccagttgaagcaggatttcctgggtctgccgcacggggtggacaacgccattgcaggcagcaacgggaagatgatcaactcgtcggcagatgataaacggggcattgttaagttgggcttcacgccgcgcgaaaatgacgagtacaccctgacctatatcaaccaggacggtgaaaaagacaacccgccatacgcaggcaccagcagccagaagtcgcgctactggcagtggccgcaatacgataaagagagttattactatcagggcaccacgcatctgggcgatcgctttacgctgaaaagccggctttatcgcgacacctttgaaaacacgctgatgatgtacaactcccttgccgacctgaaaaacaagaaaggcagctatagccactattctgattacagcgatggcgcagggttacaactcgccgccgaaatgcgtgaaaacgatctgctctcgttcgccgttaactggaaagatgacgtccaccgtgaaaaaggcgcgccgcatgcggcatacgatcgctatgaagaccgtacctggtcgttagccagcgaataccagtgggccgcagccgataatgtggatgtcgtggccggtattagctatgactggcgtgacagtctggaagggatgaaacacgaaaaagacggcagcgtaacccactacgacgacaacaaccagtcggcgtttaactggcaggtcatgaccaaataccacttcgcaaacgaggacacgctggcgctctcttactctgaccggacgcgtttcccgacgctcaaagagcggtataccacgtcgaaaccggcgtataaccaggtggctatcgtcaacccgcagttaaaacccgaacgcgcccgcagcgtggatctgacctggaacggttcgctgacccgcgactggggattcgaggtcagcgtgtactataaccgtgtgaccgacgcaatcctgtcgcacaacattgatgccgatacgatccagaaccgcaatagcggccgggtggattacaccggtctggatgccggaatcaaaggcaatgtgtctgaaatgctggatgtcgggctgagctatgggctgatccacgcggacgtcaagcgtgatgaaatcggtgaaatcaccgatttgccaacgcagacgctcaccgcatggatgacgctcaagccgtgggaaccgctgagtgttacgctgtcagaagaagcgcgttcctccagctacagcaattcagacggttcacagaaagcgggcggatttgccattacccatatccgcgcggattatgcggtgggctacggttttagcgtcaacgcgtccgtgaacaacctgttcgatacgaagtatgcctacagcgaagggtttatcgaggaaggccgtaatttctgggccggggtggaatataagttctga

SEQ ID NO: 74773 - DNA, 2115 bp, Citrobacter koseri
atgaaaacaactcatcgtttcacattacgcgcgctctctggatgtatcaccttagccctgactgtcccgtcttatgctgaagaggcaaaagagtcgaccattgtggtcaccgccgccgggcaggagagccttcttccggcctggaccaacagcgccaccaaatccgccgtgccggaaagcaaaacgccgcaggtgatcaacaccatcgacaggcaggagattgagcaacgccacgccaactcggtgaatgaaattctgcgctacgcgccgggcgtgtcaacggaagttcgcggtaatacctcctatatgagtgaatataagattcgcggttttacggtggatcaggagtattacaacggcctgcaactgccgtacaacgtgaccgggaataccaaagcgcgtattgatccgctgctgattgaaagcgtggatattctgaaaggcccggcctcggtgctgtacggcaatggctcgccgggtggactggtaaacatccagagtaaaaaaccgcaggcggaacagaaaacggaagtgggcttcaacaccggcacccgtaatctgaaagagggttatctggattcaaccgggcaaatcagcgacagcgactggaactaccgtttactcggcaaagcgacggaaggggatgatcaaccgcatacctcccgctatgaaaactatctggttgccccgtccgttacctggcaaccggacaacaaaacgcgtctgacgattgatgcgctggcgcagaatacaccgtcgctgtcgccttccaacccgctgcccatttcttatctgcgttcagagtatgcggggcgccgtgattttgccggagatgagtggagcggctttaagcagcgtcaatggatgctgggttacagctttgaacaccagtttgacagcggctggggcttcaatcagaaagcgcgctactttgatgtggatacccaccagcgcagcgtctactccaccggaaatacggggaatccggtctgggagttgaaccggtttgcctacacgaccgatgaagacctgaaaagttttaacatcgacaaccaggttacgaaaacggtagtgtcaggcgactggcaacaccatctgctggcaggcttcgattaccagaagctcgacagccattacttctaccgctatgccagcagcacgccggggatcgacatgcgccacccgaactatcgtcagattcataccgacgatttagggctgagtactgcgcagaataaccgtctctcttatcagcagaatggttattatcttcaggatcagattgcgtttggcggcctgaacctgctggcgagcgtgcgttacgatgactatcgttccgccacgaccgactatctgcaaaacggcgataaaacctggatttcacaggatcgtgtcaccaaacgtttcggtgcgttatatgcgtttgaaaatgggatctctccatttatcagttattccgaaggctttaagccgatctcgccgcaagggacactgacctcgaaagaggtgaagccgaccaccagcaagcaggttgagggcggggtgaaatacctgctggcggaatacgcgaccacctttaccgcatcggtgtttaatatccgccagaaaaatgtgctttccgccacgccaacctgggattaccgccagaccggcgagattgagtcaaaaggggccgaactgtcgattgtcagccgtccggcggataacgtcacgctgatcgccaactatgcctatacccatgcgatcaacacggaagatgaaacgtatgaaggcaaacgtccgactcaggtgccggaaaacgcgtttaacctgtggggcgattacacctttgataatacgccgctgcgcgggctgaacgttggcgcgggcgtccgttataccgggccgatggagatctcgccagctaacgacaaaggcaaactcggcggcacgacgcagtatgatatggccgtctcttaccgtctgggagaggcgatcccatcgttgagcggggtgacgctgaaggccagtgcgcagaatattaccaacaaagagacgtttagctgttacgacgacaacaactgctggattggtcgcgaccgcaccgttcaggttggcgccagctacagcttctga

SEQ ID NO: 74774 - DNA, 255 bp, Citrobacter koseri
atgggaattattgcctggattatttttggtctgattgcaggtgttatcgctaagctgattatgccgggtcgcgatggcggtggttttatactgacctgtattctcggtatcgttggtgcggttgtcggcggctggctggcaaccatgtttggtatcggcggcagcatcagcgggttcaatcttcacagtttcctggtggccgtcgtcggggcgattgttgtgctcggcgtttttcgccttctgcggcgcaattaa

SEQ ID NO: 74775 - DNA, 735 bp, Citrobacter koseri
gtgagtcactacagtgagcagttcctgaagcaaaacccgttggcggtattaggcgtactcaaagatttaaacaagagccaggcgccgctacgcatctcctgggccggggggcagttcatcagtaagattctggacgttaacgcggaaaaactggtgatggatttcggcagccaggactatgaaaacatcgccgttcagcgcgccagacagataaccattaccgcagaaacgcagggcgcgaaagtggagttcacgctggatcagctcaccagtggcgaataccggcagcttccggcatttattaccgcgctgccgcccgagctgtggttcgttcagcgccgggagtatttccgtatttccgcgcctttacatcccccctactactgccaggcgaaaatgccggacgacaacacgctacgttttcgcttgttcgatctctcgctgggcggcatgggcgcattgctggaagcgacaaaacccgccggattaaccgaaggcatgcgcttttcgcaaattgagctgaacatggggcaatggggcgttttccactttgacgcccagcttatttccatcagcgaacgcagagtgattgacggtaaaaatgagacgattaccactccccgcctgagctttcgttttctcaacgtcagcccggcggtggagcgggaattacagcggattattttctctcttgaacgggaagcgcgggaaaaatccaataaggtgcgtgaataa

SEQ ID NO: 74776 - DNA, 612 bp, Citrobacter koseri
gtgaaattgagatggtttgcttttttggttgtattgctggcgggctgtagttcaaagcaggattacaagaatccgccctggaacgccgaagtcccggttaaacgggcaatgcagtggatgccgataagtgaaaaagccggggaagcctggggcgtcagcccgcgtctgattaccgcgatcatcgcgattgaatcgggcggtaatccgacggtggtcagtaaatccggggcggttgggttaatgcaactgaaggcctcgacatccgggcgcgatgtttatcgtcatatgggctggagcggcgaaccgtcgaccagcgaactgaaaaacccggagcggaatatctcgatggggacggcgtacctgagtattctggaacacgggtcgctggccggtattaacgatccgcaggtgatgcagtacgcgctggtggtctcttatgccaatggcgcgggcgcgctgctgcgcacgttctcttccgatcgcaaaaaagcgattgagaaaatcaacgatctgagcgcggatgagtttttcgagcacgttgccaaaaatcatcctgcgccacaggcgccgcgttatatctggaaactccagcaagcgctggatgcgatgtaa

SEQ ID NO: 74777 - DNA, 915 bp, Citrobacter koseri
atgtccctgtttcacttaatcgccccatcgggttactgcatcaatcagcaagcggctttacgcggcgtacaacggctgatcgaatctggccaccaggtggataacgccgccgtcattggccgccgtgaccagcgttttgccggttcagacgccgagcgtctggcggatgttaacggcctcgcccgcctgacgacgcccgataccattgtgatgccggttcgcggcggttacggcgccagtcgtctgctggagagcattgactggcaggcgctcatcgcacggcaacaggcgaccccgctgctgatctgcggccacagcgattttacggtgattcagtccgccctgctggcgctgggcaaggtgataacgtttagcggccccatgctggcggcgaatttcggcgcggaggagatgaacaccttcaccgagcgccatttctggcgggccttgtgcaacgcgcagttcacggtggagtggcaaggtaacggcccgacatgtgaaacggaaggcacgctgtggggcggcaatctggccatgctggtctcccttatcggcaccccgtggatgcccgccattgaaaatggcgtactggtgctggaggatattaacgagcatcctttccgcgttgagcgaatgcttctgcaactgtatcacgcggggattctgacccggcagaacgcgctgatattgggcagtttcagcggtagcgcgccgaatgattacgatgccggttacgatcttgacgcggtttacgcgtttctgcgttcccgtctctccatccccgtcgtgaccggtctggattttggtcatgagcaacgcaccgttacgctgccgctcggcgcccacgcggtgctaaaaaatggcgaaaatggcagccaactcacactctccggccatcctgtcctcaaatcataa

SEQ ID NO: 74778 - DNA, 1734 bp, Citrobacter koseri
ttggatgccgcagccattattagtcttttcattttaggttcagtcctcgtaacctgtagtatcttattaagttcattctcatctcgtcttggcatccctattctggttatctttctcgcgattggcatgctcgcgggtgttgatggcgttggcggtatcccgtttgataattatcctttcgcgtacatggtgagtaacctcgcgctggcaattattctgctggatggcgggatgcgtacccaggccagctcctttcgcgtcgccctgggcccggcgctctcgctcgcgacggtaggggtactgattacctccggtctcaccggcatgatggccgcctggctctttcatttgaatctcatcgaagggctgctgattggcgccattgtcggttcaacggatgcggctgctgttttttctctgctgggtggtaaagggcttaacgaacgcgtcggttcgacgctggaaatcgaatccgggagtaacgacccgatggcggttttcctgaccatcacgctgatagagatgattcagaaacatgagaccggcctgagctggctcttcgtgctcgatatcatccagcagtttggactggggatcatgctggggttaggcggcggatatctgcttcagcaaatgattaaccggattgccttgcccaccgggttatatccgctgctggcgctgagcgggggaattctcgttttcgccgtaaccaccgcgctggaaggcagcggcattctggccgtttacctgtgtggattcctgctgggcaaccgccctatccgcaaccggtttggcatcctgcaaaactttgacggcctggcctggctggcgcaaatcgccatgttcctcgtgctgggactgctcgttacgccatccgatctgctgcctatcgccgttccggcgctggtgctgtcggtctggatgattctggtggctcgcccgctctccgttttcgcgggcctgctgccgtttcggggctttaatctgcgtgagcggatcttcatcagttgggtggggctgcgtggcgccgtacccattatcctggcggttttcccgatgatggctgggctggagaatgcccgactgttttttaatgtcgcattctttgtggtgctgatatcgctgctgttccagggaacgtccctgacctgggcggccaaaaaagccaaagtggtggtgcctcccgtcggctggccggtttcgcgtatcgggctggatattcacccggaaaacccctgggagcagtttgtctaccagttgagtgaagataagtggtgcgtcggcgccgcgctgcgcgatctgcacatgccgcaggagacccgtatcgccgccctgtttcgcgacaacgtgctgttccacccgaccggaagcacccgtttacgcgaaggcgacgttctgtgcgttattggacgtgagcgcgaccttccggcgctgggcaaactgttcagccagtcgccgccggtcgcgctggatcagcgttttttcggcgattttattctcgaagccaatgcgaaatttgctgacgtcgccctgatttacggcctggacgagggaacggaatatcgcgataaacagcagacgctgggggaaatcgtgcagcagttgctgggcgccgcgccggttgtgggcgaccaggtggagtttgccggcatgatctggacggtcgcagagaaagaagacaacgccgtgcgtaaggtcggggttcgcgtcgcgggggatgaaatggaataa

SEQ ID NO: 74779 - DNA, 1071 bp, Citrobacter koseri
atgacccgccctatactggccagccttgacctgcaggcgatgaaacaaaatcttggcattgtgcgccaggccgccccggacgctcgcgtctggtcggtggtgaaagccaatgcctacggacatggtatcgagcgtatctggacggcgttgggggcgaccgacggctttgccatgctcaatctcgaagaggcgattacgctgcgagagcggggatggaaagggccgatcttaatgctggaagggttcttccatgccgacgagctggccatatatgacacataccgtctgacgacctgcatacacagcaactggcagatcaaagtgttgcaaaacgcgcgcctgaacgcgccgctggatgtttatctcaaagtgaatagcggcatgaaccggctgggttttttacccgagcgggtacagaccgtctggcagcaactgcgggcgctgccgaatgtgggcgaaatgacgttaatgtcgcactttgccgatgctgagcacccggaagggatcgaccaggcgatgacgaaaatcgcccatgcgacggaagggcttgaatgccgtcgctcgctgtcgaattcagcggctacgctgtggcatcctgaagcccatttcgactgggtgcgacccggaattattctgtatggcgcatcgccgtcagggcagtggcgggatatcgccaataccgggctgaaaccggttatgaccctgagcagccagattattggcgtacagacgctgaaagcgggcgatcgggtcgggtatggcggacgctataccgcgactcaggagcagcgcatcgggattgtggcggcgggctacgcggatggttatccccgtcatgcgccaaacggcacgccagtgctggtggacggtgtgcgtaccggaacggttggcaccgtgtcgatggatatgctggcggtggacctgacgccgtgcccgcaggcgggtatcggtacgtctgtggaactgtgggggaaagagatcaagattgatgatgtcgcctctgcggcgggaacggtggggtatgaactgatgtgcgcgctggcgccgcgtgttccggttgtgacggcgtaa

SEQ ID NO: 74780 - DNA, 1299 bp, Citrobacter koseri
atgcgagttgtcatactgggaagtggcgtcgttggcgtaaccagcgcctggtatctgtgtcaggctgggcatgacgtcaccgtcatcgatcgtgaacctggcccggcgctggaaaccagcgcggcgaacgccggacaaatttctccgggctatgccgcgccgtgggcggcgccgggtgtgccgctgaaggccatcaagtggatgttccagcgccatgcgccgctggctgttcgcctggacggaacgcagtttcagttgaagtggatgtggcaaatgttgcgtaactgcgacacccgccattacatggagaacaaagggcgcatggtgcgtctggcggagtacagccgtgattgcctgaaagcgctgcgtgcctcaaccggcattcagtatgaagggcgtcagggcggaacattgcagttattccgtaccgcgcaacagtatgagaacgccacccgcgatatcgccgttctggaagatgccggcgtaccgtatcagctactggaatccagccgtctggcggaggttgaacctgcgctggcggaagtggtgcacaaactgaccggcggcctgcgtctacccaatgatgaaaccggagattgccagctgttcactcagcgcctggcgcagatggcggaacaggcgggcgtgacgtttcgcttcaacacgccggtggaaaaactgctgtacgaaggtgaacaaatttacggcgtgaagtgcggggatgacatcatcaaagccgatgcttacgtgatggcgtttggctcttactcgacggcgatgcttaaagggatcgtcgatattccggtctatccgcttaaaggttattcgctgacgattccggtcgcacaggacgatggcgcgccagtttcgactatccttgatgaaacctacaaaatcgccattacccgttttgataagcgcattcgcgtggggggaatggcggaaattgtcggctttaacactgaattattacaaccgcgtcgtgaaacgctggagatggtcgtacgcgatctcttcccgcgcggagggcatgtggaacaagccacgttctggaccgggctgcggccaatgaccccggatggtacgccggtgatcggacggacgcgcttcaaaaacctgtggctgaacaccgggcatgggacgctgggctggacaatggcctgcggttcagggcaattactgagcgatattctttcaggtcgtacacctgctattccttatgacgacctgagcgtagcgcggtacagccctggctttacgccatcacgaccccggcatcttcatggcgcgcataactaa

SEQ ID NO: 74781 - DNA, 1533 bp, Citrobacter koseri
atggctacgattgattccatgaacaaggacagcacacgtttgagcgatggacccgactggacgtttgatctgctggatgtctatctggcggagattgaccgcgtcgcgaaactctacaaactggatacctatccgcaccaaatcgaggtgatcacctctgagcagatgatggatgcctattccagcgtcgggatgccgatcaactatcctcactggtcgtttggcaaaaaattcattgaaaccgagcgcctgtataagcatggtcagcaagggctggcctatgaaatcgtcattaactccaacccgtgtatcgcttatctgatggaagagaacaccattactatgcaggcgctggtgatggcgcacgcgtgctatgggcataactctttcttcaagaataactacctgttccgcagctggactgacgccagttcgattgtcgattacctgatctttgcccgtaattacattaccgaatgcgaagaacgctatggcgtggatgaagttgaaaagctgctggattcctgccatgcgctgatgaactatggcgtcgatcgctacaaacgcccgcaaaaaatttcgttgcaggaggagaaagcccggcagaaaagtcgcgaagagtatctgcaaagccaggtgaatatgctgtggcgtactctgccgaagaaagaggaagagaaagccgtcgccgaaacgcggcgttacccgtctgaaccgcaggaaaacctgctctactttatggaaaagaacgcgccgttgctggagtcatggcagcgcgagatcctgcgcatcgtgcgcaaggtcagccagtatttctatccgcaaaaacagacgcaggtgatgaacgaaggctgggcgacgttctggcactacaccatcctgaatcatctttacgatgaaggtaaagtgaccgaacgctttatgctggagtttttacacagccacaccaatgtggtgttccagccgccgtacaacagcccgtggtatagcggaattaacccttatgcgcttggcttcgcaatgttccaggacatcaaacgcatttgccagtcgccaacggaagaagacaaatactggttcccggatatcgccggttcagactggctggaaaccctgcatttcgcgatgcgtgattttaaagacgagagcttcatcagccagttcctgtcaccgaaagtgatgcgtgatttccgtttctttaccgtgctggacgacgaccggcacaactatctggaaatttcggccattcacaatgaggaaggttatcgcgagatccgtaatcggctttcgtcacagtacaacctgagcaatctggagccgaatattcagatctggaatgtggatttacgcggcgatcgctctttgacgctacgctatattcctcacaaccgcgcgccgctggacaagggacgtaaagaggtgctgaaacatgtgcatcgcctgtgggggtttgatgtcatgctggagcagcagaatgaggatggcagcgttgagctgctggagcggtgcccgccgagaatgaacagcctgtag

SEQ ID NO: 74782 - DNA, 720 bp, Citrobacter koseri
atggtcattaaggcgcagagcccggcgggtttcgcggaagagtacatcattgaaagtatctggaataaccgcttcccacctggcactattttgcctgccgaacgtgaactctccgaacttatcggagtgacgcgcaccacgttacgcgaagtattgcagcgcctggcgcgagacggctggttgacgattcaacacggcaaaccgacaaaggtgaacaatttctgggaaacgtccgggctgaatattcttgaaacgctcgcgcgtcttgatcatgaaagcgtgccgcaactgattgataatctgctgtcggtgcgcaccaatatctccacgatttttatccgcaccgcgtttcgtcagcatcctgataaggcgcaggaggtactggcgacggcgaatgaagtggccgactacgccgatgcgttcgcggagctggattacaacattttccgcggtctggcgtttgcctccggtaatccgatttacggtctgatcctgaacgggatgaaagggctgtatacccgcattggccgtcactatttcgccaacccggaagcccggagcctggcgctcggtttctaccataagctgtcatcgctttgcgaacagggcgcgcatgaccaggtgtacgaaacggtacgccgttacggtcatgacagcggtgagatttggcatcgtatgcagaagaatttgccaggcgatttggccattcagggccgctaa

SEQ ID NO: 74783 - DNA, 1545 bp, Citrobacter koseri
atggagctctcctggggtcgcgcattctggcgcaactttctgggccagtcgcctgactggtataaacttgcattaatcgcttttctaattgctaatccactgattttcttcatcaacccatttgtagcgggctggctgctggtcgctgaatttattttcacgctggcgatggcgctgaagtgctatcccctgctgccaggcggattactggcgattgaagcggtcatcattgggatgaccagcgcagcgcatgtgcgcgaagaggttgccgccaacctcgaagtgctgctgctgctgatgttcatggtcgcaggcatctactttatgaagcagttgctgctgttcatttttacccgcctgctgcttagcattcgttccaagatgctgctgtcgctcgcattttgtatggctgccgccttcctgtccgctttccttgatgccctgaccgttgtcgcggtggtcatcagcgtcgcggtcggcttttatggcatttatcatcgcgtcgcctctgcgcgcggcgaagagaacgatctccaggatgacgaccacctcgaccagaacagtaaagcggtgctggagcagtttcgcggtttcttgcgcagcctgatgatgcatgcgggcgtaggcaccgcgctgggcggcgtcatgacgatggtcggtgaaccgcagaacctgattatcgccaaagcggcgggctggcatttcggcgatttcttcctgcgcatgtcgccggtgacggttccggtactaatttgcgggctgttcacctgcgtgctggtcgagaagctgcgctggtttggctatggtgaaacgctgccggaaaaagtgcgtcatattttgcaggagttcgacgatcaaagccgtcaacgtcgtacacgccaggacaaactcaatctgtttgtgcaggcgattatcggcgtctggctggtgacggcgctggcgctgcatctggcggaagtgggcttgattggcctgtcggtcattattctggccacgtcactcaccggcgtcaccgatgaacacgcgattggcaaagcatttactgagtccttgccgtttaccgcgctgttgacggttttcttctccatcgtggcggtcattatcgatcagcatcttttcgccccgatcatccagttcgttttacaggcttccgaacatgcgcagttaacgctgttctacctcttcaatggcctgctgtcgtccatttccgataacgtgttcgtcgggacgatttacatcaatgaggccaaagcggctatggaaagcggcgcaatcagcatgaaacagtacgaactgctggcggtagcgatcaacaccggcaccaatttgccgtccgtggctacgccaaacggccaggcggcatttttgttcctgctcacctctgcgctggcgccgctgattcgtctctcttatggccgtatggtctggatggcgttgccatacacgctggtgctcaccctcgttggtttactctgcgtcgagtttaccctcacccccatcacggagtggatgacgcaatctggctggttagctacattctcataa

SEQ ID NO: 74784 - DNA, 531 bp, Citrobacter koseri
atgttgcgatttttaaaccagtgctcacggggtcggggcgcgtggttactgatggcgttaactgcctttgcgctcgaaatggtagcgctgtggttccagcacgtcatgctgctcaaaccttgcgtgctatgtatttacgaacgtagcgcgttattcggcgtgatgggcgcgggtctggttggcgctgtcgcccctaaaacgccgctgcgttatgtggcgatagcgatctggatttacagcgcctggcgcgggttgcagttggcttatgaacacacgatgatccagcttcatccttcgccgttcatgacctgtgattttgctgcgcgcttcccgacgtggctgccgctggataaatggctgccgcaggtcttcctggcttccggcgactgcgccgagcgtcagtggtcgtttttaaccctggagatgccgcagtggctgttggggatttttgcggcgtatctggcgatcgcgatcctggtgttgattgctcaaccgtttaagccgaaaagacgcgatctctttagccgataa

SEQ ID NO: 74785 - DNA, 342 bp, Citrobacter koseri
atgtcccatttacgcatcccggcaaactggaaaattaaacgttccactcccttcttcaccaaagagaatgtgccagccgcactgctctcccaccataacaccgctgcgggtgtctttgggcaactctgcgtgatggaaggcacagtcacttactacggtttcgctaacgaagacgccaaagaacctgaactcaaagtggtcattaacgccggtcagtttgcgaccagcccgccgcaatactggcaccgcatcgaattaagcgacgatgcgcaattcaatatcaatttctgggttgaagacgacaaccacggcgatgaaatgtatcaggcgaaaaaagcgtaa

SEQ ID NO: 74786 - DNA, 447 bp, Citrobacter koseri
atgagcgacatacctttctggcaaagtaaaaccctggatgacatgaccgatgccgagtgggagtcgttgtgtgatggatgcggacagtgttgcctgcacaaactgatggatgaagacaccgacgaaatctatttcaccaacgtggcgtgtcgtcagttgaatatcaaaacctgccagtgtcgtaactatgaacgtcggttcgaatacgagccagactgcattaaactcacccgcgataatctgcctacctttgaatggttgccgatgacctgcgcctatcgcttgttagcggaaagaaaggggctgccgggctggcatccgttgttgaccgggtcgaaagcggcgatgcacggcgagcgtatttccgtgcgccatattgcggtgaaagaatctgaagtgcgggactggcaggatcacatcttaaacaaaccttcatgggcggactga

SEQ ID NO: 74787 - DNA, 660 bp, Citrobacter koseri
atgtatcaacatcacaactggcaaggtgctctgcttgattacccggtaagtaaagtggtttgtgtaggcagtaactacgcaaagcatattaaggagatgggtagcgcaacgccggatgaacccgttctttttattaaaccggaaacggcgctgtgcgatctgcgccagccgctggcgattccaacggacatgggcgccgttcaccatgaagtcgaactggcgatattgattggctcgactctgcgtcaggcgacggaagaccatgtccgcaaggcgattgccggttatggcgtggcgctcgatctgacgctgcgggatattcagggcaaaatgaaaaaagccggtcagccctgggaaaaagcaaaagggtttgataattcctgcccgctgtcaggttttattccggtttcggagtttcatggcgatccgcaaaataccgcgctcgggttgaaagtgaacggcgaaatccgtcagcaaggctcgacggcggagatgatccaccacatcgtgccgctcgtcgcctacatgagccgtttcttcacgctcaaggcgggagacgtgatcctgaccggcacaccggaaggcgtcggcccgttgcaaagcggcgacgagctggaagtcagttttaacggtcaaacgctgacgacgcgcgtcctgtaa

SEQ ID NO: 74788 - DNA, 294 bp, Citrobacter koseri
atgttttgtgtgatctatcgaagtagcaaacgcgaccagacctatttatacgtcgaaaaaaaagacgatttctcacgggttcctgaagatctgatgaagggattcgggcagccaacgctggcaatgattctgccgttggatgggcgtaagaaattagtgaatgccgacctggagaaagtaaaacaagcgttaaccgaccaggggtattatttacaactgccgccaccgccggaagatttactcaaacaacatctttctgcgccgggcgaaaataaaccagacgctaaaagttaa

SEQ ID NO: 74789 - DNA, 708 bp, Citrobacter koseri
atgtcaaacacgccaatcgagcttaaaggcagtagcttcaccttatcagtggttcatttgcacgaagctgaacccaaggttattcgtcaggcgttggaagacaaaatcgctcaggcacctgcttttttaaaacatgctcccgtggtcattaacgtcagcggccttgaaagtccagtaaactggcctgcgctgcaagaggtggtgacgtctaccggtctgcgtattatcggcgttagcggctgcaaagacgcggcgctaaaagcggaaattgacgagatgggtcttcctttactgactgaaggtaaagagaaagtcgctcgttccgccccggttgaagtcccggcaccgagcgcgccaccgcaaaatgttacccccatcacaaaaacgcgattaattgacgtaccggttcgttccggtcagcgcatttatgctccacaatgtgatctaattgttacaagtcacgtcagcgctggcgcagagttaatcgcagacggtaatatccacgtttatggcatgatgcggggccgtgcgctggcaggcgccagcggcgatcgggaagcgcaaattttttgtacccatctgacggcagaactggtgtctatcgcaggtgtttattggctgagtgataaaatcccggcagaattttatggcaaagcggcgcgtctgcggttagcagataacgctttggcagttcaaccgttgaattga

SEQ ID NO: 74790 - DNA, 813 bp, Citrobacter koseri
atggcacgcattattgtagttacttcgggtaaagggggcgttggcaagaccacctccagcgcggccatcgctactggtttggcccagaagggaaagaaaactgtcgttatcgatttcgatatcggtctgcgtaacctcgacctgatcatgggatgtgagcgtcgtgtcgtttacgatttcgtgaacgtgattcagggcgatgcgacgctaaaccaggcgttaatcaaagataagcgcactgagaatctctttattcttccggcatcgcaaacccgcgataaagacgcgctgacccgtgagggcgtagcaaaagttctcgatgacctgaagacaatggatttcgactttatcgtctgcgactctccggcgggcattgaaaccggcgcgctgatggcgctctattttgccgatgaagcgattatcaccactaacccggaagtctcctcagtacgtgactctgaccgtattctgggcattctggcgtcaaaatcccgtcgtgctgaaaacggcgaagacccgattaaagagcatctgctgctgacgcgttacaacccaggccgcgttaacagaggcgatatgctcagcatggaagacgtgctggaaatcctgcgcatcaaactcgtgggggttatcccggaagatcagtcagtcctgcgcgcatccaaccagggagagccggttattctcgacatcactgctgatgcgggtaaagcctatgcagataccgtagaacgtctgttgggagaagaacgtcctttccgcttcattgaagaagagaagaaaggtttcctcaaacgcctgttcggaggataa

SEQ ID NO: 74791 - DNA, 267 bp, Citrobacter koseri
atggcattactggatttttttctctcgcggaaaaagagtacagccaacatcgctaaagagcgactgcaaatcattgttgcggagcgccgtcgcagcgacgcggagccgcattatttaccgcagttgagaaaagatattctcgaagtcatctgcaagtatgtgcaaattgatccagaaatggtcaccgtacagcttgagcaaaaagacggcgatatttcaattctcgagcttaacgtgacattaccggaagccgaagagtccagataa

SEQ ID NO: 74792 - DNA, 918 bp, Citrobacter koseri
atgaataatctacctctcctgaatgatttacgcgtctttatgcgggttgcccggcgtgcgggttttagcacggttgcggaagagctgggcgtttcgccggcgtttatcagcaaacgggtggcgttgctggagcagacgctgaacgtggtgctgctccaccgaacgacccggcgggtgacgatcacggaagagggcgagcgtatttacgaatgggcgcagcgcattttgcaggatgtggatcagatgatggatgagctgtctgacgtgcggcaagtcccacaaggtatgctgcgtattatcagcagttttggcttcggtcggcggattgttgcgcccgcgctgtcggcactggcgaagcagtatccacagctggagttgcggtttgacgttgaggaccggctggtggatctggtgaatgaaggggtcgatcttgatattcgtattggtgatgagattgcctctaatttaatcgcgcataagcttggaaccaattaccgtattttatgcgcatcgccggcgtttctggcgcagcacggcacgccgaagcagctcagcgatctggcagcctttccgtgtctggtgattaaagagcgtgaccatccctttggaatctggcagttacgcacaaaagaacgggaatattcgattaaagtgacagggtcactgtcctccaaccacggtgagattgtgcatcaatggtgtctggacgggcagggcattgcgttgcggtcgtggtgggatgtctgcgataacattgccagcggccatctggtgcaggttctgccggaatattatcagcctgccaatatctgggcggtctccgcatcccgtctttcctcgtcggcaaaaattcgcattacggttgaatttctgcgccgctattttcaggagcgttacccgaagttcagcctggaataa

SEQ ID NO: 74793 - DNA, 1083 bp, Citrobacter koseri
atgaagaaaacctgtcgtattgccgctattcccggagacggtattggtaaagaagtcctgcctgaaggtattcgcgtattgcagaccgccgccgaacgctgggatctctcgctcagctttgagccgattgagtgggccagttgcgaatattatgcgcatcacggtacgatgatgcctgacgactggcatgcgcagctaaaatcgtttgatgcgatctatttcggcgccgtcggctggccggataccgtcccggaccatgtttcattgtggggatcgctgctgaaattccgccgcgaatttgaccagtacgttaacctgcgtccggtacgtctgtttcccggcgttccctgcccgctggccggaaagaaagcgggagatattgatttctacgtcgtgcgcgagaacaccgaaggggaatactcctcgctgggcgggcgcgttaatgccggaaccgagcacgaagtggtgattcaggagtcggtatttacccggcgcggagtggatcgcattctgcgctacgcctttgagctggcgcaaagccgaccgcgcaaaacgctgacgtccgccaccaaatccaacggactggccatcagtatgcctttctgggatgaacgcgttgaagcaatggcgcagcactacccggagattcgttgggataagcagcatatcgacattctgtgcgcccgctttgtcatgcagccggagcgctttgacgtggttgtcgcctcaaatctgtttggcgatatactgtccgatcttggcccggcctgtaccggcaccatcggcattgcgccttccgcaaacctgaacccggaacgcacattcccgtcgctgtttgaaccggtacacggctctgcgccggatatatacggtaagaatatcgccaaccctgttgccaccatctgggcgggcgccatgatgctggatttcctcggcaatggcgatacgcgctaccgggaggcacatgacggtattctcgcggccattgaacaggttatcgccgacggcccgaaaacaccggatctgaaaggcgccgcctccacccggcagatggcggaggctatctgtcaggcgctgcgctaa

SEQ ID NO: 74794 - DNA, 1116 bp, Citrobacter koseri
atgatcactacggacgacgcgctggcgacgttatgtgaagcggttcgggcatttccggcgattgcccttgatacggagtttgtccgtacgcgcacctattacccgcaacttgggcttatccagctgtttgatggcgagcatgtcgccctgattgatcctcacggtattaccgactggtcgcctctgcgcgccgtgttgcgtgataccgcgataaccaaatttttgcatgcgggcagcgaagatctggaggtttttctcaacaccttcggagaactgccgcaaccgctgatcgacacgcagatccttgccgcattttgcggccgccccttgtcctggggttttgccgcgatggtggaggagtttacgggcgtcgcgctggataaaagcgagtcccgtaccgactggctggcaagaccgttaaccgaacgtcagtgcgagtatgcggcagcggacgtctggtatttgttaccgatcaccaaaaaactgatggtcgaaaccgaagcatccggctggctgcctgcggcgctggatgagtgccgtctgatgcagcagcgtcgtcaggaaattctggcgccggaagatgcctggcgtgacatcaccaatgcgtggcagttgcgtacccgtcaactggcctgcctgcaactgttggccgactggcggctgcgcaaggcgcgtgagcgcgatctggcggtcaactttgtggtgcgcgaagagcacctgtgggcggtggcgcgctatatgccggggagtctgggtgaactggacagcctggggctttctggcagcgaaattcgttttcacggtaagacgctgatcgcgttagtggagaaggcgcaggcgctgccggaagagacgctgccggaacccttgctgaacctgatggatatgccaggctatcgcaaggcgtttaaagccatcaaagcgctggtggcagatgttagcgcgacgcacaacgtcagtgcggaattgctggcgtcgcgtcggcaaatcaaccagttgcttaactggcactggaagttaaaaccgcaggccacgcagccggaactcatctccggctggcgtgcggaactgatggcggaaaaactgcggaatctgttgcaggaatatccgctgtaa

SEQ ID NO: 74795 - DNA, 1752 bp, Citrobacter koseri
atgttaacgacttgtttattaactggggttgcgatgacgacgaacactcattttagaggtgatgctttgaagaaggtttggcttaaccgatatcccgctgatgtcccggcggagatcaatcctgaccgttatcaatccctggttgaattatttgaatatgccgtcgtgcgttacgccgaccagcctgcgttcgtcaatatgggggaggtgatgaccttccgcaaattggaagagcgcagccgggcattcgcggcctatttgcaggaagggctgggcctcaaaaaaggcgaccgcgtcgcgctaatgatgccgaatctgctgcaatacccggtcgcgctgtttggtattttgcgtgccgggatgatcgtcgtgaatgtcaacccgctgtatacgccgcgtgagcttgagcatcagctcaatgacagcggggcggcggctatcgtgatcgtctctaactttgcccacacgctggaaaaagtggtcgataaaacgtccgtacagcacgtaattctgacgcgcatgggcgaccagctttctaccgcgaaaggtacgctggttaactttgtcgtgaaatacattaagcgtctggtgccgaaatatcacctgccggatgcgatctcttttcgccgcgcgctacacgcaggttatcggatgcagtacgtgaagcctgagctggtcaccgaagatctggcgttcctgcaatacacgggcggtacaaccggcgtagcgaaaggcgcgatgctgacgcaccgcaacatgctggcaaacctggagcaggtaaaaggcacctacgggccgttgctgcatgaggggaaagagctggtggtgacggcgttgccgctgtatcacatttttgcgttgaccatgaactgcctgctgtttattgaactgggcggacaaaacctgctcatcactaacccgcgcgacattccgggcatggtgaaagagctggcgaaatatccgtttaccgcgatgaccggcgttaacaccctgtttaacgccttgctgaacaacaaagaattccagcaactggacttctctacgctgcacctttctgctggcggcggtatgccggtacagcatgcggttgcagaacgttgggtgaaactgaccggacaatatttgcttgaaggctacggtctgaccgagtgcgcgccgttggtcagcgtgaacccgcatgatatcgattatcacagcggcagtatcgggctgcccgttccctctaccgatgtaaaactggtggatgacgagggcaacgaggtgccaacaggcgagcctggcgagctgtgcgtgaaggggccgcaggtgatgctgggatactggcagcgcccggacgcgacggatgaaatcgtcaaagacggctggctttacacgggggatatcgcggtgattgatgacgaagggttcctgcgcatcgtcgatcgcaaaaaagatatgattctggtttccggctttaacgtctatcctaatgaaattgaagacgtggtgatgcagcatcctggcgttcaggaagtggcggcagtcggcgtgccttcgggcagcagcggtgaaagcgtgaaaatctttgtcgtgaagaaagacccggcgttgaccgacgaggcattgattaccttctgtcgtcgccagttgacggggtataaagtgccgaagctggtggagtttcgcgacgaactgcctaaatcgaacgtcggaaaaattttacgacgagaattacgtgacgaagcgcgtggcaaagtagacaataaagcctga

SEQ ID NO: 74796 - DNA, 582 bp, Citrobacter koseri
atggcggttcaacaacaggtaatgaaaggaattctggcgggagtggtcgcgttaacgctgagtggctgcgttaccgtcccggatgccatcaaaggttccagtcccacgccgcagcaggatctggtgcgggttatgaatgcgccgcagctgtacgtcggccaggaagcgcgttttggcggtaaagtggtggatgtgcaaaaccagcagggaaaaacgcggctggaaatcgccagcgtgccgcttgataacggcgcgcgtccgatcctcggtgaggcttcgcgagggcggatttatgccgacgtgaacggcttccttgacccggtagacttccgtgggcaactggtgacggtcgtcgggccgattaccggcacggtggacggtaaggtcggcagtacgccgtataagtttatgctgatgcaggcaacgggctataaacgctggcaccttactcagcagatcgtcatgccgccgcagccgatcgatccctggttctacggtggacgaggctggccgtacggctatggcggttggggatggtataacccaggccccgcacaggttcaaacgatcgtaactgaataa

SEQ ID NO: 74797 - DNA, 696 bp, Citrobacter koseri
atgcgaattctggctatcgataccgccacagaagcgtgttccgttgccctgtggaatgacggtaatatcaacgctcattttgagctttgcccacgagaacatacccaacgtattttgccgatggtgcaggatatcctggccgccaacagcattacgcttaccgatatcgacgcgctggcgtttggtcgcggccccggcagttttaccggcgtgcgcattggcattggcattgcgcaggggctggcgctgggcgcgaacctgccgatgactggcgtttcaacgctggcgacaatggcgcagggcgcctggcgtaaaagcggcgcgacgcgcgtgctggcggcgattgacgcacgtatgggcgaagtctactgggcggaataccagcgtgatgaaaatggcgtctggcacggggaagagaccgaggctgtgttaaatcccgggctggttagcgaacggttgaagcagctttccggggagtgggctactgttggcacaggctggcctgcatggcctgatctgggtaaagacagcggtctggctttgcgcgatggcgacgttttgcttccggcggcggaggatatgctgcctctcgccagtcagatgctggcagcggggaaaaccgtcgcggttgaacaggccgaaccggtttatttacgtaacaacgtcgcgtggaagaaacttccgggcaaagaatga

SEQ ID NO: 74798 - DNA, 1911 bp, Citrobacter koseri
gtgacggacgattttgcagcagacggtcagttggctaaagcgataccgggatttaaaccgcgcgaaccacagcggcagatggccgttgccgtcacgcatgctattgaaaaatcacaaccgcttgttgtcgaagccgggacagggacaggcaaaacttatgcctacctcgcgccggcgttacgcgccggaaaaaaagtgatcatctcgacgggatcgaaagcgttgcaggatcagctctacagtcgcgatcttcccaccgtctcaaacgccctcaaattcaccggtaaactggcgctgttgaaagggcgctctaactatctttgtctggaacgtctcgaacagcaagcgctggcgggcggcgatttgccggtacaaattttaagcgatgtgattttgctgcggtcgtggtcgaatcaaaccgaagatggcgacatcagtacctgcgtcagcgtagcggaagactcgcaggcgtggccgctggtcaccagcaccaatgacaactgtctgggcagcgactgcccgctgtataaagactgttttgtggttaaagcgcgtaaaaaggcgatggacgctgatgtggttatcgtcaaccaccatcttttcctcgcggatatggtggtcaaagagagtgggtttggcgaactgatcccggaggcggaggtgatgatcttcgatgaggcccaccagcttcctgatatcgccagccagtatttcggccagtcgctctccagccgacagcttctcgacctggcgaaagattttaccatcgcctaccgcacggaattgaaagatactcagcagttgcagaaatgcgctgaccgactggcgcagagcgcgcaggattttcgcctgcaactgggcgagccgggctatcgcggaaatttacgtgagctgctggccgacccacgggtacagcgcgcgctattgctgctcgacgatacgcttgagctttgctacgacgtggcaaaactgtctctggggcgttccgcattgctggatgccgctttcgagcgtgcgaccttgtatcgcgcgcggctgaaacgcttaaaagagatcaaccagccagggtacagctactggtacgaatgcacgtcgcgccatttcacgctggcgctcactccgcttacggtcgcggataaatttaaagaggtgatggcgcagaaacccggcagctggatttttacctctgccacgttgtcggtgaacgacgatctccatcactttacgtcgcggctgggcattgaacaggccgaatcgatgctgttgcccagtccgttcgactatacccgccaggcgctgttgtgcgtgccgcgtaacctgccgcaaactaaccagccgggctctgcccgacagctggcggcaatgctaagaccgatcatcgaagccaacaatggccgctgctttatgctgtgtacgtcgcatgccatgatgcgcgatctggcggaacagttccgcgccactatgacgctgcccgtcctgttgcagggcgaaaccagtaaaggtcaactgctgcaacagttcgtcagcgccggtaatgcgctactggtcgcaaccagcagcttctgggaaggggtggatgtgcgcggcgatacgctgtcgctggtgattatcgataaattaccttttacctctcctgacgatcccttgctgaaagcgcggatggaggattgtcgtctgcgcggcggcgatccgtttgatgaagtgcagctacccgacgcggtcatcacgctgaaacagggggtggggcgtctgattcgcgattccgacgatcgtggggtgttggtgatttgtgataaccggctggtgatgcgaccgtacggtgccaccttcctggcgagcctgccgcccacaccgcgcacccgggacatcgcccgcgccgtcagatttctcgccataccaacggccgagtaa

SEQ ID NO: 74799 - DNA, 345 bp, Citrobacter koseri
atgactatcatacgtattgatgccgaagatcgttggtctgatgtagtaatccataacaacacgctttattacaccggtgtgccggaaaacctcgacgccgatgcgtttgaacagaccgccaacacgctggcgcaaattgatgcggcgctggaaaaacagggcacccgtaagtcacgtattcttgatgtcactattttcctggccgataaaagcgattttgccgccatgaacaaagcctgggacgcgtgggtcgttgccggtcacgcgccggtacgctgcacggtgcaagccgggctgatgaacccgaaatacagagttgagatcaagattatcgccgcagtgtaa

SEQ ID NO: 74800 - DNA, 180 bp, Citrobacter koseri
atgtttgcaggtttaccttcactcagccacgagcagcaacaaaaagcggtagagcgcattcaggaactgatgtcgcaaggaatgagcagcggacaggcaatcgcgcaggtggcggatgagctgcgcgccacccacaccggcgagcggatcgtggcgcgttttgaggatgaggacgaataa

SEQ ID NO: 74801 - DNA, 1362 bp, Citrobacter koseri
atgaagacattatcacccgctgttattattttaccgtggcgcccggacgccgccgagtactattttgccccgctgagccatcagccctgggccatgctgctgcattccggccatgctgaacatccgcataatcgttttgatattctggtggccgaccccgtggcaacgctgtcgacacacggcgaagagacccgcgtgcgcgataagcatggcacgaccacgaccgccgacgatcccatgaccgtgttgcaggcggcgctggcgtctgcgggcatccagccgccatatgaccccaatctgccgtttcagggcggcgcgctggggctgttaggttacgaccttggccgccgttttgaatccctgcccacgctcgcacagcgcgatatcaccctgccggatatggcgatcggcatttacgactgggccttagtcgtcgatcatcgcagacagaccgtctctctgctgagccataccgatgttcacgctcgccttgaatggctggcgcgccagcaggcgccggtgcgaaagcccttcgcgttaacctccgcatggcaatcaaacatgactcgcgcgcagtacggtgaaaaattccgccaggtgcagagctggctgcacagcggcgactgttatcaggttaacctcgcccagcgttttcaggctgactatcagggagatgaatggctggccttcgtgcggcttaatcacgctaaccgcgccccgttcagcgcgtttttgcgcctggaggacggtgcgattctgagcctttctcccgagcgctttattcagtccgaagaggggcacattcagactcgcccaatcaaaggcacccttccccggctggacgacccgcaggcggatcgccagcaggcgctaacgctcgcgatgtcggcaaaagaccgcgcagaaaacctgatgattgtcgatttgatgcgtaacgacgtcggccgcgttgccgttccggggtcggtcaaggttcccgagttgtttgtggttgaacccttcccggcggtacatcatcttgtcagtaccattaccgcccgtttgcccgataatttacatgccaccgatctgctgcgcgccgcttttcctggcggttcgattaccggcgcgccaaaagtccgggcgatggagatcattgacgcgctggagccgcacaggcgcaacgcctggtgcggcagcatcggctacctgagtttttgcggcaacatggataccagcatcacgatccgcacgcttaccgctgtagacgggcatctctattgctctgcgggcggcggcatcgtagcggacagccaggaggacgcggaatatcaggagacgtttgataaagtgaatcgaattttgcagcaactggagaactga

SEQ ID NO: 74802 - DNA, 579 bp, Citrobacter koseri
gtggaaaacagcagcctgacccttgatgattttttatcacgctttcaacttttgcgcccgcaggtgaatggtgagacgttaaaccgtcgtcaggctgccgtgctgatcccggtggttcgccgcgcccggccgggtctattgctgactcagcgttcagcgcgcctgcgcaaacacgccggtcaggtcgcgttccccggcggcgccgttgacagcagcgatgcgtcgctgattgccgctgcgctgcgtgaagcgcaggaagaggtggcgatcccgccggaatccgtcgaagtgattggcgtgctgccgcccgtagacagcgtcacgggttttcaggttacgccggtggtcggcattattcccccgaatctgcattatcacgccagcgaagatgaggtggcctctgtctttgagatgccgctttcagaagctctgcgtctggggcgttatcatccgctggatatttatcgacgcggcgattcacatcgcgtatggctttcgtggtatgagcattatttcgtctggggaatgaccgccggaataattcgtgagctggcgctgcaaattggcgtgagaccctga

SEQ ID NO: 74803 - DNA, 1365 bp, Citrobacter koseri
gtgattagtctattcgacatgtttaaggtggggattggtccctcatcctcccataccgtagggcctatgaaggcgggtaaacagttcgtcgatgacctggtcgaaaaaggattactggatagcgttacccgtgtcgccgtcgacgtgtatggttcactgtcgctcacgggtaaaggtcaccacaccgatatcgccattattatgggtctggcgggtaacgaacctgccaccgtggatattgacagcatccctggttttattcgcgacgttgaagcgcgcggtcgcctgttactggcgcagggccagcacgaagtggattttccccaggataacgggatgcgttttcacaatggcaacctgccattgcatgaaaatggaatgcagatccacgcgtacaatggcgaaaccgtcatttatagcaaaacgtattattccatcggcggcggctttattgtcgatgaagagcattttggtcaggacgccgccaatgaggtcagcgtcccttatccgtttaaatcggcgaccgaaatgctggaatattgcaacagcaccggtctgtcgctctccgggatggtgatgcagaacgaactggcgctgcacagcaaaaaggaaatcgaagagtatttcgccaacgtctggcagaccatgcaggcgtgtatcgatcgcgggatgaataccgaaggggttctgccggggccgctgcgcgttccgcgtcgtgcttccgcactgcgtcgcatgctggtttccagcgataaactgtccagcgacccgatgaacgtcattgactgggtcaatatgtttgcgctggcggtgaacgaagaaaacgccgcaggcgggcgtgtcgttacggcgccgaccaacggcgcttgcggaatcgtgcctgcggtgctggcttactatgaccacttcattgaacccgtcagcccggatatctacacccgttacttcctggccgctggcgctatcggcgcgctgtacaagatgaacgcctcgatttccggcgccgaagtcggctgccagggggaagtcggcgtcgcctgctcaatggcggcggcaggactggcggagctgcttggggccagcccggagcaggtgtgcgtcgccgcggaaatcggcatggagcacaacctggggctgacctgtgacccggttgccggtcaggttcaggtgccgtgtatcgagcgtaacgcgattgcttcggtaaaagcgatcaacgcagcgcgtatggcaatgcgccgtaccagcgccccgcgcgtctcgctggataaagtcattgagaccatgtacgaaaccggcaaggacatgaacgcgaaataccgcgaaacatcacgcggcggactggcgattaaagtccagtgtgattaa

SEQ ID NO: 74804 - DNA, 1599 bp, Citrobacter koseri
atgcaaacagcacaacggatcattaaaaattatcgccgcaatcgtttcatcgtctgcacggtctgtgcgctgatcacgcttatcctcacattgagtatccgatttatttcggagcgaaatataaatcagcatcgcaccgaaacgttcgccgctcacgccgtagagacgctggatgaagtgctccgccctctacaggccgggcgcgatctcctgctgcccctggtaggacaaccctgcccggccgcgcattttcccctgcgtaagcaggtcgccagactgcaaaccgtgcgttccattggtctggttcagaacggtattctctactgctccagtatctttggctcacgcgacgtgccgattcaccagctacaacccgatctgcccgcgccgaacaacctgttgctgctgtctaccgatcagtccctgctcaaagacagcccgattctgattcagtggtatccgtcatcgcctgatggcaaaaacgggctctttgagatcgtcaatattgatcttctggcgatgatgctgcttgaaccgcaacagccgcagatcgccagcgcaagcctgacggtcggcaaccgccacttactctatggtcagggggtggtggaggcgctacccgccctgaacggtgaaaaacgttatcagcgcgcatcccagcacttccccttcaccatcagcgtgacggggcccggcgctggcgagctggcgctacgccacctgccgacgcagctaccgctggcggtgatgctgagtttactggtgggataccttgcctggctggcaacggccagcagaatgagtttttcatgggagatcaatctcgcccttgccgcccgtgaatttgaactgttttgccagccgctgttaaatgcccgtacgcagcaatgcgtgggggttgagatcctgctgcgctggaataacccgcgacagggatggatttctcccgatgtttttatccctatcgctgaagaacacaacctgatcgccccccttacccgctatgtcattgcggaaaccattcggcagcggcattttttcccgatgaacagccagttccatattggcatcaacgttgcggccagccattttcgtcatggcatgctattaaaagatctcaatcattactggttcagcgcccatcctgttcagcaacttgtgcttgagctgacggaacgggatgccttactggacgtcgattatcggctaatgcgtgaacttcaccgcaaaggggtgaagctcgccattgatgactttggcaccggcaacagctcgctgtcatggctggagaaattgcgcccggacgtgctgaagatcgacaaatcatttaccgcggcgatcggtactgatgcggtgaactccacggtgaccgatatcatcatcgcgctggggcaaagactgaatattgaactggtggcggaaggcgttgaaacgcgagagcaggcgcaatatttgcggggacacggcgttcaggcgttacagggatttctgttcgcaaggcctatgccgcttcacgattttcctcagtggctggcgggtagcgcaccgccgcccgcccggcataacggacacatgacgcccgttatgccgtttcgttag

SEQ ID NO: 74805 - DNA, 1560 bp, Citrobacter koseri
atggaattcttaatggacccctcaatctgggcgggtttgctcacgcttgttatcctcgaaattgttctgggtattgataacctggtctttatcgcgattctggctgacaagctgccgccaaagcagcgtgataaggcgcgtcttatcggtttgtcgctggcgctggtgatgcgtctggtcttgctgtccatcatttcgtggatggtgaccttaacgaaaccgctctttaccgtctgggatctcaccttctcagggcgcgatctgatcatgctcatcgggggtctcttcctcctgtttaaggccacgacggagctgcatgagcgcctggaaaaccgcgagcatgactcggggcacggcaaaggctatgcgagtttctgggtcgtggtaacgcagatcgttatccttgatgccgtcttctcccttgacgcggtaattaccgccgtgggtatggttaaccatctgccggtgatgatggctgccgtggtgattgcgatggcggtgatgctgctggcgtctaagccgcttacccgtttcgtcaaccagcatccgacggttgtagtgctctgtctgagcttcctgttgatgatcggtctgagcctggtggcggaaggttttggcttccatattccgaaagggtatctgtacgctgctatcggtttctcaatcgtcatcgaattgttcaaccagattgcgcgtcgtaactttattcgccatcagtcaacgttaccgctgcgtgcacgcaccgcagacgccatcctgcgactgatgggtggtaaacgtcaggcgagcgcgcagcacgagtctgacagcccggcgacggtgcctgtacctgaaggcgcgtttgctgaagaagagcgttatatgatcaacggcgtgctgaccctggcgtcccgttcgctgcgcggcattatgacgcctcgcggtgaaatcagctgggtggatgctgacctgagcgtggatgaaatccgcgaacagttactctcttctccgcacagcctgttcccggtgtgtcgcggcgaactggatgagatcatcggtattgttcgcgcgaaagaactgctggtggcgctggaagagggcgtggatgtggccgcgattgcttcggaatcaccagcgattgtcgtcccggaaacgctggacccgattaatctgctgggcgtcctgcgtcgcgctcgcggcagcttcgtcatcgtcaccaacgagtttggcgtcgttcaggggctggttacgccgctggacgtgctggaagcgattgccggtgagttcccggatgccgacgaaacgcctgagatcattaccgaagcgggcggctggctggtgaaggggggaacggatctgcatgccctgcaacaggcgctggatgtcgataacctggtgaacgacgaggaagatatcgccaccgtcgcaggattggttatcgccgtaaacggtcatatcccgcaggtgggcgatgttatcgacgttgcgccgcttcatatcacgattgtcgaagcgaacgactaccgtgttgatttggttcgtattgttaaagaacaacctgctcaccacgaagacgaataa

SEQ ID NO: 74806 - DNA, 966 bp, Citrobacter koseri
gtgaccattgctattgttataggcacacatggttgggctgcagagcagttacttaaaacagcagaaatgctgttaggcgagcaggaaaacgtcggctggatcgatttcgttccaggcgaaaatgccgaaacgctgattgaaaagtacaacgctcagttggcaaaactcgataccagcaaaggcgtgctgtttctcgttgatacatggggaggcagtccatttaatgctgccagccgtattgtcgtcgacaaagagcactatgaagtcattgctggcgtcaatattccgatgctggtggaaacgttcatggcccgcgatgacaatccgagctttgacgaattagtcgctctggcggtagaaaccggtcgtgaaggcgtgaaagcgctgaaagcgaaaccggttgaaaaagccgctccggcgccggttgctgcgccaaaagcggcggcgcccgctaaaccaatgggaccaaacgattacatggtaatcggtctcgcccgtatcgatgaccgtttgattcacggccaggtcgccacccgctggaccaaagagaccaacgtcacccgcatcatcgtcgtgagtgatgaagtagcggcggacaccgtacgtaaaacgctgttaacacaggtggcacctccgggcgtaacggcgcatgtggtagacgttgccaagatgattcgtgtctacaacaacccgaaatacgcaggcgaacgtgtgatgctgctgttcaccaaccctaccgatgtggaacgtatcgttgaaggcggcgtgaaagtgacttccgtaaacattggcggtatggctttccgtcagggtaaaacgcaggttaataacgccgtttccgtcgacgagaccgatatcgacgcctttaaaaagctcaacgaacgcggtatcgagcttgaggttcgtaaagtttccaccgatcagaaactgaaaatgatggatttgattgccaaagtggcgaaataa

SEQ ID NO: 74807 - DNA, 801 bp, Citrobacter koseri
atggagattaccactcttcagattgtgctggtgttcatcgtcgcatgtatcgcgggtatggagtcggtacttgatgaatttcagttccaccgtccattggtggcctgtacgctaatcggtgccgttcttggggacatgaaaaccggtattatcatcggtggtaccctggaaatgatcgcgcttggctggatgaacatcggtgctgccgttgcgcctgatgccgcgctggcttccattatttcaaccgtactggttatcgccggtcatcaaggcattggcgcaggtatcgcgctggcgattccactggcggccgcaggtcaggtgctgaccatcatcgtacgtaccatcaccgtggcattccagcacgcggcggataaagcggccgatagcggcaacctgacggcgctgtcctggatccacgtatcctccctgttcctacaggcaatgcgtatcgcgattccggcggttatcgtggcgatttctgtcggcaccagtgaagttcagggcatgctgaatgcgatcccggaagtcgtgaccagtggtctgaacatcgccggcggcatgatcgtggttgtcggttacgcaatggtcatcaacatgatgcgcgcgggctatctgatgccgttcttctacctcggcttcgtcactgcggcattcactaacttcaacctggttgctctgggcgtaattggcgcggtaatggccatcctctacatccagctgagcccgaaatataaccgcgtagccggtgcgccagctcaggctgctggtaacaacgatctcgataacgaactggactaa

SEQ ID NO: 74808 - DNA, 852 bp, Citrobacter koseri
atggttgatatgactaaaactaccactgagaaaaaactcactccgagtgatattcgtggcgtgttcatccgttctaacctgttccaggggtcatggaacttcgaacgtatgcaggcgctgggcttctgcttctccatggtgccggcgatcaaacgcctgtacccggaaaacaacgacgcgcgtaaacaggcgatcagacgtcacctggagttcttcaacacccatccttacgttgccgctccggtactgggcgttacgctggcgatggaagaacagcgcgccaacggcgcggagatcgacgatggtgccatcaacggtatcaaagttggtctgatggggccgctggcaggcgtgggcgacccgatcttctggggtactgttcgtccggtattcgccgcgctgggcgcgggtatcgcgatgagcggcagcctgctgggaccgttgctgttcttcattctgtttaacctggtgcgtctggcgacccgttactacggtgtggcttacggctaccgtaaaggcgtcgatatcgttaaggatatgggcggcggcttcctgcaaaaactgactgagggggcgtcaatcctcggcctgtttgtcatgggagcgctggttaacaagtggacgcacgtcaatattccgctggtggtatcacgcatcactgaccagacgggtaaagaaaacgtcaccaccgtgcagaccattctcgatcagttgatgccgggtctggttccgctgctgctgaccttcgcctgtatgtggctgttgcgtaagaaagtgaacccgctgtggatcatcgttggcttcttcgtcatcggtatcgccggttacgcttgcggcctgctgggtctgtaa

SEQ ID NO: 74809 - DNA, 459 bp, Citrobacter koseri
atgactgtcacggacctggtgctggttctttttattgtcgcgttactggcttacgccatttacgatcagttcatcatgccccgccgtaacggccccactctgcttgcagtgcctctgctgcgtcgtggtcgtgttgatagcgttatcttcgtcggcctggtcgccattcttatctacaacaacgttaccagtcacggcgcgcaaattaccacatggttattatgtgcactggcgctgatggggttttatattttttgggttcgcgcccccaggatcatcttcaaacagaaaggttttttcttcgccaatgtctggatagaatataaccgtattaaagagatgaatttatcggaagatggcgtactggtgatgcaattagaacaacggcgcctgcttattcgcgtacgaaatatcgacgatctggaaagaatatataagcttcttgtttcatctcaatga

SEQ ID NO: 74810 - DNA, 567 bp, Citrobacter koseri
atgaatatcaccgcaactgttcttctcgctttcggcatgtcaatggatgctttcgcggcatcgattggtaaaggcgccacgttacacaaacctaaattctccgaagccctgcgcaccggccttattttcggcgcggttgaaacgctcaccccgctgatcggctgggggctgggtatgctggccagtaaattcgtactggaatggaatcactgggttgcgttcatcctgctggtgtttctggggattcgtatgattatcgaaggcgttcgtggcggtaatgacgaagatgacgagccgttacgccgccacagtttttggctgctggtcactaccgctatcgccaccagcctggatgcaatggccgttggcgtcggtctggcgttcttgcaggtgaacattattgcgaccgcgctggctatcggctgtgccacgttaatcatgtccacgctgggcattatggtggggcgctttatcggcccgctgctcggcaaacgggcggaaattcttggcggggctgtacttatcggtatcggcgcccagatcctctggacacacttccacggttaa

SEQ ID NO: 74811 - DNA, 810 bp, Citrobacter koseri
atgtcgttttcttgtcccctttgtcatcagccacttgcgcaggtgaaaaacagttttatctgcccacaacggcatcagtttgatgtggcgaaagagggatacgtcaacctgttgcccgtgcagcataaacggtcacgggacccgggcgacagcgccgaaatgatgcaggcgcgccgggcattccttgatgccgggcattatcagccgttgcgcgatgccatcgtcaggatacttgctgaacggctggacgaaaatacaacgtcgattctggatatcggctgcggtgaagggtattacacgcatgccttcgccgaaacgctggcgtcaggcactacatttggtctggatgtcgcgaaagtcgccattaaagcggcggcgaaacgttatccgcaggtgacgttttgtgtggcgtcaagccatcgtctgcctttcgccgacgcctctatggatgcgattgtcaggatttatgccccctgtaaggctgaagagttagcgcgagtggtaaaaccgggtggttgggtaatcaccgctacgccggggccgcgccatctgatggcgctaaaagggctgatctatgatgaagtgcgcttacatgccccgcatactgagcagcttgaagggtttacgttgcagcaaagcatggcgttagggtatgagatgcggttgcgcggtaatgaggccgttgctttgctccagatgacgcctttcgcctggcgtgcaaaacctgacgtatgggagcggctggcggcttgccagcagtttgattgccagacggatttcagccttcacatctggcaacgtgagcgttaa

SEQ ID NO: 74812 - DNA, 1746 bp, Citrobacter koseri
gtgaaaaagaaaagcgacggcgccgtgcgtaattttgctcccatccgttttgttctgctgtgcgtggcgattttgctgagcatggggttattgctgggacgcgtggcgtggttacagatcatcacgccgacaaatctggttaaacaagaggacaggcgttcgttacgtgaggtcaccacggcgtcgccacgcggcatgattaccgacagagaagggcgtccgttagccgttagcgtgccggtcaatgcggtctgggccgacccgaagacgatcgtcagtaaaggcggcgtggggtataaccaacgctggcaggcgctggcgcagacgctgcatctttcactggctacgctggctgagcgggtaaacagcaatccagccgggcggtttatctatctggcgcgccagatttcgccgcagcaggccgaatggatcgataagctcaatcttcctggcattaacctgcgtgaagagtcccggcgtttttatccggcagggcatgtggcggctaacctgattggctttaccaacattgacgggcaggggattgaggggattgagaaaagttttaatgcccaactgacggggaaacccggttcccgccttgttcgcaaagataagtttggtcatgtcatcgagaatataaccgaaacaaatcctgtgccggcgcatgagcttcagctcagtattgatgaacgtctacagactgtgacggaggatgcgctggataacgccgtcacctggaacaaagcggagtccggcgcggcggtactggtcaacatcgcgacgggggaaattctgtcgatggcgagttttccggactttaatccgaataaccgggaaggcgccgtgctggatgattttcgcaaccgtgccatcagcgatacctttgaaccgggttccacggtcaagccgctggtgatcatgacggcgcttcagcagggcattgtccagcccgacagcgtgattgatacgcatccgtttaatcttgacggccaccggattcgtgacgtggggtattacccggagctgagtttgaccggaatcctgcaaaaatcgagtgataccggcgtgtcgcgtctctcgctcgctatgccggttcaacgactgctggatacgtataaaggctttggctttgggcagtctacgggactgggactcaccggggagagcagcggcttactgccgcagcgtcgttactggagcgatctggatcgggcgacgtttgcctttgggtacggtctgatggtgacgccgctccagctggcacacgtatatgccaccatcggcagttttggtatctaccgaccgctttccattacgcgtatcgatccgcccgttgtggggacgcgtgtgatgcccgccgaactggtgcatcaggttgagcatatgatggagagcgtcgcgctccccggcgggggaggaaccaaagccgcagtcagagattatcgcgtggcggtaaaaaccggtacggcgaagaaaatcggcgatgacggtaagtatgtcgataaatacgtggcctatacggcgggcgtggctccggccagcgatccgcagtttgcgctggtggttgtgattaacaatccgcaaaacggatcttactatggcggcgcggtgtcggcgccggtgttcagccagattatgggcgatgttctgcgcctggaaaacgttaaaccggacggtatgcctgctgactccgatcacctgttagtgatgcacggcaaccgcctgtcgtccccctcgctgtaa

SEQ ID NO: 74813 - DNA, 210 bp, Citrobacter koseri
atggcaaagattaaaggtcaagttaagtggttcaacgagtctaaaggttttggcttcattactccggctgatggcagcaaagatgtgttcgtacacttctccgctatccagggtaacggcttcaaaactctggctgaaggccagaacgttgagttcgaaattcaggacggccagaaaggtccggctgctgttaacgtaacagctatctga

SEQ ID NO: 74814 - DNA, 288 bp, Citrobacter koseri
atgaacgaagttctgaattctggcgtactgacttttacgtctttgattgtatcggtggtggttctgattgtcgggctggtcctgtggttttttgtgaaccgggcaagttcaagaacaaatgagcagattgagctgcttgaagcgctgctggatcagcaaaagcggcaaaatgccttgctacgccgtctgtgcgaagctaacgagcctgaaaaagtcgctgaggccgagtctgaagcgaaacctcaggaagaggatgacgatatcatccgtctggtcgctgaacggtaa

SEQ ID NO: 74815 - DNA, 240 bp, Citrobacter koseri
atgcgtttgatcattcgcgcgattgttttgattgctctggtatggattggtttattgctcagtggctatggggttctgattggcagcaaggagaacgccgccggtctgggtctgcaatgtcaatatctgaccgctcgcggcaccagtacagcgcaatatgtccatactgacagcggcatcattggtctgtcagactgtcctgtattcagaaaaagcgccgtggtggtcgataacggctaa

SEQ ID NO: 74816 - DNA, 792 bp, Citrobacter koseri
atggctatcgcagatctggataaacaacctgattctgtttcttctgtgctgaaggtttttggcattctgcaagcgctgggtgaagagcgcgaaatagggatcaccgagctgtcgcaacgtgtcatgatgtcaaaaagcaccgtttatcgctttttacaaacgatgaaaacgctgggttatgtcgcgcaggaaggtgaatctgaaaaatattcgctgaccctgaaattgtttgagctgggcgcccgtgcgctgcaaaacgttgatctgatccgtagcgctgatattcagatgcgtgaaatttcccgtctgaccaaagagacaattcacctcggtgcgctggatgaagacagcattgtctacattcataaaatcgactccatgtacaatttgcgcatgtattcccgcattggccgccgtaacccgctgtacagcaccgcaatcggtaaagtgctgctggcatggcgcgaccgcgatgaagtcaaacagatactggatggcgtggagtacaaacgtagcaccgcgcgcacgattaccagcaccgaggcgttactgccgatgctggatcaggtgcgcgagcaagggtacggcgaagataacgaagagcaggaagaaggcctgcgctgcattggcgtgccggtgttcgaccgttttggcgtggtgatcgccggtctgagcatttcgttcccgacgctgcgtttctccgaagaacgtctgcatgagtatgtcgctatgctgcacacggcagcgcgtaaaatctctgagcagatgggttacaacgactatccattctga

SEQ ID NO: 74817 - DNA, 1374 bp, Citrobacter koseri
atggacaaaatccaggccgatggcctgccattaccccagcgttacggcgccattttaaccatcattattggtatctcgatggccgtgctggatggcgcaattgcgaatgtcgcgctccctaccattgcaaccgatctccaggcgtccgccgcccgatcgatctgggttgttaacgcttaccaaatcgcgatcgtggtttctctcttatcgctctcgtttctgggggacatgttcggctatcgacgcatctataaatacggcctggtcattttcctgttttcgtcgctgttctgcgcgctgtcggactccctggaaatgctgacgcttgcgcgcgtcgcacaggggtttggcggcgccgcgctgatgagcgtgaacacggcgctgatccggcttatctatccgcaacgccaccttgggcgcggaatgggcatcaactccttcattgtcgcggtgtcttcggctgcggggccgaccattgcggcagcaatcctgtcgatagcgtcatggaaatggctgttcctgattaacgttccgttaggcattatcgcattactgctggctatgcgtttcttacccccaaacagcgctcgcagcaccaaaccgcgcttcgacttgcccagcgcggtgatgaacgccttaaccttcggcttgctgatcaccgctctcagcggattcgcacaggggcaacctttaacgctgattggcgcagaactggcggttatgcttgtcgtcggtttcttcttcattcgccgccagctctcactcccggtgcctttgttaccgattgacttactgcgtattccgctcttttctctgtcgatctgcaccagtatttgctctttctgcgcgcagatgctggcgatggtttcccttcccttctatctgcaaacggtattggggcgtagcgaagtcgagaccgggttattgctgacgccctggccgctggcgacaatggtgatggcgccgctggcgggctatttaattgaacgggttcatgccgggctgctgggcgcgtcaggactgataattatggccacaggactttttgcgctgatgctgctgccagcctcgccgtcagatatcagtatcatctggccgatgatcctttgcggagccggttttggcttattccagtcgcccaataaccacacgattatcacctccgcgccacgcgatcgcagcggaggggccagcgggatgctgggcacggcgcgtcttctgggccagagtaccggcgcggcgctggttgcgctcatgttgaatcagtttgcggacaacggtacgcatatttccctgatgacggcgggcatcctggcgaccgtagccgccattatcagcggtttgcgcatcactcaaccccgctccgtagcgtaa

SEQ ID NO: 74818 - DNA, 882 bp, Citrobacter koseri
atgatgcgaatcgcgctcttcctgctgacgaacctggccgtgatggtcgttttcgggctggtgctgagcctgacagggatacagtcaagcagcgtacaaggcttgctgattatggcgctgctgtttggttttggtggttccttcatttcgctgctgatgtccaaatggatggcgttaaagtccgtgggtggggaagtcattgagcaaccgcgtaatgaaagagaacgctggctgatgaacacggtggcgacgcaggcgcgtcaggccggaatcgctatgccgcaggtggctatctatcatgcgccggatatcaacgcgtttgcgaccggcgcgcgccgtgatgcgtcgctggttgcggtgagcaccggcttgctgcaaaacatgagcccggatgaagccgaagccgttatcgcgcatgagatcagccacatcgctaacggcgatatggtcaccatgacgctgattcagggggttgtgaacacctttgtgatcttcatctcgcgtattatcgcgcagatcgccgcgggcttccttggtggaaaccgtgatgagggtgaaagcagcaacggcaacccaatgatctatttcgcggtggcgatggttcttgaactggtgttcgggatactggcaagcattatcaccatgtggttctcacgtcaccgtgaattccatgcggacgccggttctgcgaagcttgtcggacgtgaaaagatgattgccgcgttgcagcgcctgaaaaccagctatgagccgcaggaagccaacagcatgatggcgttctgcatcaacggcaagtcgaagtcactgagcgagttgttcatgactcacccgccgctggataagcgtattgaagcgctgcgtagcggcgagtacctgaagtaa

SEQ ID NO: 74819 - DNA, 2049 bp, Citrobacter koseri
atgaacactttttttaggcttaccgcgttagctggcttgcttgcaatagcaggccagtccttcgccgtcgatgacattacgcgcgccgatcaaattcccgttctgaaggaagaaacgcagcatgcgaccgtgagtgagcgcgtgacttcgcgttttacacgttcccactatcgtcagttcaatctggatcaggcgttttcggcaaagattttcgatcgctatcttaatctgctcgactacagccacaatgtgctgctggcgagtgatgtggagcagtttgcgaaaagcaaaactgtcctcggcgatgagctgcgtacaggtaaactggatgtcttctatgacctctataacctggcgcaaaaacgccgtttcgaacgttatcagtacgcgttaagcgtgctggaacgcccgatggatttcaccggtaacgacacgtttaaccttgaccgcagcaaagcgccctggccgaaaaatgaggctgagttgaacgcgttgtgggatggcaaggtgaaattcgacgaacttagcctgaagctgacgggcaaggacgataaagaaattcgcgaaacgctgacgcgtcgttacaaatctgcgattcgccgtctggcgcaaaccaacagtgaagacgtgttctcactggcgatgaccgcatttgcgcgcgaaatcgacccgcataccaactacctttctccgcgaaataccgaacagttcaatactgaaatgagcctgtctctggaaggtattggcgcggttctgcaaatggacgatgactacacggtcatcaactcgatggttgccggcggcccggcggcaaaaagcaaggcgataagcgtaggcgatcgcattgtaggcgtaggccagacggggaaaggaatggttgatgtgatcggctggcgtcttgatgacgtggtggcgctgatcaaagggccgaaaggcagcaaagttcgtcttgaaattctgcctgccggtaagggcacgaaaacgcgaaccattacgctgacgcgcgaacgcattcgtcttgaagaccgcgccgttaaaatgacggtgaaaacggtcggtaaagagaaagtcggcgtgctggatattccggggttctatgtggggctgacggatgacgtcaaagtccagctacagaaactggaaaaacagaacgtgagcagcattgttatcgatctgcgcaccaacggcggcggcgcgctgaccgaagcggtttcgctgtccggtctgtttatcccgtctggcccggttgttcaggttcgtgacaacaacggtaaagtgcgtgaagacgccgataccgatggcgtggtgtattacaaaggcccgctggtggtactggtcgatcgcttcagcgcatccgcgtcggagatttttgccgcggcgatgcaggattacggtcgcgcattgattgtcggtgaaccgactttcggtaaaggcaccgtacagcagtaccgatccctgaaccgtatttatgatcagatgctgcgtcctgaatggcctgcgctgggctccgtgcagtacaccattcagaaattctaccgtgttaacggcggcagcacgcagcgtaaaggcgtcacgccggatatcgtcatgccgacggggaatgaagagacggaaaccggcgagaagtttgaagacaacgccttgccgtgggacagcattgatgcggcaacgtacgtgaagtcagatgatttaacgccgtttggcccggaactgctgaaagagcataacgcgcgcatcgcgaacgatcctgagttccagtacatcctgaaggacattgcccgttttaacgcgatgaaagataagcgcaatatcgcttctctcaatttcgcccagcgcgaaaaagagaataacgaagacgatgccctgcgtctggcgcgtatcaacgatcggtttaaacgtgaaggcaagccgcttctgaagaaactggacgatctgccgaaggattataaagagccggatccgtatctggatgaaacggtacggatagcgctggatctggcgcatcttgagaaagagaagcccgcggagcaacccgcaaccagcaaatag

SEQ ID NO: 74820 - DNA, 687 bp, Citrobacter koseri
atggaaaatcaacctaagttgaatagcagtaaagaagttatcgcgtttctggccgaacgttttccacagtgttttagtgcggaaggcgaagcgcgcccgctgaaaattggcatttttcaggatctggtagagcgtgttgagggcgaaatgaacctcagcaagacacaacttcgttccgctttacgtctttatacttcaagctggcgttacctgtacggcgttaagccgggcgcaacgcgtgttgatctcgacggcaacccttgcggtgagctggatgagcagcacgttgaacatgcgcgtaagcagcttgaagaagcgaaagcacgcgtccaggcgcaacgtgcggaacagcaggcgaaaaaacgcgaagctgccgctgcggcaggcgaaaaagaagacgctccgcgccgtgagcgtaaaccgcgtcctgcgccacgtcgtaaagagacgactccgcgtactcctcgcgctgaaaaaccggcggctaaagcaccacgcgcaccacgcgaagaacagcataccccggtgtctgatatttcagcgctgacggtagggcagtcactgaaggtgaaagcaggcaacaatgcgatggatgccaccgtattagaagtcaccaaagatggcgtccgtgtgcagctgaattcgggtatgtctttgattgtacgcgcagaacacctggtgttctga

SEQ ID NO: 74821 - DNA, 447 bp, Citrobacter koseri
atggcaggtgaaaccagttttctcgctaccctggcaaataccagcgcgctgctgtttgagcgcctttcgggcgtcaactgggcggggttctatctgctggaaaacgacacgctggtgctggggccgttccaggggaaactcgcctgtgtgcggatcccggttggacgcggcgtctgtggtacggcggtcgcgcagaaccaggtgcagcgcatcaaggacgttcatgcgtttgacggacacatcgcctgcgatagcgccagcaatgctgaaattgtgctgcctctgacggtagacaatcagataatcggcgttctggacattgatagcacggtatttggccgctttaccgaagaggatgagcaaggcctgcgtgagcttgttgcgcggcttgaaaccgtgcttgcaacgacggattacaaaaaattctttgcgaccgttgcaggataa

SEQ ID NO: 74822 - DNA, 1284 bp, Citrobacter koseri
atggccctgaacaccccgcgactcacgccaacaaagagaataacggtctggtctatcagtgaagcgttgccccgcgcccattatcagcgctgtccccaatgcgacatgttgtttagcctgccgaaaatgcaatcgcaccagagcgcatattgcccgcgttgccaggccaaaattcgcgatggacgcgactggtcgctgacgcgtctggcggcgctggccgttacgatgctgctgctgatgccctttgcctggggcgaaccgctattgcgtatctggctgttaggggtgcgtattgacgccaacgtgatgcagggcatctggcagatgaccaggcaaggcgatccgcttacggccgccatggtgctcttttgcgtggcgggcgcgccgttaattctggtcaccgccattgcttatctatggttcggtaatattctcggcatgaatctgcgtccggtattgctgatgctggagaggctcaaagagtgggtgatgctcgacatttatctggtcggcattggggtcgcctcgatcaaagtgcaggattacgccttcctgcaacccggcctggggctttacgcctttgtggcgctggtgatcctcagtattctgacgctgtcgcatctcaatgtggagcaactctgggagcgcttttacccacaacgccccgcccgacgcccggacgaaaaacttcgcgtctgtctcggatgccacttcaccggttatcctgactcacggggacgttgcccccgttgccatatcccgctacgcctgcgcagaaatcagagcatacagaaatgctgggcggcgctgctggcctctgtcgtcctgctgctgcccgcaaacctgatgccgatatccattatttacgtgaatggcgggcgtcaggaggacacgattttatcgggcattatgtcgctggcgaacagcaatatcgccgtggcggccgtggtctttatcgccagtattctggtgccatttaccaaagttattgtgatgtttacactgctgctcagcatccatttcaaatgtgagcaagggctgcgtacgcgcatcctgctgctgcggatggtgacctggatcggccgttggtccatgctggatctctttgttatttcgttaacgatgtcgctgattaatcgcgatcagatactcgcttttactatgggaccggctgcgttttatttcggcgcagcggtaatattgactattcttgcagtggaatggctggatagccgcttactttgggatgcacatgagtcaggaaacgcctgcttcgccgactga

SEQ ID NO: 74823 - DNA, 2634 bp, Citrobacter koseri
atgagtcaggaaacgcctgcttcgccgactgaagcgcagataaaaacaaaacgtcgtatttcccctttctggctgctgccgtttatcgcattgatgatcgcaggctggctgatttggggaagttatgaagatcgcggcaacaccgtgacgatcgactttatgtcggcggatggcattgttccggggcggacgcctgtgcgctaccagggcgttgaagtgggtacggtgcaggacatcagcctgagtaaagacctgcgcaagatagaagtgcgcgtcagcattaagtcaaacatgaaagatgccttgcgcgaggagacccagttctggctggtgacgccaaaagcgtcgctggcgggcgtttcgggtctggacgcgctggtcggcgggaactatatcggcatgatgcccggcaaaggagccgagaaagatcactttgtcgcgcttgatacccagccgaaataccgtctggacaacggcgacctgatgatccatcttcacgcgcctgacctcggctctcttaacagcgggtcgctggtctatttccgcaaaattccggtgggtcgggtatatgactatgccatcaatcccaacaaacagggcgtcaccattgacgtactgattgagcgtcgcttcaccagcctggtgaaaaaaggcagccgtttctggaatgtctccggcgtcaatgcggatgtcagccttagcggcgcgaaggtgaagctggagagtctggcggcgctggtaaatggcgcaatcgcgtttgactcgcccgacgattcgcagcctgcaaccgcagatgacgcatttggcctctacgaagatttagcccatagccagcgcggcgtcatcgtcaaacttgaacttcccggcggcgacggcctgaaagccgactccacgccgctgatgtatcaggggcttgaagtgggcgagctcaccaaattaacgctcaaccccggcgggaaagtcacgggcgaaatgacggttgaccccagcgtggtaacactcctgcgtgataagacgcgtattgagctgcgcagtccaaagctgtcgctgagcgatgccagtatcagttcgcttttgaccggcaaaacgtttgaactggtgccaggcgaaggcgaaccgcgcagtgaattcgtcgtggtgcctggcgaagaagccctgctccatgaaccaaatgcgctgacgttaaccctgaccgccccggaaagctacggtatcgacgccggtcaaccgctggttctgcatggcgtgcaggtgggccaggtcattgaacgtaagttatccagtaaaggcgttgcgttcacggtggctatcgatccgcaacatcgcgccctgattcagggtgacagcaaatttgtggtcaacagtcgcgtggatatcaaagtcggtctcgacggcgtggagtttctcggcgccagcgccagcgagtgggtgagcggcggcattcgtattttgcccggcacaaaaggcgaaatgaaatccagctacccgctgtacgccaatctggaaaaggccgtggaaaacagcctcagcgacctccccacgaccacggtgagcctcactgctgaaacgctcccggatgtacaaacggggtcagtggtgctgtaccgtaagtttgaggtaggtgaagtgatcaccgtgcgcccacgcgctaacgcctttgatatcgatctgcatatcaaaccggaataccgcaacctgttaaccagcaacagcgtattctgggcggaaggcggggcgaaggtacagcttaacggcagcggcctgaccgtgcaggcctctcccctgtcgcgtgcgctgaaaggcgctatcagtttcgataacctgagcggcgcaagcgccagccagcgtaaaggcgacaaacgaatactctacgcctcggaaaccgccgcccgcgcggtaggtgggcaaatcaccctgcacgcctttgacgccggtaaactcgcagcgggtatgccgattcgttatctcggcatcgacatcggccagatccagacgctggagctgattaccgcgcgcaatgaggttcaggcgaaagcggtgctctacccggagtatgtccagacttttgcccgaagcggtacgcgtttctcggtgatcacgccgcaaatctccgccgcgggcgtggagcatctcgatacgattttgcagccctacattaacgtggagcccggacgcggcaatccgcgtcgtgatttcgaattgcaggaagcaaccatttccgactcgcgctatctcgatggtctgagcatcgtcgtggaagctcctgaggcaggttcgctgaacatcggcacgccagtgctgttcagaggtatcgaagtgggcacggtaacgggcatgacgctgggttcgctgtctgaccgcgtgatgattgccatgcgcatcagccagcgttatcagcatctggtgcgtaataactccgtcttctggctggcctccggctacagtctggactttggcctgaccggcggcgtggtgaaaaccggcaccttcaatcaattcattcgcggcggcatcgcgtttgcaaccccgccagggacgccgctcgcgccgaaagcgcaggcgggtaaacacttcctgctgctggaaagcgaaccgaaagagtggcgcgaatggggcaccgccctgccacgttaa

SEQ ID NO: 74824 - DNA, 1395 bp, Citrobacter koseri
atgcgcgaagcaatgccttcgacactctcttttgacgatttcctcgccgcctgccagcgcccgttacgtcgcagcattcgcgtgaatacgctaaaaatttctgtgaccgactttcttgccctgacggcgccctatggctggtcgctgacgcctgttccctggtgcgaggaaggcttctggatcgaacgcgatgatgaagagtcgttgccgctgggcagcaccgccgaacatctgagcggcctgttttatattcaggaagccagctcaatgctgccggtcgccgcgctgtttgctgaagagaatacgccggaacgcattatggatgttgctgccgcgccgggttcgaaaaccacccagatcgccgcgcggatgaataatcagggcgccattctggcgaatgaattctccgccagccgggtcaaagtgctgcacgccaacatcagccgctgtgggatcagtaatgttgccctgacccattttgatggccgcgtcttcggcgccgcgctcccggagacattcgacgctatcttgctggacgcgccctgttcaggtgaaggcgtggtgcgcaaagatcccgatgcgcttaaaaactggtctgtcgaaagcaacctggatattgccgccacacagcgggaacttatcgacagcgcatttcacgcgctgcgccctggcggtacgctggtctactccacctgcacgctaaatcgcgaggagaatgagtccgtctgtttgtggctgaaagagacctacccggaagcggttgaatttctgcctttaggcgatctgttcccggaggcggagcgcgcgctgacggcagagggttttttacacgttttcccgcagatttacgactgcgaaggtttctttgtcgcccgtttgcgtaaaaccgcagccattcccccgcttcccgcgcctggctataaggtcggcaagtttccgttcgcgccgatgaaggggcgtgaggcgacgcaaatcactcaggcggctaacgcttgtggacttcagtggggagaaaacctgcacctctggcagcgagataaagaggtgtggttattcccggcagagattgaagcgctgatcggaaaagtccgcttttcccgcctgggcataaaactggcggaaagccataataaaggttatcgctggcagcatgaagcggtgatcgccctcgccgatccacatcatgccaacgcattcgagctgtctcatcaggaggcggaagagtggtatcgggggcgggatgtctacccgcaaaccgcgccgtctgccgatgatgtgctggtcacgttccagcatcagcccattggtctggcgaaacggattggttcccggttgaagaacagttacccacgcgaactggttcgcgatggcaaactctttactggtaacgactga

SEQ ID NO: 74825 - DNA, 240 bp, Citrobacter koseri
atgatgaaaaccagtgtgcgcattggcgcttttgaaatcgacgatgccgagttacatggcgaatcgccgggggaccgaacgttaagcattccctgtaaatccgacccagatttatgtatgcaactggatgcctgggatgatgaaaccagcattcccgccattttaaacggagagcactctgttctattccgcacccgttacgatcgtaagtccgatgcctgggtcatgcgtcttgcctga

SEQ ID NO: 74826 - DNA, 192 bp, Citrobacter koseri
atgttcgcactggtactttttgtttgctacctggacggcggctgtgaggacattgtggtggatatctacaatactgaacagcagtgcctgtattcgatggacgaccagcggattcgtcacggcggctgttttccggtcgaagactttattgacggcttctggctacccgctcgccagtacagtgatttttaa

SEQ ID NO: 74827 - DNA, 663 bp, Citrobacter koseri
atgaaacagccggaaaacgtctatcagaaaattgaggggagtcagtggcggcatgtctggattgtcggcgacctccacggctgtttttcgcagttgatggagaaactacgacagtgtcggtttgatccgtggcaggatctgctggtgtcggtgggggatgtgatcgaccgtgggcctgacagcttgcggtgtctggaacttctgcacaaacggtgggtggtcgccgtcagagggaatcacgagcagatggcgttagacgcgctggccgcctcgcagttgtcgttatggtttatgaacggcggcgactggtatgccgcattgtcggcaaaccagcagcgcctggcgagaaaggcgctcgacgactgtcagcgtttaccctggattctggaattgcactgtcagaacggcatgcatgttgtggcgcatgctgattatccgcatcaggtttatgcctggcaaaaagaggtggatttacaccaggtgctatggcgtcgttcccggttgagcgagcggcatgcgggtcagggaaacggcattgccggggccgatcacttctggtttggtcatacgccgctgcgttatcgcgttgatatcgataatttgcactatattgataccggcgcggtatttggcggggaactgacgttggttcaacttcagtaa

SEQ ID NO: 74828 - DNA, 2088 bp, Citrobacter koseri
atgcgtattaaacctctcgcttcacttgtcttatcttgtctgggcgccacaagttttaatgtttttgcagaagatgtcatggtcgtcaccgcatcgggatacgagaaaaagatcaccaatgcggcagccagtgtttctgttatttcacaacaagaattacagaccaataaatataatgatcttggcgatgctctcagggccgttgagggagtggacgttgaaagcagtaccggaaaaacaggggggcttgaaataagtattcgtgggatgcctgccagttatacccttattcttattgacggtattcgtcagaatggaacatcggatgtaacaccgaatggcttttctgcaatgaataccagttttatgcccccactttcagccattgaacgtatagaggttatacgcgggcccatgtctacactttatgggtcagacgccattggcggcgtggtgaatattattaccaaaaaaagcaccgataagtggagcacggccattaatacgggagtgaacctacaggaaagtaataaatggggaaacagcacaaccgcaaatttctggtcaagcggtcccctggtgcctggctcgctggatatgcaggttcgtggaagcacaacccagcgacaaggctccagcattacatcactgagcgacaccgcagaaacacgcgttccttatcccactgagtcgcaaaactacaacatcggcgcgagatttgactggaaagccagcgcaaacaatacgctatggatggatctcgacacatcccgacagcgttatgataacagcgacggtcagcttggtagcctcacgggcggatatgataaaacgctccgctatgagcgcaataaagtgacgttaggacatgacaccgccttaacgtttggtacatggaaatcgtctcttaactggaatgagacagaaaacaaaggacgacagctggtttcctccgctctgacgcccgatcaagcctggagagcgggtgacgatcgtgaactgaaaaataccaatgttattctcaactcggtgcttctcacgccgctgggagaatcacatttactgacggtgggtggcgaatactgggacgcacgaatgaaagatggcgtcgttctggccagttcaggtgaaaagttccatcaaaaaagctgggcgacttaccttgaagatgagtggcatatcctggattctctggcgtttaccgtagggagtcgctatgaacataacgacgtatttggcggtcatttcagtcctcgtggctatctggtctgggatatgacagatgaatggacgctcaaagggggaatcacaaccggttataaagcgccttctcttagccagttacataatggcatcagcggtgtttctggtcagggaacaatcaataccgtcggtaatccagatttaaaacctgaagaaagcaccagttatgaaaccggactttattacgataatggcaatgggttcaatgccaatataaccggattctacactgaatatcgcaataaaattgtttcttattcgattgatgacaataccagtagctataccaatagcggaaaagcgcgtaccgatggtgtcgaatttgcaacatcgttcccgctctggttggataatttgagtctgtcgctcaactatacctatactcagagcaaacagaaagatggagataataaaggcgcaccactcagctatacaccaaaacatatggcaaatgcccgcgttaactggcaggcgacagatgatttaaatacctggctaagcgcccgctatcgcggtaaagcgccccgctttactcagacctatgacaatctcagtgcggtacagcagaaagtgtatgatgacaaaggcgcaaatctaaaagcatggacagtgctggatatgggactatcttataaactgactaaagatttaaccctgaataccgccgtcaataacgtactggataaagactttagcgacgtcaaattatatcaatctggccgttccagcacctatgctggcgattatttccagacagcgcagtcaacgaccggatacgttattccaggtcgcaactactggatgtctttaaactatcagttctaa

SEQ ID NO: 74829 - DNA, 192 bp, Citrobacter koseri
atgtcgataaagaactttacaggcaaaacagtgataaaaaacatccgtttttcatacagtttgctgaaacaaatagagcaagtgatggcgaaggaaaaaaccagcaatttttctgcatgggtaaaagaagcatgtcgtgaaaaagccctgaattccagtacgcccaaagacgtaaatagaaacaaaaattaa

SEQ ID NO: 74830 - DNA, 180 bp, Citrobacter koseri
atgaaaagatgcttatttattagtaaatacacctttatcctgatatctattgggaatgttatctatttcattttgaattatcacgcattagacgcggtgctgatcatactgttttatgtcgctctgatttttacccccgtcatcctcatcctgcgcgccttctgtgcacagcatgagtaa

SEQ ID NO: 74831 - DNA, 777 bp, Citrobacter koseri
atgaaaattacacgcaaagaactacaagtaatgaaagaaaccgtttctgatgattgtatcatttatctgtctggaccatcatcgttagatactccactggagctattacgcgccaaaagtatcatcagcgtgaacggtagcacaggttacttactggaaaacgatattccagtgtttgcatatattgtctgcgatggttcattttatgaaaagaataaaacactattcttaaaatactcatcttatgccagatatacttttattagtaatgacgttctcaaacgtgcaaatacttcagaaaaagagcaactactcaacacatgttttgtgttaaatgatatctgcaaatcacgaggcgggccgggaagaaaaataagatatacaataaaatcggcaattaatagaagtgtttttatcaagtgttctgcatcaaggaaagaaaaaacaatcgcattttccactgatatatatcacggacattttggcagtgcgacggttgcatttagtgcgctacaactagcgatcacactaaaattcaataacattttcttctcaggattagacctgagcgggaaattcgagaggttctacagagaagctcaaccgcaaccgacaacattgcctacagattttgatttcatattgaaatcttttgttttcctgatgaaaaaacaccgtggaaacattttcaacctttccagtaaaactgctataccatatgaagtaattccctttgcgagcgcagcagaaataatgaatcaaactactctggtgtaa

SEQ ID NO: 74832 - DNA, 537 bp, Citrobacter koseri
atgcaacaccttaagaacctgacgaaatacactcctgatgacgcatataatctgtttttgatggacgagcataatgcggaatttttcatctctgatgatggacgtgactggtacgaatcgcagccagattttcaaccagacacactgaaagttgcctacgataaatcaggagttatttgctgtatcagcaaagatgtgtcgagcatttaccctcgtgatttcagcgtcgtagaagtcgaaattaccccggaaaatcaggatgtggacattatggggggctgggtattcaaggacgggagaattcagccgcgtgagtattcgcaggaagagttgcgagtgcaggccgaagaaaagaaagctgaattacttgctatagctgatgctgcaatagctccgctttcacgcgctgtgaggctgaaaatggcgacagatgaggaagccgtaaagctcgaagaatgggagcgatacagcgtatttattaatcgggttgatacttccaccgcgccggatattaactggccggagaaacctgaatag

SEQ ID NO: 74833 - DNA, 1602 bp, Citrobacter koseri
atgattattggattcggaaataacgtcgtttcctctctggccgcagatatcacagccagccagacgaccattcaggttatgccaggtacgggagcgatgtttgctaatctgcttacttatgattatgcaaatagctcaaatgcgcttaaaacttacgccaaaataacgctcacagatgcgaaagaaacagttttcgaaatctgtcatctgaaatcagtcagcgatgacaccctgactgtagtgcgcgggcgagagggaacgacagcgaaaggttggtcattaaatgatgcgatcgctaatttcgcaactcgcggttcagaaaatcagtttgttcaaattgagcatttacagagcgggcactatacggcgggcgtcgcaggagggacggcgaacgcgctcaccctggcactaccagccacgtattttgtcgataacgccactgactggacgttacgtacgccgatcgttgtctatcccgcacagaataatactggcgccgcgacgttgcagctcacattaggtggtaaggctctcggcacgtttcctctgtataagggaaataaagccccgctggtggctaacgacattttaaaggacgtggcgcttgtctgtctgatggataagacgaaaacgttctttaacgtcgctaaccccggtgcgatttatgcggggctgggaaccgctgcctttcgcgatgtgacaacatcaaattatgacgcaaccgctggccgggtattgaaggtcggtgattacgggcttggtgtgagtaacggtagcgttaaatcgttagccagcatttacgatattacttgctcaggcgagtataacgcgatgggtagcggaaccacctcgccgacaacgggcatccctgctgattctggtaatacaagattcgctgtttacgctggcaatatttacagcaatcaatacctggtaactttgaccagcaatgtacatttttacgttggccttgttaataccgcagcgaagacgtctacatggtcaaaattctacaatacattatataagcccaccgcatcggatgttgatgccgtatctgcatcgaatggaggtgtgtttagtaaattcgttcgatttaatgaagggcttactctacgggggagtaaggtcggcgatgccggaatggtcggcattaactttggtgctgatgatgccagttttaatggcgcaaatttattactacaaagctggtatggaataggtttttatagttcgtttcctgctgatgcgccacgcggcatcatgggttatatagatgtccgaatgggacgtctggaaatgaaagaacaaatcattcccggtaattatacgaactttgacaaccgttatcaggctaaagggaattacacccctgctggagaggcttacacaaaggctgcgtctgatgcacgctacgtacaaaatattcgcgtaagtgcaacgcaggttcgttcatttagtgatggtggcgggtattcatctaacgatgcggcatttgcaacggcgattgcgatggtaggtggaagctcgaataacggttctctgctggttcggtacgttcaaaaaaatattaacggcacctgggttaatatcacgacttaa

SEQ ID NO: 74834 - DNA, 627 bp, Citrobacter koseri
atgccagcacctcttgataaaattattccggcttacccgtatactcagtacaacgacgatccaaatatttcagccttgtttgacgcttataatcaactggcgcaggagtaccttgattatctcaataacctgaatcttccatgctggacgtctcctgctattactggtgatctgcttgactggatcgcactgggtatatacggcgaaacacgtccattgctccagatttctgaggacgctattgcgcgtggggcttataacacggttgagtataacaatgtcgcttatgcaaaattgaaaaactatgttccgggttcagcatcctatgtccctgatgattactttaaacggatcctgacctggaatttttacaaaggcgatggttctcatttctgcatagactggctcaagcgccggctggcgcgatttatacatgggactaatggtatagatccaccattacaggataccttcgatattagtgtgacgcccgataagggcgttttttatatctctgttcctgactatggcgatggtgtcggcttttttctgaaagatgctattagccagtctcttgtgaaactcccatttatttacacctacaatgtaacggtggttgaacaatga

SEQ ID NO: 74835 - DNA, 1227 bp, Citrobacter koseri
atgagtgatttaccgatcagttatgatattgccggccctgttcctaaaacgacggatgaactacggcagcttgttattgatactgcgacagctctttcgccgggcatcacaacggatttacccggctctttagttgaggatatggtcagtacgagtgtcggtgcgctcgtcgtatgtgaccaggcgcgtgttgatttgatcaactcctgtagtccgtatgctgcgaacgttcatctgcttgcacaactgggcggcatgtatggcgtgcagaaaggacagggaactaatacatccgtttacgaagtgttcagcgggccaccgggatttgctatcccgaaaggttttatggtcggggatgggtcatacacttatgcagtccaacgggacacgatgatcccggaaagcgggcaaactgagcctgtttattgcctggcaacaactgagggaacatgggcggtgcctgcgggttctgtgaaccagataaaaacgtctgttcctgactcgtataacctgacatgtaccaacctgacggatggtctgcccggtgcgccggagcaatcattttcatcctacagagcacaggtttttcaggccggtatgtatggcgtacagggaacgccggactgctaccgtattgaactgaaaaacgtctacggcgtacaggagaacctgatctcatatcgacaggcctcactcggatcatgggttgcggtcgctggtggtggggatccttatgaggtggcttatgctatctataagtcagtaccggacatatctgcactgacaaatgatgtatcgaatccgtccggttcccccgttgagaaaaaaacgataccgatcattgtgtatcctgatacatatcaggtgccttatgtcgtgccatcgtcgcagaatgtttcagtgataattacatggaataccgtatcaacaacctatgttgatcctacggggatagagaaagctgtacagccagatattgctgattacatcaatgcgatcgcagtcggcgaacctgtcaacatttaccagattcaggatctattccttaagtcggtacaggggcttgtttccgcatctcttgtttctatgatcgacgtccagatcggaattaacgggcaaatagtgcctcctgttgcttattcaagtctggtgtatggtgatacatacgcgtatttctctacctccgcatcacaaattcaggttaagcaatatgccagcacctcttga

SEQ ID NO: 74836 - DNA, 333 bp, Citrobacter koseri
atgagaacttacgggcgggatgaatccggcagatgggttacggttaccaccgatgaaaacggttttaatgattctgtttacctcacgacgctggttcagaatctcaagcttgctcctcaggagtcccctttttatgcaaatcacggcatacctgcgaatggttctgtgattcagcagatactgcctaccttttatgtaaacaggctccagcagcagttcagcaaatatttttcctctctccagatagcactgatgggggttgatcccccggtctacaacatttcagtgattaccaactcaggctctaaaattgtggcacaggtatacgtatga

SEQ ID NO: 74837 - DNA, 717 bp, Citrobacter koseri
atgagtattgataagaagctaaatttcggcggcaatatgcataattttgctgaccagaaaattgctgatgctatgcaaatggccggtaaggtattacccgcatcagtcgttaaacaatccgggaagatgattaccgtatcttttctgctccgcgatattccctacacattgccacaattgacaatccccttgtttggtccccagtacatccggtatccgatgcaaaaaggggacagggggatcgttattcctgctgatacgtatctcggtggtgcaagcggcctgggagggggaaccgctgacctgacgcctccggcgaacctcagctcgctggtatttttaccgatcagccatacagagtgggaggatgttgacgggcaggttttaaccctctacgggccggagggcgtgacaatccgggacgccaaaagtaacaccacgtttcttctgacaccggacagcatcacgatcgctacgccgaaacagttcaaagtgacgacaggtaatacggtgctgaccctgacagcgggcatgtggtccctcacagggcagagcggaaaactccaggacagcgcggccagcacaagcccgcaaatcatgcatgagggctggcagcagcttcttcagtggcttaattcccatcagcactctaacggcaacaacggaaataacaccggagggccgatctcaacgtttaacgggagtatcacagaatga

SEQ ID NO: 74838 - DNA, 1044 bp, Citrobacter koseri
atgcgtttttatgacattcagatttttaataatcctgataccaatggaaaccccggaacgctgtacaggcagtataccagtcttaaaaacggggtatataaccccggttgtctgatgattgaatttgatctccttcgttttggtgaatcgaccccgaaagggcagagttgcatcaccatctgggggatcagcccgcaggatatgcagcaggccagacaggatatgtttggcatgacgataaaaatgtgggtcggaatgtcaaaggggttaccactggcgaaaccggagcaacaggggctggtactggaggggacaatctggcaggttctgggtaactggcagggtactgaattgcgtatggatctcattgttaccgccgggccagtgtcgaacgttaacccgatgcctctggcaccagtcaatttaacgttgccgtggaataaagggattaaactctctgttgcgttgacacagtgttttcagacgatgggaggcgattatcgatactcgatcagcatcagcgatcggttaatcaacaactacgataataatatgttttgcggaagccttactgagcttgcaacaaaactcaaaacgctgagcaaaagcattattaaagacaataattattctggcgttgaaatagcaatggtcaacggtaaagagatccgtgtatttgataacgattttgctaaccaccaggataaagattcgaaaaaaagcgcatcgtacaggagtaaaaacccagtccagatcgaatttaccgatctcgtcggccaacctacgtggattcagtttggtacggtgagtatcccgtgtgtcatgcgtagcgatattcaggtaggggattatatccgtatgcctgaaaaattaagaccgatgatccaggcctcctcttattcccagtttcgcgatgattctgcctttactggcgatttccttgtgtcctcggtaaggctggtaggtaacagcaggcaaccggacgctaacagttgggtaaccgtgctggaggcacatccgacaggagggcttgcagcgacatga

SEQ ID NO: 74839 - DNA, 276 bp, Citrobacter koseri
atgagcacttcgttttatcccttttctggtaatgaacagaaaagcatggtttttactcccattcttgatggcgaggtttataactgccagacaaaatggaatatcgctgcccagcgctggtatctcaacattacggataactcaggtcggcgacaactgacaattccagtaattggctctcccaataattacgacattaatttgcttgttggggcattcagtacaacaaaaatggtgtggcgtatttctgatggtcaaatagaggttattaactga

SEQ ID NO: 74840 - DNA, 717 bp, Citrobacter koseri
atgtcatttacccgcgagctctacaagctcggttttgaaatatccccggtaattctttgcgatggtgttgcacagagtattcccggcggtatgttgccgatagtcgcccttacccagagtgccagctatgtttctggcctgctgggtggggctatcgaacttacagacctggataagtatttttgccactggcgagccgcgcccggcgcgacaatgattgattacgatatcggtcgctacccgtttgcaaatcaggcagtggcagcaaatgcgctactttctcagcctttgcgcattcctctgctgatggatgcgccagtaaacgaaaatactggcgctatgacaaaacttgtcaccctgagtgcattgcaggcagttttgcaggcgcatgcgaatcttggcggaacatttatcgtggcaacgccgggcataatttacagcaactgcatactgagaacggtgcgcgatgttactggctcaaatgacactttaccgcaacggcaatggctctgggattttgagcaacctctgatttctgaaacgggcgcagaccaggctattaacagttatttgagcaaaattgataacggagataaggcaacggaaagcgcctggacaagtaccgtttcggcaattggtaacacctcattgggtagcagtgtatcaggtgctgtaattggcttgatcggtaaactgagcggggcgtttaatctatga

SEQ ID NO: 74841 - DNA, 1887 bp, Citrobacter koseri
atggcagctaaatccattgttgaaattgatgttcaggacgaaaaatttcagtcgttcctggaaaaattcaatgaataccagaaagcgctcagtgagttaccggaacaatggcggggggcggttcatggcctcggtgaaactgcaaaggaaacagagcgggttcgtgatggcactgaagccattacaaaagcgtttaccgatggtgtagccgtaattgcttctgtcaatgacggccttgatcgcctgaatggtaatctggaaaaggccacaaaaacccaggaggaattcagcaagaaatccagcggcgcccgcaacttcctgaataaagccagcaaggatgcaaaatcactggccggtcatatcaaagatgccacaagcagccttttttcatggggaactgtgctgggcctcttttccgggctggctggtgctggtgggttgtgggggcttaatcgtcttgcgggaaatgcttccgcacagcgttttacggctctggggctgggtacaacggctggcgggctgaatgcgagcgctgtcaattatcagaaggcgctgggtaacccgacaggtacgcttggtgcgatacgtgatgctcaactggatttgagcaaacgctggcaattccaggctatggggattgataacccgaatcaggatccggcggcgctgttaccgcagatgatccgtagcgcacgggatatttttgtacgtaacggcagtacacaacagggggcagaagcctacggcctgacgaactacttctctctcgatgacctgaatcgctttaaaaatatgagcgatgcggaaatcgatgcgatggcgaaacaggcgcagaaagatacccagcgcctgcaactgaccgatcagcagctccgtcagtggcaggattttaacgttcagctcgatcgcagcaaagtcagtatcggcaatacctttatccgtggtctggctccactggcgccagaactggacaagctttctgatgcgttttccggcgcgatagaaacagttttacagtcaccggaactggggaaatggatcgatggcctttcggatggtatccggcgctttggtaactatctggcttcgcctgagttaaaaaaggatgttgaggcgtttatgtcaggtgttgaacggcttgcgcacatcatcggtaaagttattgactggatcgcaggaaaaacaagcctgtcagttgacgacgtggcgtcgggatcgtccattcttggagataagccagtaactgatgaaaaaacggggcaaagttacgttcccggcagcgaaagtgatccgcgtgtctggggatggctgaaatctgcaaaacgcgcctcaggcgttgcacctaccacctatgatgagtatttcgaagaggccgcgaaaaaatacgacctcgatccgaaattgcttaaatcagtggccgcagcggaatcgtcatgggatcagaatgctgtcagcaaagctggtgcacaggggctgatgcaggtgatgcctatgaatttccagcccggtgaagatcctttttcccctcgcgataacatcatggcgggcgcgcgggttatgtcgtgggcgaaaggccaggcgggagacgatgttgaagagatgctgcgctggtacaacggcggaaagaacaggggaagtaaggagaatcgcgaatacccagggcgtgtacgtgagaaatatgtcgctctttacggttctgatatgcccggaacaaaccagagtgcgccggtggcgccgcaggctcagccaggttcgggaaaaactgaccaaatcctgcaacaaattctggacaaccagaagcgtggtaatgctcagggtcttgtcgtttataacaacactggtggtagcgcgattgtctccagtacacaacttggagggttcggttaa

SEQ ID NO: 74842 - DNA, 582 bp, Citrobacter koseri
gtgaaaattgacagaaaactgaatttcgtcagcaccattacccgggatgatggttcgctggtgtatctgcatgttgtgccgttcccgtatgaaatcgttgagcaaaattgtgtgctgctggggaatttgttcaacaactttttctcccttgtgggttctgttggcgcgccgcgagttgcagcgatgatgttgcgtaacatcatcaaatcacgacaggaagcgggagatcttaagccgggaacgccgacgattgttgatgatattcagcgtctgacgacggtcatctggaacgatcagggggtatggaaaacgtcgtcacttgatgctgcatttaagcaggaaatcatcaccgatgatgagtacagggaagttgagggagaagtggttttttttatggtgagctctgctattcagaaagcgaacctgatcgccccgacggtggggaaagcgctcgatatgtacagtgggcgactcgtgtcattgagcgctacggcgtatcgcgattctttaccgacgtcgaaaacggttaccgataccccgatcccggaagccctgccggaaccatcacacataccctcctga

SEQ ID NO: 74843 - DNA, 438 bp, Citrobacter koseri
atgccaaatccattagtaccgcagggatttctgaaccgcgtcaggggcgctgtgaccgtcactgatatcccggaactgaacgttactgcgtcatatctggggaaagatgcgatcaacatgcggccggattctgctgcaacggacattattcccacactgaccgggacagtcgggagccaggccccttatcagcaggtaacgatcaccgtgcatttgctgcggacacaggggctggcggcaagctatcagaaacgcttcgcctctgatacatcgctgggggaagtcgttattacgccggatgccagcacttttggaaactacacggttctgaatgcgtatctggttaacttcaacgaactgccgatcaccggtatggatgcggggtatgtcgtgacgatttccggctacctgatcaccaacgataaaatgtgggattaa

SEQ ID NO: 74844 - DNA, 1395 bp, Citrobacter koseri
atggcaattgtaaatatcaatgtgtcggtgactaatccgccgaaaccatcccagttattgaagtctggcgcgctggtatcaaccggggggacaactctggcggcaggaagttaccagttgcttacgtcaaaagatgatctcaagaatattcttgcgccggagaaaaatatttcatccgtttcgtgggaagaaaatacggtcacggtaacgctttccgaagcgcatgggtggaatactggtgatcaggttccagtcattattgctggcgttactcccgctgagtataacggcgtgtttgtcgtcacgattaccagcgataccgattttacttattcactcagtaacgatccgggcgccgcaacggtcatgggaacagtaactgctgttgctgccggagaaatccagcaaatgaacaccacttactgggcgcaggggaccagccgcgctgtttacgttcttgagctgggagagatgaacgttgcgtcagcggtttccgcgttgagttccttcattgatgaggatatttctctggggaacacgtaccagaaatttttctcttaccttgtgccgcgtgaatgggacacagaaccgacgtttaaaacgctggctaacaattacacatcgccgggggcactggttaaatttttcgtgaccaccacgatttcgacataccaggactgggcgtcaggcaaatatcctaacgttttcgctggggttgaagctcccgcaattggcgcgacagaattctctatggcggcgccgttccagtcctctctgtcaaacgaccctggttcctcaaatatggttccgccaatgtcctatcggtttatgtatggcgttacggaatatccggcggcgggtaacggcacgctgctgaaaactttgcaggataataatatcaattatatcggtacggcggcagaaggtggcctgagcaataagatgctggtagccggtcacatgcttgatggcatgccgtttaactactggtactccgttgcttggtgcgcaatcaatcttgaactggatctggcgaatgaagttattaacggttcgaacaccactgttaacccgctttattacgatcagcagggtattggtcgcttgcagcgccgcgcgcttaaaactctccgttccggtatcagttacgggttaattctggggcaggtgattgatacacagctcacgcaggatcgttttaacgaagagtatgagaaaggcgcttatgcggggaacgcagttatcaacgctgtaccattcgccagttataccagcctgaaccagtctgattacgcagatggaaaatataacggccttagcgcggttgttacgccgcgtcgaggttttgagtccattacgtttaatctcaacgtaaccaactttgtgggagcgtaa

SEQ ID NO: 74845 - DNA, 939 bp, Citrobacter koseri
atgccttccctcaatgaactgtctcaggcaaaaacagaactcaatgcttcacttgtgcaggggctggaggatatcagccgctcggcttctgtcacattcacaaaatatgtacgtaaggttcttccgcttgatggttttgttttttgggtaaaagcgtcaattcttgccgaagatccgaacagtgaaccagacacgagagaggtaaaaggctacctgcacctgacgaccgaaacgatccaggatgaagaacagctttacgataaaaacgtggttaccttcactgcgcaggcggatattgacccgtttaacgatattggttcagaggtgctctacattggggagttttacggtattcagtttgctttttcccgccgttccgggctgaacgaaccggcaaacatctatcattacaccgggcatgcaatttacccgcatatgttgtcgcagattattaactctgttgatgatatcgatctggctgatgttgtggtttcaaactcgctccctatctggttatctcttaatcattttatgcctatgtatcctgcgatgctgtcattgcagaatctggcgccgccgtatgccacggttaaatgtggggatccggctcctgtggccggggcattttatctggatgaaaagtccaaccagtatcaactggtttcagaggaggtgacgatttatatcaccgggcttcgtaatgcagcggcagaggatttcctgcgttatgtccaagactatacgttaagtgatgatgctgaaatgggcgtgatgaatattccggttgttaaagatgaccgggtgacgcagaacgaactaaatatcatcgccatgcggaaaatcgtcaaattcaaaatcaattactaccagcagcggatgaggaatgtcgcccgcaggctgatcacgtctgcaattccgtccatttacgtggagaaataa

SEQ ID NO: 74846 - DNA, 432 bp, Citrobacter koseri
atgaaacttcatctgggcgttatggatattccctatgaaaacgagaatacgaccactggcgatgtggctgaaattcttgaggggaaataccggatcatgcagacattctttgaccgtcacggcgaagaaattgcgcagatgatgagtgatgaccttgcggcaggtctcgaaaatatgctggccggtgcgccgcttcctgcggatcctttcgctgaatccatgtcacaggtacatcacctttttgtcgcttttctcgataacgcagagatgaacggcacagaaggtgtgccgacggcccgcgcgctggaggggattagcaagcgttttaaaaacaagaaaggggagccgcgcccctcttttattgatacaggtatgtttcaggcgtcaatgcgcgcctgggtaagtggggtgctgaatgccttccctcaatga

SEQ ID NO: 74847 - DNA, 426 bp, Citrobacter koseri
atgcctgaactggccggatttatcctgtttattcgtaatacgatggaggttagcgccgacgatttacctgatgatgatccggccattattcttgcatggtcaatgtcgctggactgggtaaaccgacagatcgcctgtatcagcccggttctttattctcaggctgtttataaccttgcggcatctttcctgatcaacttcggtcccggtgctgtcttcggttcggtacgcgaaaaactgggtatcaacaatttcactgctggtgttatcagtgcgtcctctgatgaatcaacaagccagacgcgggttgtcagtgacgcattgaaaaatctctctcttgccgatctgcaacaactcaaagatccctatggccggtggtatctggcaattgcacagcaatacggagatctctgggggctgacatga

SEQ ID NO: 74848 - DNA, 486 bp, Citrobacter koseri
atgaaactgtacatcgccaacacaaccaaacagcgccacgattttgcatatcgcaaacccgaaaccgggcgccttgtgtatcacccgattaatgccggttcccaggctgttgttatcgacggcacccgcgcagagattgatctcattattcagcagcatgccgagtatggcctgattgatgcgacaaagatcgaccagaaccgcgtttatatcggtctgtgctacagcattgataagcctgtagcgtcaaaagtcatcgagaaggctatgcgtgataacgacagtcacctgaaccgtgcggctcatgatcgtcgtcaggcatccgtgctggcaataaataacgcgctcaacgagcaggaaaacggttatctcggcgagctggaagtcagcgcagaacagcgcctgagcgctactgatgatcgtgacgaaacggcgtttatcgatgagacgctggctgttagcacaggcgctaaaaagaaaaaataa

SEQ ID NO: 74849 - DNA, 1032 bp, Citrobacter koseri
atgccagctattacacccgcttatcaaattgtaagtccgtcgtacatcatgccggaaatgatcctgtcatatcagcaggcttccggcgcgttctctgtcatggcaagcggtaacccgctggttcgcctgtcagatggcgatcagtacgtttatatgaaacgcctggatattcgcacccaggtaacatccagccagtcaggtaacgcaaaccagcttccatccgttgcacttgatgcgcgaatggtcagcacgccgacatacatgttccgcgcacgcgccatttatgatcatcacgatatggccgctgccggtaactgggggatcgcgcttcctgaagcccagcgcctcggcacccgccaggctattttccagcaactgcgaaacgcagggctttatggcatgaacccggcgggcggtgaaggtatcctgaacaccaacggcgcgaccacgatcagtctgccagcagacagcggcggaaatactaccgtcctgacttacgatcatggcgaaatggcagtattcctgctggcgcagattcaggcgatccgtacccgtaccatgcaaatgggacgggcttcacgcatggttatcctcggccctcagcgtacgctgggtacgatggaaatgcagcagatcgtccagttaaccagttaccagcgtcctggcggtggtactgctacagtgaaaggcaccgttaacaacgtagcggatgatgcagattgtgagatcgagtgggcctatgatgatacgctgattggtgctggtgctaacggtactgatgcagttgttatcgctatgccagaagtcgagcgccccgaggttaacgcgaagatcaacaccaatgaattcgcgaaactgagtccgtcacttgaagccaccactttgatgttgtgtgacatggctgcaccgcgtgaaattcccacccctattgcgggcggggcgatcgatgtgctttccgagctgcgttctacctcaggctgggtgcttcgtcctgaagcgctgaccattatttcgatgaaatacagcgattaa

SEQ ID NO: 74850 - DNA, 873 bp, Citrobacter koseri
atggcgagtgcattgtcagttaacccaatgcagaccactaacgcgtatggcactttttacgcgaaatctgatggtcttatccagggcgtggcgctggatgatccggcagcacgttacgcgctggcatcaggcaccctttccggcgatgaagtaaagcctctctggggcggtctggccgtaaatgaactggtgccgggcgcttcttctgctccgcgaggcagcgtcatcaagcgggcggtcacactttcacaaattgtgggattttccgtattcaaccaggcacataacggcctgaccacgccgcaatcaccggttccgattttcctcagtaacatgagcgtgtctttttatcgcctggggtccgggatgcgcgttccggttaaagcatctgatgccgttatctctctggccagcgctggtatttccgttaatcagccgctggtatggaactttgttgacgattgtctggatgtattcagcacagtggcagaagaagttgctacaaccgatatcacctggactgcgcccaccggaactacggcaggctttgcaaccgcgacgaccgacggcgctcatggtctgaaagtcgggtcgtatgtggacattacgggggcggttccggcggcttataacggtactgttcaggttcttagcgtgccgtcggcgacaactttcacttttaccccggtttcagtgcctgcgggcaatgcaaccactcagggaaccgtaggcgcggctcaggtaaaggacgttgcccttccggtaaaaatcatcgaaatgcagatgggtaacagtaaaaccgtttcttacgatccggctactggctttgttacctggaacgacagcggaaacgctgcgttaattctgctgtaa

SEQ ID NO: 74851 - DNA, 1572 bp, Citrobacter koseri
gtgaaaacctacgctgccgggatcctgtttaaatctggcgggaaaatatttctggttaagcgtggggatgatggttcgtgggctgtgccgggtgggaagctggaagagggggaaacgccggagtctgctgcaaggcgtgaagtgctggaagagtgcgggtttgattattctgcaccattgacgccgcacaccctgattgatggctatgtcacctatcttgccaatgatgccgggatgtttgatgcggttctgaatgaagaaaatcaggcgtgtggctggttttctcctgatgaacttcccgaacagcttcatcctggcatggtggcgatgcttgacgctgaaccgctcaatgaaatggacgttgccagccttatcgctggcgggcaactcacatccccgcaatttttcagaaatatgtacctgtgggcgctgcgtatcaccggaacgggtgttacatggcgatccaaattcaggcaatacgcctaccgatcacctgaaaattatctgacggatgaatttatcgcccggtgcgctggcctgccggttatctggtggcatccagagaaaaacacactcgacagcgaagaattcgcgtccaggacgatcggaaccatcacgtttgcctggatacagggtgatgaggtgtggggaatggcccgcatctatgacaccgacgccgccgcgaaccttttaacgcggcaactgagtacatcccccacggtggtgggcggcgatgacgttctgatcaacgttgacggtgaaccgctgctgctggaaggaaccccggaattactggatcaccttgcgatttgtgagcagggcgtctgggacaagctgggggaaccgacgggagttaaatccgacaaactaaacgaggtccagaaaatggatgaagaaaaattattagcactcattaaccaggcgctggacgctcgcgaagcccgcgcaaaggctgacgcagaggaaaaagcgaaagcagatgcggaggccgcagaaaaagccaaagcggatgaagatgccgcccgcatcaaggaagaagaagaaaaggcgaaagctgacgcagaggagaaagctaaagccgatgctgaagccgaagaaaaagccaaagcggatgccgaactggacaagatccgcgcagacatggaagaaatgaaaagccgtgtacctcaggaactcagcgacgaagaacgtaatgatattgctgatacccagtgcaaggccgacagtgtttttgcttctttcggcgaacgcgcgccgcagcctatggcgggggaacgtgcgatgccgtatcgccgccgaatcatgacccgcctgcaaaaatactctcccgattataaagaagtggatctgcatgcgatcgcagacagccagcttctgagtattgcggagaaaaaaatctatgccgatgcgcaggcatcagcggcatccagtctggaacccggcgcggggctgcgtgaaatcgtccgcactgacgcaaccgggcgccgtatcagcacttttatcggcgatccgtctgcgacatgggctcctttccaggctgtcacccgtaaagtcgttggcattaaacagtaa

SEQ ID NO: 74852 - DNA, 876 bp, Citrobacter koseri
atgacttcatttctgaaagagctgcgtgacgcgattaaattctttctggagcatggctacagcagtgaagaaagtctgctgatgtggactgagcgcctgcgtaatgccacagaggataaaatcggcggcggtgatttttataaatatgtctcccggcgcttaacagcggcttacgatctggaagttggcagggaaagggcgcttaaacgtcatcctggcgtcagccggttcacgctcaattatctggagccaaaactgcgggcagagctggacaggcggatcatggcatcggcagacctgataaagctgaaccgcacacaggcagtggatcggacaattcagcgtttcagcggctgggctaccagtattccccccatcacatcaataagtcccggtttgtctgcttcatcgcgttccggggtggttgccacgagtcaacatatcgccaaatcagcgcggcagattgattttgagcaacgccgtgtgatggtggatcagacgcataagctggttgctaacatcgataacatcattgcgaccgacggcggagcaatcgcggcggtatggcatagtcactggcgccagccaaattatgattatcgggatccacacaaggatcgtgaccttaaaacctatgtgatacgcggcaactgggcgttgaagaaaggttttatgaaggtggggccggatggctatcttgatgaaattacccagcctgccgaagaggtattttgtcgttgctatctcacctatatctacaacgtccgaagcctccctgatgagatgaaaaccgaaaaatggcggaagttcgtcgaggggaataaatctgtcggtcgtcgttctgcaaactttgaggccataaaaaacggaggataa

SEQ ID NO: 74853 - DNA, 1434 bp, Citrobacter koseri
atgcaggacgacgacgatatttgcatgggtagtaatgctggcgtcctcagtaagattctggagggcggaagcattgaacccggcgcgcaggcggggtatgagctctgcaagctgatttacttgtttcacccgctgggcggaaagatggttgatcgcccgatcaaacttgctatgtcagaaccgcgaaccgtgcatgttacgcgcggtccagaaaagcggttgcgggaggcgttcgaacgggaatggaaagccattaaagccgatcgcattattgccaacgtcgcgcgccagtcgcgtatttatggtgttggcgcggtagtgatgttgattgatggcgagccgactaacgaagccgcagaattcgacacgctgtataagaagcccatcacttttaacgtgctggatccaatgaatacagccggttctgttgtgcttaatcaggatcctaatgctgctgatttccagaaagtgggaagcgtcactgcggcgggacaaccttatcaccaaagtcgttgctgcgtgatgatgaatgaagatccgatttacctggcttatacgccgtcgtctttcgggttcgccgggcgcagcgtttatcagcgtgcgctttaccccctgaaatcattcattcagtcgatgcgtgccgatgacatggtgacgattaaagccgggctactggtggcattcatccagcaggccagttccatcgtcaataacatgatgcagaaaatgtccggtattaaacgctggatgctgaaacgcggcggtaacggtgatgtattgcaggttggcccgagtgacaagattgaatcactcgacatgcagaatcttgaaaagcctctggatactgcccgaaatcacattctggcgaatatcgcgacggcggcagatatgcccgcgattctgctcaacagtgagacgtttacgcgcgggtttggcgaaggtacagaagatgcaaaagcggttgcacagtacatcgacgatgtgcgcaaagatttgcagccgctttatgattttttcgttcgcatcgttcagtaccgggcgtggtcacctgagtttttcgatgcactgaaaaatgatttgcctgagtacaaaagcctcagttgggagacctctttcagctcctgggtgaacaatttcgattatgtctggccgtcgtccctgaaagagccggaaagcgagaaagtgaaagtcgatgaaacgcgttttaaagcgatcactgagatgcttaacgttctgttgcctcaacttaccaaagacccggagaacagggcgacgctcattaaatgggcttgtgagaacgccaatatgaacgaaaacctgtttgccgatcgcctggagctggattacgaggtgctcgaagctaacccgccggatgtaccaccgccgccggatgaagggggaggcgatgacttcatttctgaaagagctgcgtga

SEQ ID NO: 74854 - DNA, 1272 bp, Citrobacter koseri
atggcgactgaacacgttattgagttcctgccattccatgcagggcaaaagaaaatttatcgttctccggctaagcgaaaagttatccgcgccgggcgccgcttcggtaaaaccaccatgcttgaacaggctggcggtaactgggcggcgcggcagatgcgcgtaggctggtttgcgccgtcctataaaatcctgttgccgtcgtttaaaactatccgcgatttattacgcccgatcacaactagttcaagcaagaccgattccatcattgaagtgatgggcggcgggctggtggagttctggacgctggataaccctgatgcggggcgttcccgtaaataccacaaagtcattattgatgagggaagcctcgttaagaaaggcatgcgtgatatctgggaacaggcaatagagccgacactgctcgactttgatggtgatgcagtaatggccggtacgccgaaaggcgttgatgacgagaatttcttctaccaggcatgtaacgataaatcgatgggctgggaggagcatcacgcgccgaccgctgcaaaccctacgatcaatccggcggcgctggcgcgaattattgacggtcgcccgccgctggtggttcagcaggaatacaacgctgaattcgttgactggcgcgggcagaactttttcaaactcgactggttgctggagaacggtgcgcccgtcgattatccgttttcctgtgacacggtttatggcgtcgttgactgtgcgcaaaaagggcaactccagaacgatggatccgcgtgtatctggtttgcgctggataacctgccatcgccacatctcatcattctggactgggacattatccagattgacggatatttcctgaaagacgttgtgccgcagtggatcggaaagtccaaacaacttagtgaaatttgccgcgcccgcatggggactaccggcctgtttatcgaagataaggcaaccggcatcacgcttttacagcagggcgctaacgagggctggaacgttcaccctatcgacagtgatttaacgtcacttcccaaagaatcccgcgccatcaatatttctggttatgtggcgtccgggaaagtacgcatttctaaatacgcttttgacaaaatcgtagagtacaagcagtcgaagaaaaaccatcttcttactcaggtgctccggttcatcattggcgaagaaaaccaggacgacgatctttttgactgctttaactacggcgtcgcgcttggtcttggtaacggagaggggttctga

SEQ ID NO: 74855 - DNA, 1032 bp, Citrobacter koseri
atgtccagagtgaactgggaggaacgattatccctgttcgctgatgaatggaagcggacgggaatatctcctaaggagtggtgcgaaagagagggtttttcgtggggaactgcgaaagcgtatatctcgataaaagcggcgaaagcattgctggctggtgggggagataaaacagaaaaatcggagcgaaaatcgcgaaaaaaaactccgaaaaaaagtgcgaattcggagtcggaaaaacgcgaagaaaaaagcgcggataaaggggaaattgcagaaaaattatctgcgtcgcggtctgttcacgaggatgacgaaacgcctgatgatttcgggctctctgaccagttaatgacgttcgcacaatttgtagtggatggaaaaaccagagtcgaggcttaccgcctggccgggtacaaaggcgaaggaaacacagcatattccaatgcatcccgcatgctaagaaatgccagggtttctcgttatgttcaccacctcaggaacgagcggcagaaacgctactccgccgaactggatgatgtgattactcagctcgtcgccatcatcaacgccgatcccaacgaaatagcacaataccggcgcgtcaattgtcgttattgctggggggagaatcacaaatatcagtggcgtgatttagaagagcagataagggcagaaaaaaaagccgagtcggaaaataaaccgcctcctgatctttccggtggaattggttttgtcgataacgctgatcctaaccctgattgtcctcgatgcaacggggagggaaagggggaggctttctttgctgataccagagatttagagggcgatgcgcgttatctgttgcagggcgtgaagctcggtaaattcggcatcgaaataaatactgcggataaggatgctgctcgtcgtgaattagccagattgcttgttgctcgtgggcccggaggaacgggcaaagaaaaagggaatggcaaaggcagcgagccaacggtgatcattaaactggtgaattcccctgatggcgactga

SEQ ID NO: 74856 - DNA, 540 bp, Citrobacter koseri
atgctgacatattacgcagttgaccgtcgcggtctttttaaacaaaacgaacgagttcaattagccacaatatcggatacgagcaagttttcagaacaagctgcaatacaattcaatgccgggatatcaccgcatggaataacttactttatcggtgataattttcacgttcataataacgtaaatcaacctgctgcctgtatagaatacgcactggagttactcaggcaacaaagataccccgaaaaaccatcccgttttctgtcggtttttggctgtgaaacccttgatggagctaaacattttagagggcaatatgagccgcataaactatctaccccgatttacgaaattacttcgaatggaaaagtgcataagggggatatgaatcttctggatgcaagatgtcctgtatatgaattcgaaaaccgactcgatgcctactggtcaggtgaatcgtatccgctttacgaatcttatgaaccattctgggaaataataatacctttaccagcgaacattggggcacttgtcgcttaa

SEQ ID NO: 74857 - DNA, 318 bp, Citrobacter koseri
atgcaggacgaaaagcagcaaccgtatttttttaatccgggcatgtcagccgaacagcttgaagactggttggggcagcaaaaacttcacctcactcacttcaaccgcctggtgaaagaaaaagccgctcttgaggaacggctgggggaaataaacgcgtctattggtctgctttcagcatcaggcttcgaaggaatattgagttttccatgtagttccaatccgcttctggaaaatcctcaaattgaaaaagcacagatagtggggccatataagggtgatactttaagcgacaagtgccccaatgttcgctggtaa

SEQ ID NO: 74858 - DNA, 417 bp, Citrobacter koseri
atgcgcgatatgcaaaaagttcttgatatgtggggcgcatgggctgcaagtgactcatgcaatattgattattcttccatcgccgccggattcaaggggctgcttcctcaaaccagcaaaacgcggattatgtgcactgatgacgacgggttgattatcgaaggctgcatggcacgtctgcgtaaaaaatgtccatacgactattacctgctggtcgggcattatattttccggttttcaaagcggcagatggcgaagcaccggaggaaaagcgaaaagcagatacgcatagaaatgctgcttgcagaagggtttattgagggctgtttgtcgatgctggatgttcgcctggaaatggacgccgtagtgagtattcaaaataatcaaaaaagtgctagtgcggtccgcattttttag

SEQ ID NO: 74859 - DNA, 210 bp, Citrobacter koseri
atgattaagttgacgaaggaagacgggcacaccatcagcgaataccttcgcgccgcgcatggcggatattccggcccggtattcatcgatatcaacaggctggcggatttgaacatggcttgcagccgtctggttgttatgacgtatctttaccgccagggtaatcgcctggatttattgggtaatattgattctgaggggaaagcctga

SEQ ID NO: 74860 - DNA, 975 bp, Citrobacter koseri
atgaagacagcagaagcggcaaagggccgctgggcagaaattttagagcattacggactgccgccggtaaccgggaaaaatcactataaaggggaatgtcctgtatgtggtgcgcgcggaaagtttcgtatcgatgaccgggacggcgccggaacatggatctgcgtatgcggctgcggcgacggtatgaagctgctttccctcacacagaccgggaagaccttctcagcgctctgcgcagaggtggataagcttattggcaatgactatcggcgagaaaaaatcccggtcaacagctcggcggcgaaattgcgccagcgcactatcagtaaattcgcgaagttgttgccgttgtacgaaactccgggtgccggatatctccgtcagcgcgggatcaacaaattacctgccgattctatcaggttctgcgaaaggcaacgccacgcagggcggatataccatgctctgtacgccctcgccacagacgataaaggggagctgtgttatctccaccgtacgttgctcgaaggggagcgtaaagccccgctgggcgaaagtgccaaacggcaaaaatccctccaggaagacaactatctcgaatacgcccgttctgtggccatccgtatgtttccggtttcctcaacgctggggattgcggagggtatcgaaacggcactctcctgctatcagatttatggtgtgaatacctgggcggtaatgaacagcaatttcatgaagaaattccgtgttccggcaggagtaaagcatctggtcgtatttactgatatggatccgcattctgcaaccggtcatgcggcggcgtttgagtgcgcccacgctaacctgatggcaaaaaatgaccttgtaaaagtcagtgtccgttggccggacaacggggattttaacgatatgctcatgaacggtgatcaggttcgcgagattttttttaccaaaaagcaaaaggtgaccgcatga

SEQ ID NO: 74861 - DNA, 1629 bp, Citrobacter koseri
atgctgaacatcacaccgaattttgcacaggaacgcgcactcaatatgctgcgccgtgactggaaggcatacgaatctttcatgatgtatatgccgactggcagcggaaaaaccgggctggctgcttttgttgctgctggtctggtaagccgtggtatgcgcgttctgtttgtcgccccttacaccattctgattaaccagacggcgcagcgctttgctcagtatggcctcccggaggaccagatcagctttatctggcgcgatcatccgaattatgacccgaatttgcagattcagatcgccagcgccgacacgctgatccgtcgtgattttcctcagaatatcgacctgctgatcatcgacgaagctcacctgcgtaaacgccgcatcctgaaagagattgaacggcttaccagtgaaacgaaaacgaaagtgattggcctttccggtacgcctttttcgccgtttctggggcgttactaccagcgcctgattaaacctacgaccatcggcgaactgatccagcgcggggatctgagcaattacgaattttacgcaccgacaaagccagacttgcagggcgtcaaaacgaaaaattctgcggagtacggcgccgattacgatgaaacacaactggcggaaatcatgtgcggttccgacctggtgggtgacatcgttgataactggctgcgcaacggtcgtgacctgccgacggtggcgttctgcgtcaataaggcgcacgccaactatgtgaccatgcagttcaataaggcgggagttaacgccgaagtcatggtcgctgaaactccgcacgaagaacgccagttgatgattcatcgtttcgagacgggcgccacaaaaatcatcgtcagcgtcggtgtactggtggccggtttcgacagcgatgttcgttgtgtcatttatgcgcgaccgacaaaaagcgaaatccgctggctccaggcgctggggcgaggcctgcgtaccgcacccggcaaagatgcctgtctgatcttcgatcacagcgggacggttcaccgtctggggttccctgacgctatcgaatacaacgatcttccttcaaaaaatgacggcatgaaagagtcagcgacgcgcacagctgaggatcgggaagaaaaactgccgaaagaatgccccgaatgccatttcatgaagccagccggtgtctacgtctgcccgaaatgcgggtttaaaccgctggtgggtgaggatgtggaaaccgatacacagagaaatatcaaaaaacttaaatcaggcgggaaggtttacaccaaagcggacaggcagtcctggtggagtcagatcaagttttatcaacgccagcgcacatcgatggggaaaccgatcagtgatggctggtgtgctcatactttccgcgaaaaatttggtgactggcccaacggcctgagtgatttcccgatggaaattaccccggaggtaagcaactacatcagacacaaacttatcagattcgctaaggggaaggaaaaggcgaccgcacagactgaagccgtaaatcctgctcctgaatcaggagccacctacagagttattaatgcaagacgccaggtagagaacattcgcagtatgcttgggagaaaaacagcatga

SEQ ID NO: 74862 - DNA, 294 bp, Citrobacter koseri
atgtatccggactatgtgcaggttgaaatgccatcggtttatagccaggcagataccgcatggattcaacagcagttactgggtttacctccgtcactgcggcgcaaagtcgcgctgaagtacgcagaggtttacgaaatcacatttgacgctgagccggtttcataccgcagggagaaccgggcaaggcatgaagccaatgtgaggcttcgcaggttcgttgaaacacacgggcgggctattcagggctacacggcccagccgcctctggcaggaatgcaacagcgcgcctga

SEQ ID NO: 74863 - DNA, 213 bp, Citrobacter koseri
atgaaagcgtactggaactcactaacgaaagaacagcaggttcatttagctgaaaacgtaggatcaacgcgggattatctgcgtttggtgttcaacggacataagagtgctggtttcaatcttgcaatacggattgagcaagagactggcggagctatcacaagatcggaattgcggcctgatatttatcaattttccgtagcgcaaacttga

SEQ ID NO: 74864 - DNA, 675 bp, Citrobacter koseri
atgaaaactgttcatgaaattaggcgcctaaacgccagaaaattacgggatggagttggtggaaactcgttttttgccaacatgatcgatcgagaaccgacgcaaactagtaggtttatgagcgatggtgcaaccaaaaatattggtgatgctatggctaggcacattgagaaatgcttcgacctaccacttggctggctagatcaggagcatcaaacaaccaatattgcaaaaactcctgatgtttcagatactaatagaaatattcgtatggttcccgtcatctcgtgggtacaagctggcgcgtggacaaaagtggatgagcaagaggttgatttgtatagcactgaaacctatccgtgccctgtgccttgcgggccaatgacctatatcctcagagttataggtgattcgatgattgatgaataccgacccggagacatgatttttgtggatcctgaggtaccctcaattcacggtgatgatgtaattgctttaatgcatgacagtggagagaccacgtttaaaagactaatagaagacggcggcgacaggtaccttaaagcgctcaatcaaaactggcccgagccatatataaagattaatggaaactgttcaatcattggcactgtaatattttcaggaaaaccaagaagatatagaaatagaccatag

SEQ ID NO: 74865 - DNA, 282 bp, Citrobacter koseri
atgagtgtcaacaacataattcagctaattgaaatcgatttatctagagatatcaatgtatcagctctcgcaagtgaagccgaaaacaaaacaacatcactacttgaagctattgactttataagtctaaaaattatggagatgagcgacagccaaaaagaaagcaataaaaaaattaacgccttatcaggagtgatttcagacttagcaaatttggctatggtgactaacaaaatttcaaatgaatctcactatcatagtggcgtgagggaaaatcaatga

SEQ ID NO: 74866 - DNA, 396 bp, Citrobacter koseri
atgaacaaatacgaaggcgtgaccgtggtatgcctcaccaaagacgattacaacggtgacgaattaaaaccagccgctcaccgcgccgttgacacagcggatattgtcaccgacaccgggcttattattaaaaatcgggttgcaggtatcagtgaagtgaaaacacctgcaaaaaaaacgtccaaatcatcggacataagcaacgagctgttcgatgccgaacttatcgcagccaaactcggtggaatgattgatttagctaatcagcattttttcaccgatgaagatgaagacaacttacagtatgtgatgtttgccgttctggatgactatgcggggcagatgcgcaatatactacaagaaataaaatcaaaggtggctccatgcaacggataa

SEQ ID NO: 74867 - DNA, 222 bp, Citrobacter koseri
atgcaacggataacactgtcagtcaatggattcaattgcaaatcctcggctatattggaatcggatcttggcaatgcggatgacattatatacaaattatttcgccgtgaggggggggtatttgttcatgttgatacttttcgctcttttgaagatgccagtaaagaggcgcaggaaataattaagaactcagctaaattaagctggctggcaaacagctaa

SEQ ID NO: 74868 - DNA, 270 bp, Citrobacter koseri
atgaatattgtcgtaaaaagtgaattcgtaaatagcaaggttcgttccgtgaatcaggatgaagaccttttatatataaacaaagcgcacaaaacagcagagtgcgccaataaatacgcacacgaactacgtgcagagtttatccagttactgatgccagcaatcacacgcactgatgtgagggtggctggccgattcacttcgttactgaatgagctttgtttcatgaccaaaatgacaatggagaatacctccgggggggggcaataa

SEQ ID NO: 74869 - DNA, 357 bp, Citrobacter koseri
atgaaaaataacaccattgaaatttatcgtcgccgaattgcaattgcggcattaaaccgaatgaaacgcaagacaggcgcttatcgccttaccgtttcaatgccagatggcgatatccagtttattgatattgacgaagaagcaatgctgcaacttttacagcgttttgaaaaacaagcgcgaaatgaattttcagcagaggcagaaacatttcttcgccagtcatatatgaaaagcgtcgatattaatggacacaccgaatatctgaccgaaacaggaaagatgattgttgacgagatttttgaagaattagttaaacacgcgaaagaaaaatacgtatgtggaggaattaattaa

SEQ ID NO: 74870 - DNA, 276 bp, Citrobacter koseri
atggcttcacaacaaatgattacgcggcggggaacgccgatcccactgccattactgaacgttgatttacatgtttctccgggttttaccggacgtgttgtgattcacgtaaaagatggtcgtcaaatttgcgattacccactgcgcaaaaacgatcatatctgcacgatggaaggattcctgacactggcccgccaggctggctgggttgtcactccacctgaagacgtaacggaggtctgcgccagtgacactaacagcaatccggattcctga

SEQ ID NO: 74871 - DNA, 432 bp, Citrobacter koseri
atgatcgacaacagaaccgccagcgcaatagaccaagcactacaaaaacacgacacgccagctggctcgctgttcgtggcagtacgccacggacgtattaaaaaatgcttcacgcgagatacggcgatccgctatctggctttcttcatgaccaccgaggcttttgagcgttcaggttttccgcagcgtcaccctcgggtgcgtattgatcgcgacgacagagaagtatggcgagacggagaaacaaaggccgaatatcttgccgcccaccagcgttgtgtccgccgtctgcgtcgcatcctggcgcgtaagcgagaaatgcagaagtggtgcgcaaagtgggacgccatgcatgtccgctttgtgaaagagcgcgaagaacttcagtccagcaaaccagcagaggtacgcaatggatcgcacaacatttaa

SEQ ID NO: 74872 - DNA, 579 bp, Citrobacter koseri
atggatcgcacaacatttaatcccgaacctacgtcaaccggcattcggtttggaaatcgcgtgattggatattccgcagctattcgccagctcgacaacggtcactatgacaaaagcattgcggaagggctggaactgctggcctgcattatggaagcagtggaaagcaactggatcacactcaacatcgataaacaaatcattgtctggcgctggctgctcgccgcggtattcatagctgaggagcgggagaagaacgggacgatcgacgttccgaacgacgaaggcggcgttgatacagccgttatctattccggcaagtacggtgcaatcagcgtttaccctgggccgttacgtttttctctcgccaaccacgtagaaggtatcgcgattgagaaatacggcgtggagaaggggtcaaagatggctcttcgcatgtaccagaacatggtgattgcagatcccggagacggattcaggatgtcaccctttgggcgagagggacttgagatgcttcacgatgactacatcggaatgattaaaaccagcggcataccagaaatgccagttatgcactga

SEQ ID NO: 74873 - DNA, 579 bp, Citrobacter koseri
atgtttatctataccgatttactccgcgcagccctgtgctgcgtcgccagcgagaaagaagaacgcaaatacctacggggtgttcacataaccccaacccacattcaggcaactaatggtattgcggccgtttccatggaacatggttcaaagaccgatattgatgcagttttcattctccacggtgaaataccggctaccgctgaaggaactgtattccaacaaattgacagccagtggatcgccgcacacatggacgacagcaggcgacctgtcggccataacgaacttgaactggttgggggtaattttcctgacctgagtaagctgctgccgacagatgttgaaccgtgtgatgagtttccgccgttctcagcagagcttctggctctgccctatcgtatgtttggcgctgaatttagctcgatgcccgttaaattaaatatcttcgggcccgaaaaaccatgtcagatcctgctcaacgtcgcagttaacagtttctacggtgatccgcttcttgtgattatgccaatgaaatcgacggtctttgaactgtatcgcgaggcgatagaacaatga

SEQ ID NO: 74874 - DNA, 288 bp, Citrobacter koseri
atgagcgaatcaacaacacaggactggcggatcagactgctggcgtcactatgccgtaaaagcggaacaatcaacagtaatgatctggctgaccttctcgataggcttcagttggatgacgctgctggcaaaacgttgaccatcacccttcctgataccagttcgaaggcattctggagcggcagcggcaagacggaagtattccacccggaaacctataaacgctgggtgaaagaagccatcgagcgctattgcgccatcgccggtattgaagtgagggtgaagtga

SEQ ID NO: 74875 - DNA, 360 bp, Citrobacter koseri
atggccgatgttagcaatggaccagtatcaagcttgcctggtcaactttttagcgcacctgttggcactaaatgcgacgaacacccggaacgtgacgctgtacgtcggattcagggggaaacagattcgtttggctgtgagtattacgatatgtgccaggaatgcctggatgaacattatcaggaatcccgtgaagccagctattcgggaaagtgcgattggtgccgcaaacaagccgctcacctgtaccctcacagggatattgaagaggggagctacggacgggtttatgaagtatgtaaaccctgtattgatgccgagcggcagcgatgggaagaagaagatgaagaaagattttga

SEQ ID NO: 74876 - DNA, 228 bp, Citrobacter koseri
atgaacgtcgaaaatgacatcatttcagatgccgacattgaaaagctaactggttataaaattccgtcaaagcaatgcgaaagcttgcgtgacgccgggatattttttataaccaggcgcgatggccgccctcgcacaacgtgggcgcatttcaacaatccgctgtcgcaccgacagaaagcagttgatgctgacgggcctcagcctaattttggagctcttgactaa

SEQ ID NO: 74877 - DNA, 1011 bp, Citrobacter koseri
atgccacgcgcgcgtaaaaacaaagaggatgcctggatgcctccgagggtttatctcggacgttcagcatacgagtaccaccccaagggaggcggtaacatccgcctctgtgataagacctgcacgcaggcgcaggtgtggacggcatgggaagcactgattaatgacagacctgatgaatctactctttccggcctgattgataaatttttccagtcaggtgatttctttgaacttgcgacagaaacacagaaggattaccgcaaatactcaaggaagattattgatgtcttcggccagatgccgccggacagcattaagcctgagcatgtgcgtaaatatctcgataagcgtggagtaaaaagccgtactcaagctaaccgggaaaaagcgtttatgtcacgcgtctatagatgggcttacgaacgcggctatgccaaaggcaatcccacgaaaggcgtaaagcaatttaaagagaacggtcgcgatcgctacatcacgcacgaagaatataatgccttgtacgatgtatcacccgacgttgtccgtgttgctatggagctggcctatctgtgctgcgcacgtcaaaacgatgtgcttgagatgaagaaaagccagcttatgggggaagggatactgatcaaacagagcaaaaccgcagtagcgcagataaaagcctggtcagacagactgaactccgcgatcaaccttgcaaaagccctgcccctcaacgaagggatgagcagtctttatgttctgcatcaacctaccgggcacaaatacaccagggatggctttaacagtcgctggagaaaagccaaagaagaggcgcggatcaaatacccacatttgagtttcgacttcacctttcatgacctgaaagcaaaaggaatttctgatctgctggggaacatttacgagaaacaagccatctcagggcataaaaacgtggaacagacagcccggtataatcgcaaaattgcagtcgtcccggttgttggtgggcaataa

SEQ ID NO: 74878 - DNA, 549 bp, Citrobacter koseri
atgcaatttaatatccctacgttgctcacgctgtttcgcgtcattctgatcccattctttgtattggtgttttatctgccatttacatgggctcccttcgttaccgcgctaatcttctgtatcgccgccgtgaccgactggttcgacggttttctggcgcgtcgctggaaccagagtacgcgttttggcgcgttccttgatccggtggcggataaggtgctggtggcgatcgccatggtgctggtgacggagcattatcacagctggtgggtgacgctgcctgccgcgaccatgattgcgcgtgaaattattatttccgcgctgcgtgaatggatggccgagctgggcaaacgcagcagcgtggcggtctcctggatcggcaaagtgaaaaccacctcgcaaatggcggcgctggcgtggctgctgtggcgtccaaacatttgggtggaatatgccgggatcgcgcttttcttcgttgctgccgtgctgacgctgtggtctatgttccagtatttgagcgctgcacgcggggatttgcttgatcagtga

SEQ ID NO: 74879 - DNA, 1833 bp, Citrobacter koseri
gtgagtgttctgtttgatgcgaaagcatttttaaaaaccgtgaccagccaacccggcgtttatcgtatgtatgatgccggtggtacggttatttatgtcggtaaagcgaaagacctgaaaaaacggctttccagctatttccgcagcaaccttgcttcgcgaaaaaccgaagcattggttgcgcaaattcagcaaattgatgtcacggtgacgcataccgagaccgaagcgctattgctcgaacacaactacatcaaattgtatcaaccgcgctataacgtgttattgcgcgatgataaatcctatcctttcatctttctcagcggtgacacccatccacgcctggcaatgcatcgcggggcgaaacatgccaaaggtgaatactttggcccgttcccgaacgggtatgccgtgcgtgaaaccctggccctgctgcaaaaagtctttcccattcgtcagtgcgaaaacagcgtctaccgcaaccgctcgcgtccttgtctgcaatatcagattggccgctgtctcgggccgtgcgtagaagggctggtgagtgaagatgagtatgcgcagcaggtggagtacgttcggctgtttttatccgggaaagacgatcaggttctgacccaattgatcgcccgaatggaaaaagccagccagaatctggagtttgaagaggccgcgcgcatacgcgaccaaattcaggctgtgcgccgcgttactgagaaacagtttgtctccaataccggcgacgatctggacgttatcggcgtggcgttcgatgcgggtatggcctgtgtgcatgtgctttttatccgccagggcaaggtgctgggcagccgtagctatttcccgaaagtgccgaacgggacggaactgggcgaagtggtggaaacgttcgtcggccagttctatctgcaaggcagccagatgcgcacgctgccaggagagatcctgctggatttcaacctgagcgataaaacgctgctggcggattctttgtccgaactggccgggcggcgcattaatgtgcagaccaaaccgcgcggcgatcgcgctcgttacctgaagctggcgcgaaccaatgccgcgacggcgctgatcagcaaactgtcgcagcaatcgacgatcacgcagcgtctgaccgcgctggcaagcgtgctgaagctgcctgcggtgaagcggatggagtgttttgacatcagccacacgatgggagaacagacggtggcctcctgcgtggtttttgacgataacgggccgctgcgtacggagtatcgtcgctacaacattaccggaattacgccgggcgatgattatgcggcgatgaatcaggttctgcgccgacgctatggtaaggcgattgaagaaagtaagattcccgacgttattctgattgatggcggtaaaggccagcttggtcaggcgaaggccgtttttgctgaactggatgtgccgtgggataaaaatcatcctttattgttgggcgttgctaaaggcgccgatcgtaaagccggtctggagacgttgttctttgaacccgaaggggagggctttagcctgccgccggattcgcctgcgctgcacgttattcagcatatccgcgatgaatcgcacgatcacgccatcagcgggcaccgcaaaaaacgggcgaaggtgaaaaacaccagcacgctggaaactatcgaaggcgtcgggccaaaacgtcgacaaatgctgttgaaatatatgggcggtttgcaaggactacgtaacgcgagtgttgaggaaattgcaaaagtgccgggtatttcgcaaggtctggcagaaaagatcttctactcgttgaaacattga

SEQ ID NO: 74880 - DNA, 654 bp, Citrobacter koseri
ttgatcaacgttcttcttgttgatgaccacgaactggtgcgcgcagggatacgacgcattctggaagatataaagggcataaaggttgtcggtgaagcctgttgtggcgaggacgccgtaaagtggtgccgcgcgaacgccgtcgacgttgtgctgatggacatgaacatgcccggaatcggcggtcttgaggcgacgcgcaaaattgcccgctcaagcgctgatattaaagtgatcatgctgacgatccatacggaaaacccgctaccggcgaaagtcatgcaggccggagccgcagggtatctgagtaaaggcgctgcgcctcaggaagtggtcagcgcgattcgttcggttttttccgggcagcgttatattgcttcagatatcgctcaacagatggcgttgagccagattgagcctgagaaaacagaaacgccttttgccagtttgtctgaacgcgagttgcagattatgctgatgatcaccagaggccagaaggttaatgagatctcggaacaactgaatctcagtcctaaaacggtgaacagctatcgctacagaatgttcagtaaactaaacattcatggtgatgttgagttgactcacctggcaattcgccacggcctgtgtaatgcggagacgttaacaagctag

SEQ ID NO: 74881 - DNA, 225 bp, Citrobacter koseri
atgagtacgcctgatttttccactgccgagaataatcaagaactggccaatgaagtcacctgcctgaaagccatgttgaccctgatgctacaggcaatggggcaagccgacgcagggcgcgtgattcttaagatggaaaaacagatcgcgcagattgaagatgaaacgcaggccgcggtattttccagcactgttaagcaaattaaacaagcttaccgccagtaa

SEQ ID NO: 74882 - DNA, 723 bp, Citrobacter koseri
atgcaggaaaatgatttcttcacctggcgacggagtatgctggtacgctttcaggaaatggcgacggcagaagatgtctacactgaattacaacatcagacacagcagcttgaatatgattattatgcgctgtgcgttcgccatcccgtcccgtttacgcggccaaaaatctccgttcacaccacgtacccgcaagcgtgggtggcgcattatcagtctgaaaactatttctctattgatccggtattaaagccggaaaatttccgccaggggcatctggcatggaatgatgccttatttagcgaagcgcagtcgctatgggacgcggcgcgcgcgcacggtctacgccggggggcgacgcaatgcctgatgctgccgaatcgggcgctgggcttcctctctgtctcccgggcgagcgcccgccatgcgccgtttgcacatgatgaaattgaactccggttgcaactgctggtgcgtgagagcctgtcggcgctgacgcggctggaggatgaaatggtgatgacgccagaaatgcgcttcagtaagcgagagaaagagatcctgaagtggacggcggaaggaaagacgtcatcagagatcgcgatgattctgtcaatctcagagaacaccgttaactttcatcagaaaaacatgcagaaaaagtttaacgcgccgaataaaacgcagattgcctgctatgcggccgcgacgggcctgatctga

SEQ ID NO: 74883 - DNA, 753 bp, Citrobacter koseri
atgagtgcgattgaagttaaaaacctggtgaaaaagttccacggtcagacggtgttgcacggcatcgacctggaggtgaaacctggtgaggtggtggcgattatcggccccagcggttccggtaaaacaacgctgttgcgcagcattaatttgctggagcagcctgaggcgggcaccatcaaagtgggcgacattaccattgataccgcaagctcgttaaacaagcaaaaagggctaattcgccagttgcgtcagcatgtggggttcgtattccagaactttaatctgtttccgcaccgtaccgtactggagaacatcattgaagggccggtgattgtgaaaggcgagcccaaagccgaagcaacggcattagcgcgggaactgctggcgaaggtaggactggccgggaaagagaccagctatccgcgtcgtctgtccggtgggcagcagcagcgtgtggcgattgcccgcgcgctggcgatgcgcccggaggtgattttgtttgatgaaccgacttccgcgctcgaccctgagctggtgggggaggtgctcagtacgatacgccagctggcgcaggaaaagcgcacgatggtcatcgtgacgcatgaaatgagctttgcgcgcgacgtggctgatcgggtgatatttatggatcaggggcgcattgtggagcagggcgcggccaaaccgttatttgccaatcctcagcaaccacgtacgcgtcagtttcttgagaagttcctgatgcaataa

SEQ ID NO: 74884 - DNA, 669 bp, Citrobacter koseri
atgcaagaaagtatccaactggtgattgactcgctgccgtatctgcttaaaggtgcggtgtttacgctacagctgagtattggcgggatgtttttcggcctgctgctgggcttcattctcgcgctgatgcgtatgtcgcccctgctgcctgtccgctggctggcgcgtttttatatctccatttttcgcggtacgccgctgattgcccagctttttatgatctactacggcctgccgcagtttggcattgagctggacccgatcccggcggcgatgattggcctgtcgctgaataccgcagcctacacttcggaaacgctgcgtgcggcgatctcttctatcgacaaaggtcagtgggaagccgcggcaagtatcggtatgacgccgtggcaaacgctgcgtcgcgcgattttgccgcaggccgcccgcgtggcgttgccgccgctgagcaacagtttcatcagcctggtgaaagatacctccctggccgccacgattcaggtgccggaactgttccgtcaggcgcagctgattacctcgcgtacgctggaagtctttaccatgtatctggcggcatcgctgatctactgggtgatggcgacggtactttccgcgctgcaaaactattttgaagagcagcttaaccgccaggagagagagccaaaatga

SEQ ID NO: 74885 - DNA, 987 bp, Citrobacter koseri
atgccactgcataatttaacgcggttcccacgcctggaatttattggcgcgccaacgccactcgaatacctgccgcgtttatctgattatctgggtcgcgacattttcattaaacgcgatgacgtaacgccgatggcaatgggcgggaataaactgcgtaagcttgaatttctggctgccgatgcgctgcgtgaaggcgcggatacgctgattacggcgggcgccatccagtcgaaccacgttcgccagacggcggcggtagcggcaaaactgggattacactgcgttgcgttactggaaaatcctatcggtacgacggcggaaaactacctgaccaacggcaatcgtctgctgctggatctttttaacacgcaaattgagatgtgcgacgcgctgaccgatcctgacgcccagttacaggaactggcgacccgtattgaggcgcaggggttcaggccgtatgtgattccggtcggcggctccagcccattaggcgcaatgggatacgtggaaagcgcgctggaaatcgcccagcagtgcgagggcgcggtacagctgtcctccgtggtggtggcgtcgggaagcgccggtacgcacgccgggctggcggtaggtctggaacaattgatgccagatgttgagttgatcggcgtgaccgtgtcgcgcaaggttatcgatcagaagcctaaagtggttacgctgcaacaagcgattgctaaagagctggaactgaccgcctcggcggacatcctgctgtgggacgactatttcgcgccgggatacggaacgccgaatgaagaggggatggaggccgtgaagctgctggcgcgcctggaaggcattctgcttgacccggtctatacggggaaagcgatggcgggcctgatcgatggcatcagccagaagcgcttcaaagatgaaggtccgattctctttattcataccggtggggcgccagcgctgtttgcctaccatcctcacgtgtaa

SEQ ID NO: 74886 - DNA, 858 bp, Citrobacter koseri
gtgattagcagcaaaccctctacactacggtcattaatgacaacattcggggtaactatgaaattagcacttctgggacgtcaggctctgatgggtgtgatggcagttgcacttgtcgccgggatgagcgtgaagagttatgcagatgaaggtctgttaaacaaagtaaaagagcgcggcacgctgctggtaggcctggaagggacttacccgccgttcagttttcagggtgatgacggcaaactgaccgggtttgaagtggagttcgcagaagaactggcgaaacacctcggcgtaaaagcctcgctgaaaccgaccaaatgggacggtatgctggcgtcgctggattccaaacgtattgatgtggttatcaaccaggtcaccatctccgacgaacgtaagaaaaaatacgacttctcaacaccttatactatttctggtattcaggcgctggtgaaaaaaggcaatgaaggcagcatcaacacggcggctgacctgaaaggtaagaaggtcggcgttggtctgggaacaaactacgaagagtggttgcgccagaacgtacagggtgtagacattcgcacctatgatgacgatccgacgaaataccaggatctgcgcgtaggccgtattgacgctattctggtggatcgcctggccgcattggatctggtgaagaaaaccaaagacacgctggccgttaccggcgaagcgttctcccgtcaggaagccggtgtggcgctgcgtaaaggcaatgaagatctgctgaaagcggtagatggcgccattgccgatatgcagaaagacggcacgctgaaagcgctgtctgagaaatggtttggcgcagatgtgactaaataa

SEQ ID NO: 74887 - DNA, 552 bp, Citrobacter koseri
atgacggtgcagcaatctaaaagacggccactaagccgctacctcaaagactttaaacacagccagacgcattgcgctcattgccataaattgctcgacaggatcacgttggttcgccgggggcagattgtcaataaaatcgcgatttcccgcctggatacgctgatggacgacgcacaatggcaggaggagcagaaggagtggtcggcgctgtgccgtttctgcggcgatctgcactgcaaagagcagagtgacttctttgacatcatcggttttaaacaatttttgtttgagcaaaccgaaatgagccacggcaccgtgcgtgaatatgtcgtacgcctgcgtcgcctgggcaaccatctcaccgaacagaacatctctcacgacctgctacaggaaggttttcttgatgaaaacctggccccgtggttacccgaaaccagcaccaataactatcggatcgcgctgcgtaagtacgaacagtataaaacgcatacgcatgccggacagatgcagaaatcatcccggatggctacttctgatatatattaa

SEQ ID NO: 74888 - DNA, 720 bp, Citrobacter koseri
gtgaattcactgtataccgctgaaggtgtaatggataaacactcgctgtggcagcgttatgtaccgctggtgcgtcacgaagcattgcgcctgcaggtgcgtttgccggcgagcgtggaactggacgatctgctacaagcgggcggtatcgggttattgaatgcagttgaccgatatgacgctctgcaaggaacggcatttaccacttacgcagtgcagcgtattcgtggagcgatgctggatgaactacgcagccgtgactgggtgccgcgtagcgtccggcgcaatgctcgcgaagtggcgcaggcgatggggcaactggagcaggaattagggcgcaacgcgacggaaactgaggtggcggagcggctggcgattcctgtggaagagtatcgtcagatgttgcttgataccaataacagccaactcttctcttatgacgagtggcgggaagagcatggcgatagcattgagctggtgacggaagaacaccagcaggaaaacccgttacaacagctccttgagagcaatttacgccagcgtgtgatggatgcgattgaatcgttgccagaacgcgaacagctggtgttgacgctgtattaccaggaagagctcaatctgaaggagattggcgcggtgctggaagtcggcgagtcacgggtaagccagttgcacagccaggccatcaaacgtctacgcaccaagctgggtaagttataa

SEQ ID NO: 74889 - DNA, 1173 bp, Citrobacter koseri
atggataagaacatttttgttaccagtcctttattgccacctcttgatgagtttattccttatctggaagaaatatggcaaaacaaacaattaaccaatgctggtccatttcaccagcaacttgaagaggcgctggcggaatatctcggcgttgaacatttgtgcctgtttgcaaacggtacgctggcgttactaactgcgtttcaggcgttacgcatcacaggtgaagtgattaccacgccgtattcctttgtggcaacgtcgcattcgctactgtggaatggcttaaaaccggtttttgtcgatattgaccctgtcacctgtaatatggacccacggaaaattgaagaggcaatcacaccgcaaactaccgctattttgcctgtccattgttatggcatcccctgtgacacagcgcatattcagcagattgctgatatttatggtctgaaagtgatttacgatgcagcgcacgcttttggtgttaagcgggaagggacaaccattttgcgcgaaggcgacttatctgtcttgagtttccatgccacgaaagtattcaatacgatagaaggcggagcgattatctgccatgataaaaaaacgaaacaacgcattgattatttgaaaaactttggttttgccggggaaaccaccgttgtggcacctggcataaatggcaaaatgaatgaagttcagtcagcgtttggtttattgcaacttcgccatatcgataaagcattagctgagcgtgcggcgctgtttgataactataaaacactcctggccgatattcctggtatctcactgcttatcccgccggataatattgcatggaatcatgcttattgcccaattatggtttcggatgcgtttcctgtttcgcgagatggggtctatgatttattaaagtcccacaatattatgccccgccgttatttctacccattaattagtagcttcccaatgtatcgtgcactggagagcgccagacaagataaacttaaaattgcgcaattacgtgcagatgaagtcctttgtttgcctctctatcctggccttgaaaaagaggtacaggtagaaattgcttcattgttaaaaggagtgagcgaaaatgtgagtagtgactcatccgcgttgaaaactgatgagatttttgccgagcgcgttgcctga

SEQ ID NO: 74890 - DNA, 690 bp, Citrobacter koseri
atgaaaatcggcattatgcagccctatctattcccttacctgggatattttcaactgattaatgcggtcgatcagtttgtaatttatgatgacgtaaattatatccgtcagggctacattaatcgtaatactattttgatggggaactctcctcagcgctttaccgttgctgtgccgggcgcttcatctttcaaaaaaataaatacgttaagctttgacgttaatgttgctaaggtgctgaaaacagttcatcaggcgtatcataaaaggccatattttgaaccagtttttagtattgttgagaaggtgttgaccgccgagcagcgccagattcccatgctttgccagtatgcgtttaaagagatatttgcctggcttggcattgaagtgtcacttcacatggcgagtgatttgaattattcacgtgatgaaactgcaagcgggaaggtgatgaacatttgccgaactctcggtggagaccattacatcaatagtcctggcgggcagcatctttatcattctgatgaatttgtcgctcagggaatgaaactgtcatttattaaaatggatgatgttcattaccctcagggtgggggtaaatttcatgccggattgtcaattattgatgtgctaatgaactgctccccctctgaggtgaaagtgttattggggcagtatcagttaatttaa

SEQ ID NO: 74891 - DNA, 1068 bp, Citrobacter koseri
atgttgactgacgagcaaattgccgatttttgccatgcgtttatcgagaaagcctcacctcgttatatctttggactgacgagttatggtattgaaatggcaaaggtatttaacgttgagggcatcattgataataaaacaacgcaaactcagattgacgggtttccgattatctctctaagtcaggttccttcggacgcgttgattgtttcttcgattatggatggccgcccggtatcggcatggcgaacgctgtcggcagcgggacataaacagatcgattacttcagcttttatcgctatttcagccacctgttaagcaagccgacctggtatcatcaacccgaatttgtgcgcgactacgccgagaaccgtgaagcctatgagcgtatccgtgcgctccttgcggatgatatttcaaagcgcacttttgacgatatcatcaacttcaggcttaccaacaagctacagtttcttgcgcagtataatatttgcctgaacgatcagtacttcgatctgccctttattggcgaatatgccgaacattttattgattgcggtagttttgacggcgccacttccgttgagtttatgcgtcgatttcccagctataacacagtatgtatctttgaaccagaaccgcgccaggcgcagagtattcaacaggcgatgcagggcagggaaaatgtttatgtttatccctgcggcgtctcgcacagccagcagaagctgagtttttcttcctcggggtcgacttcgcatgcgagcgaagacggggggatcgatgttgaaatggtagcccttgacgatgtgttaaaagggcgagtgacgttcatcaaaatggatatcgaaggttttgagtcacaggctctggagggagcaaaacggattattcgtcaacagcatccactgcttgccgtctgttgctatcacaaacctgatgatttcagaacattgcctgagcaggtgctgggttatcgtgaggactacgacatctacctgcgtcactatacggaagggctactggaaaccgtttactattttgtccccagaaaaggtgcacaatga

SEQ ID NO: 74892 - DNA, 1281 bp, Citrobacter koseri
atgaaaaaaattaatgtccttattttcccttgcggtgcagagaatgcgggtgagatttatagcgcgctgcgctattccgtccatattggtctgctgctgggggcatcgagcgtaagcgatcacggggagtttcgttttcccgattatgccggtgatatgcccaatattcatgctgacgacttcgacgcgcaatttctgcgactggtgaaagagaagcagattgatgtcgttttcgctacgcatgattctgtcgcgttaaaacttgcacaacttaatgaaccccggcagcactactttttggttaatggcgatcgtcaggtaacggagacgctacgttataaaagcgctacctatgctctatttgacgattgccactgggtccctcatcgatactgcgatcttgcaacaattgacgactggccggcgatcgtaaaaccagactgtgggcagggggggaatggtgtacagcgagtaaataaccgcctgtctctggaacaggcgattgaatccgtcgcgcaggcgatcgtggtggaatatctgccgggagaagagatcaccgtcgactgtttcactgaccgaaaccgccgtttgatttgggctgggcctcgtacccgtgaacgtgttcgggcgggtatcagcatgcgttcacgagaggtcgttcttgacgatgaaataaccgacattgtcgaaacgataaatgcgcgactggcgcttcgtggcccttggtttgtacagctaaaacgcgacagaacagggaaatggaaactgctggaggtggcctgcaggattgctggcgcaatggtttttcagcgtgccagaggggtgaatttaccgcttatggctatccatgactttatgggacgcgatgttgtcgctctcccggaaatgagtgtcggtatcgttgatcgggccattgtgtcccgaacgcgaagtgaactcaactatccgcgaatctatgtcgatcttgacgacaccctcattatcgatggttttgcggtacctgccgtcatggcgtttttataccagagtcgggcgcagggaaaagccattacgctgattactcgccatgcgcaaaaacctgaagaaacacttatgtgcgcaggggttgcgttgaaccttttcgatgaggtcatccatctgacttctggagagcgaaagtcagaatatatacagccaaacagtttgtttattgataactattttcctgagcggatggatgtccgaacgctgaaagatgtgctcgttctggatgttgatgccgttgagttttatttgcgctaa

SEQ ID NO: 74893 - DNA, 834 bp, Citrobacter koseri
atgttatcgcctgccgaaacgttaggtattcccgtacgtttttattctctggacgccgcgtttgctcctgcggacgatcttcagccagaaaacggtgactgggtgcttgcggttaactattttggcctcgtcgataacctggctcagtcgctcatggaacggtttaatccacagcagatcgtctgggatcactctcaggcctttttctccgcgccgcaacccggtctggcaacgatctactcacccaggaaatttttcggcgttcccgatggcgggatgctggctggtgcaataccggtggatatccctccgacaggggaatcaggttctcttcagcgcactgagcatcttcttattcgcctggcgcagggcgcagaggctggctacaccgcctaccgacaggcagagcaaacgctggaggaactaccgggggaaggcatgtctatgctgactcatcgtttattagctgggatcgattatcaagcctgtgagcagcgacgccttgaaaattaccagtacctgtatcagcgtcttgcctgtatcaatgcgctaaatttacctgccaggccagaatgcggcccgctttgctacccactactgactgaaaatgaaaatctgcgcgaagcgcttcgtcagcgccgaatttttattcctgtttactggcttgatgccttgcaaagagtgagtgtcgattcgattgaacaccgttacatcagacacatcctaccgttgcctgtggaccatcgttatgggctggatgaaatgcaatctcttgcagattttgtgattgcgtatctctcatataccggggaaggttctgatgaaaaaaattaa

SEQ ID NO: 74894 - DNA, 3360 bp, Citrobacter koseri
ttgggattgcctacagagtcagataagagctacagcatttgctattccaccccgggccatatcagggctgttaaccatttgtatggcgtgacaacgcctgtccttgataccgccagagtgcttgaactgggcgcaggggaaggttatacactgtattcgcaggcgctgatgtatcccaactcgcgctttgtcggcgtggagcttgagagcgaaaactctctttcttcgcaacaggctctactgggcagtgcgccggataacctggcacttttttcactttctcttgatgacttactcagccaggatatcggtgaatatgattatattattattcatggcagctttagttggttgagtaatgatattcgcgaccaactccttgcgttttgccaacagcatttaagccctcagggttgtattgccattgaatgggaatgccatcctggtgcaaaaataaacgagattattcgcgacgcggtacaaattcatagcagtctggcgaatgatatcgaaacgcaaatcgccagttcccgggcaatgttaagctggttaaagctaaacggcgtcaccggggaggctgcatttttaaaaagtagcgatacattatcagatttgctgattagccatagccttctgcaaacaccaaacgagtaccgttacttgcttgaatttgcgggtgtgatcgagacttttggcctggcttatgtcggcgacttactaccatggacagagcttgcggcgcattatgatgaaaagatccaacatctacacaatgtgctcagtccactcaataacaaaattctgatccaacagtatcttgatttcgcagtgaatcgcggcacgcgttttagcctgttgacccatagcgacaatgcgcaaacggtgtctgtgttgccggacctgacgaaactgaaagatctgcgttgggcaggaagttttcgccgtcagtctctgcaaggaaggattctcaacacgttaaccgcaaatagcgaaacgcctgtctctacggatgatatcgctacgctggctctccttgatgttctcggcgacggctggcccgcaagcctcactttcgaacagctcgtttataacgttcgtcagcccgacttagaggataaagcatggcgggaggatatcagccagtcactgtcggctctttttttgaaagggttgcctgacttacatttctctctggataagagcgtttacgatacctgccaggctgcgccggcacagtgggtggcggcgacaagaggtaaatatgccattaaccgctggcatgaaactgtagaactgaatgacgaagaattgtcggcgatgtctgctccgacgccggtggtaacggcgcagaatgcgcaaatcttgtttagtctggttaagaaggggatggtggcggctgctcccaaagcctggcgggcttttttgcagcagcttatcggccattttccggctgaagaaacctggccccttgttttctcgctgattctttattccggtacggaggccaacggcggatttttaccttccgccagggcaacgccgggcaagaaaaagacatccatgccggctctggccccggtggaagaggcttttcatcgacagctagaaaagttaatgcaggaaggcagattccagcaggcgcgtgcgagcattgaacggttggttgcacagagaccagataatgtccatgtgcactatcttctggcgaatttctatttgcgtacttccgattatgacgccgggctgaaagccagtatgtcgttgctctcgttgcagtcgagtagctggcgtattttttatgagctctccgctattttttatcgtaaaaactggcgttggcaagcagggcgtctggcacgggcgatcttgcgcgccgaacctgggtatgctgcggcatgggatcttctcagttctctttaccgtgaaatgatggaatatacgctggcggaaatgtgtttgcgtaaagcaatagagatagaaccgcgttctgcgggcattattgagaatctgggaacgatccttggtgatcagtcaaaaatgagcgaggcgatcccttatttacgccgcgtagtcgagctggatccgggtaattttaatgccttcaccagcttgctgtttgggctgacgcacagcacagagcttacagcgcaggagctgctggaagaacataagcagtttggccaggccgctgagcgttgggcgagtaaacagccatttactattactcatacgcgcgaagagaaatctcgcttacgtatcggatttgtttctggagattttggccgccacccggtgacgaatttcctcgagccggtctggtattctctggatcgcgatcgctttgaaatatacggttaccagaactccccactacaggatgaggtaaccgagcgactgatggaaagtgcctgcgtatggtcaaaagtcacacatctaagccacctcgaatttgctgagcaggttaaaagggatggaattgatatccttgtcgatctctccgggcacactggttataaccgtttgccggcttttgcgttaaaaccagcacctgtccaactttcctggatcggttatcccggaaccacgggaatggcgacggtagattattaccttattgatagtcgttttgcggaaccgggcgttctggatcctgcctttgttgaaaaattaatttatcttccagcggttcagcagttccatccgaataaagagagccctgatgttggtccattgcctgcgctgaaaaatggctttatcacttttgccagctttaaccgcccgaaaaaaatcaatgatgaggttgttcgcgtctggagcaagatcttgcacagcatacctgaggctcgtttgcttattggctatatgtctgacagcaatatggttaaccatttcagaatgttgtttaaggagcagggcattaatgaggaacggttgctattcaggcaaaagatgtcgctgcatgagtatctggcattacataacgacattgatgttttgctggatacctttccttataccggggggacgacgacctggcatgcgatctggatgggtgttcctacattaactattgccggggacaccatcgcttccaggcagtgcagtgccgggctgaatttttgtgggctgcaggattttgtggccgttgacaaagaacagtacatcgctaaggcggttttgttgtctgaacaaacccatgcgttggctgagttgcgccagtcgctgcgctctcgcctgaaagagaagagtgtatctcaggtgcgagaagccatttatttcgagcgggcgctggagattatctggcagcgttattgtcaggggttgccgcctgcgccagtggtgattaatagcgatacataa

SEQ ID NO: 74895 - DNA, 873 bp, Citrobacter koseri
atggcagttatcaatactaacctgatgtcactgaccactcagaacaacctgaacaaatctcagtctgctctgggcacggctatcgagcgtctgtcctctggtctgcgcatcaacagcgctaaagacgatgctgctggtcaggcgatttctaaccgtttcacttctaacatcaaaggcctgactcaggctgcgcgtaacgctaacgacggtatctccattgctcagactgctgaaggttctctgaacgaaatcaacaacaacctgcagcgtatccgtgagctggctgttcaggctcagaacggcaccaactctggttctgacatcgactccattcagtctgaagttaaccagcgtctggacgaaatcaaccgtgttgccagccagagccagttcaacggcatcaaaatcctggcaggtactagctctgctacaactatctctatccaggttggcgctaacgacacccagaaaatcgacatcaccattaatggcaacagcggttggaacaaatttgattcaaccggtacttctggtgttactacgggtctggcttcaggtgaaacgcgtagcgttaccaccaaaggtttcgacgttctggctactgacgtgctgtcctctatcgatactgcactgaaagctgttgatactcagcgttctgacctgggtgcgattcagaaccgtttcgaatccaccatctctaacctgaacaacaccgtaaccaacctgtctgctgcacagtctcgtattcaggatgctgactacgcaactgaagtttccaatatgagccgcgcgcagatcctgcagcaggctggtacttctgtactgtctcaggcaaaccaggttccgcagactgttctgtccctgctgcgttaa

SEQ ID NO: 74896 - DNA, 1428 bp, Citrobacter koseri
atgcctactattagtaacctgggggttggctctaatctggatctgacgacgctctacaaccaattggaagctgctgaaaaaacaaaattaacatcaattacaactcagcagacaaactataacgcccagttgagcgcgtacggtaagttacaaagcgcattaaccaatctgcagactgccactgcggcattgggtaaaacaacaacctggaactcgacaaccgttagcagcactaacacggcattcactgccacaacaaccagtgaagctactgccggaagctacacagtcaacgtgagtcaggttgccaaagcacaggtattgatgtccggcaagattgacagcaacacaacaaaactgggcgaaacaacgacgaacggtacgcgcacaattacgattacgcagccgggaaccaaagatcctttagaaattacattgtcggattccgacaccagcctgaacggtattgcgaaagccattaataattccaatggtaacgtctccgccacggtaatgaaggcttctgacggcgactatcgtctgatgctgacatcaaaaacgacgggtacggactcagacatgaccgtaacggtaaccggtgacgacacgctccagcaggttatcggtcacgatgcttcaacaaatgcgctaaccgagcagaccgcatcgcagaacgcaaaactgacagtgaacggcgtcgaacttgaacgttcaagtaatatcatttctgatgcgctgccaggcgtcacgttgacgttgaagaataaaagcaccgccgacgaaacgctggaattaacccgtgcaacagaagagaacagcaaagcaataaatgactgggtaacagcctataatgcgctacagtcaaccatcgccagcgtgacgaagtacgtcaaagttgagcagggcaaagatcagtcagcaactaacggtgcgttaatgggcgacaccaacgtgcgttccattcaatcgcaattacgcagtctgctgacggatgtacaaggcggcgcttacgccattatatctcaactgggtattactcaggatccggtgaccggcgccgacggttcgacaggtaacctgaaaatagacagcactaagctgacgaaagcattaactgataacccacaggcggttcaggaatactttatcggcgatggcaaaacgacaggttttgctacagaaatgaacaatatgttgaccaaaatgctggatacctccgtcgatcaatctggggttattaaaaacgcgcaggatggcatcaacaaaacgctcaagacattagaacagcgctatgacgcgatggaagcctccatagaagcaactatggcgcgctacaaagcgcaattcacctcactggataagttgatcagtcagatgaacaatactgcaaactacctgacacagcagtttagctcatccagcagttaa

SEQ ID NO: 74897 - DNA, 411 bp, Citrobacter koseri
atgtatagtaaaagtggtgttctttcctaccaaaaagtcggggtggaaagtgcggtaatgagtgccgacccacaccaactgattgttatgctttttgacggagcactaagcgctctcgtcagggcacgactattcctggagcagggagaactgttatcgaaaggtgaagcgctgtcaaaagcgatcaatattattgataacggcctcaaggcgggactcaacatggacgttgaaggagacctttcccgcaatctggcatcactttacgattacatgatacgtcgtttgttactggccaacttacataacgacgtcgaagctatcattgaagtagagggattgctaaccaatatcgctgatgcctggaaacagattggctcaccggtttcacccgttcaggataccctttga

SEQ ID NO: 74898 - DNA, 363 bp, Citrobacter koseri
atgactaacttcatcccgtcacttaccgactggcatgccctgcatgcccttagtatcacaatgttggatctcgctcattcagggaaatgggatgaactgattgagcaggagatgaattatgtgcaactggtagaaggtattgcacgtaaccccatctctcccggcaatacatttctgataaaccaggcaaaagagatcctgaatgccgtactccgtaacgaggctgagttaaaaacgctgttgcagcatcgtatggaagagctacgtcagcttatagaccagactggaaaacagcagtccgtctccacgacatacgggaacctggcgggaaatattctgttccccagtaacctgaatcaataa

SEQ ID NO: 74899 - DNA, 1488 bp, Citrobacter koseri
atgaaaaaccccacgctattgcagtacttccactggtattaccctgacggcggcaagctctggccagaactggctgagcgcgctggcggcctcaatgatatcggcattaatatggtctggttaccgcccacctataaaggcgcgtccggcgggtattccgtaggttatgattcgtatgacctgtttgatctgggtgagtttgatcagaaaggatctgtcgccacaaaatatggcgacaaagcgcagctgctggccgccattgaggcgctaaagcaaaatgacattgcggttttgctcgacgtggtcgtcaaccacaaaatgggcgcggatgaaaaagaggccattcgcgtacagcgggtcaatgaagatgatcgcacgcaaatcgatgacgagatcatcgaatgtgaaggctggacgcgttacaccttccctgcccgcgccggtcaatattcgcagtttatctgggatttcaaatgcttcagcggtattgatcacatcgaaaacccggacgaagacggcatctttaagatcgtcaacgactacactggcgacggctggaacgaccaggtcgatgatgagatgggtaatttcgactatctgatgggcgaaaacatcgactttcgcaaccatgcggtcaccgaggagatcaaatactgggcgcgttgggtaatggcgcaaacccattgcgacggcttccgcctggatgcggtcaaacacattccggcctggttttataaagagtggatagaacacgtccaggaggttgcgccaaagccgctgttcattgtggcggagtactggtctcatgaagtggacaagctacaagcctatatcgatcaggtggatggaaaaaccatgctgttcgacgcgccgctacagatgaacttccacgaagcctctcgtcaggggcgtgattacgatatgagccagattttcaccgacacgctggtggaagccgatcctttccatgccgtaacgctcgtggcaaatcacgacacccaaccgttacaggcgcttgaagcgcccgttgaagcctggtttaagccgctggcctatgcgttgatcctgttgcgggagaatggcgtaccgtcagtgttctaccctgatctctacggcgcacattacgaagatacgggtggcgacggcgaaacctacaccattgatatgcccgttatcgaacagctcgatcaactgattctcgcgcgccagcgttttgcccacggcatccagacgctctttttcgaccaccccaactgcgttgcctttagccgtagcggtacagacgacgatcctggctgcgtggtcgtactttccaacggcgatgacggcgaaaagaccattacgctaggtgaaaattacgccaacaagacctggcgtgattttttaggtaatcgggaagagcgcgtaaccaccgatgaacagggtgaggccacgtttacctgcaacggtggctgcgtcagcgtatgggtcattgaagatgcactgtaa

SEQ ID NO: 74900 - DNA, 414 bp, Citrobacter koseri
atgaaaaaaatagcgatcgttggcgcatttctggtccttaccgggtgtgcagaggtacagaattataacgatgtggtgaagacgccagcgccagccggtctggaagggtactggcagtcaaaaggccctcagcgcaaactggtgagccccgaggcgatagccagtctggtggtgaccaaagaaggagataccctggattgccgtcagtggcagcgggtgattgccctgccgggtaaactgacgctgctttccggtgatttaaccaacgttacggtgaagcgcgaactctatgagattgagcgcgaagggaacatgctggaatatgatggtatgacgctgcaacgcgtggaccgacccacgaccgaatgcgccgactatttatcgaaacatccgctcgcgagtcagttaccgtaa

SEQ ID NO: 74901 - DNA, 1206 bp, Citrobacter koseri
atgtcatggcaacaattcaaacaagcctggttagttaaattctgggcgcctgtccctgcggtcatcgcagcaggtattctctccacttattatttcggtatcaccggtacgttctgggctgttacgggcgaattcacccgctggggtggacaaatcctccagctatttggcgttcatgctgaagagtggggttactacaagctgatccatctggaaggctctccccttacccgcatcgacggaatgatgatcctcggcatgttcggcggctgctttgccgcggcactgtgggccaacaacgttaaattacgtatgccgcgtagccgtatccgcattatgcaggcgattatcggcgggatgattgccggttttggcgcgcgcatggcgatgggttgcaatctggcggccttcttcaccggtattccgcagttttctcttcatgcctggttctttgcgctggcaaccgccatcggttcctggttcggcgcgcgcttcacgctactgcccatattccgtatcccggtcaaaatgcagaaagtctccgctgcctcgccgctgacgcagaagccggatcaggcgcgccgccgtttccgtctggggatgctggtctttatcggcatgatcggctgggcgctgctgacggcgatgaaccagccaaaactggggatggccatgctgttcggcgtgggctttggtctgctgattgaacgtgcgcaaatttgtttcacctcggccttccgtgacctgtggatcaccggtcgcacccatatggcgaaagccatcatcttcggaatggcggtgagcgctatcggaattttcagctacgtgcagttaggcgtggaagcgaagattatgtgggctggcccgaacgccgttatcggcggtctgctgtttggttttggcatcgtgctggcgggcgggtgtgaaaccggctggatgtaccgcgccgtggaaggtcaggtgcactactggtgggtgggcctcggcaacgttatcggctccactattctggcatattactgggatgattttgccccggcgctggcgacccgttgggacaaagtgaatctgctcgacaccttcggcccgctgggcggcctgctggtcacttatctgctgttgtttgccgcgctgatgctgataatcggctgggaaaaacgtttcttccgtcgctccgggttaacccctgctaaggaatccgcatga

SEQ ID NO: 74902 - DNA, 234 bp, Citrobacter koseri
atgaaaaatatcgttcctgattaccgtcttgatatggttggtgagccctgcccttacccggccgtcgccacgctggaagcgatgccgcagttaaaaaagggagaaattctggaagtggtgagcgactgcccgcaatccatcaataatattccgctggatgcgcgcaatcacggctatacggtgctggatattcagcaggatggcccaacgattcgctatctgattcagaagtaa

SEQ ID NO: 74903 - DNA, 315 bp, Citrobacter koseri
atgtcagcaatacaggggattgaaggggtcatcagccagctacaggcaacggcgatgtccgcacgggcgcaagacgcgctgccgcaaccaaccgtaagttttgccggtcaactgcatgcggcactgaatcgcatcagtgacacgcaaaccaccgcgcgcgtacaggcagaaaaatttactctgggtgagccaggcattgcgcttaatgatgtgatgaccgatatgcaaaaagcgtctgtctcaatgcagatgggtattcaggtacgcaacaaactgatgtcggcgtaccaggaagtgatgtcgatgcaggtgtag

SEQ ID NO: 74904 - DNA, 1677 bp, Citrobacter koseri
atgagtgcgactgcatcgactgcaacccaacctaaacctctcgagtggcttaatcgcctgcgcgcgaatcccagaattcctctgattgtggcgggatcagccgccgttgccatcatcgttgctatggttttgtgggcgaaagcgccagattatcgcacgctgttcagcaacctttccgatcaggatggcggggccattgtcacgcagctgacccagatgaacatcccttaccgcttcaccgaaggaagcggtgcgattgaagtgcctgccgataaagtgcatgagcttcgcctgcgcctggcgcaacagggattgccaaaaggcggcgctgtcggcttcgagttgttagaccaggaaaaattcggcatcagccagttcagcgagcaggtcaattaccagcgcgcgctggaaggcgaactggctcgcactatcgaaaccctggggccggtaaaacgcgcccgtgtccacctggcgatgccgaaaccttctctgttcgtgcgcgagcagaaatccccttccgcttccgtgacggtcaatcttgaaccaggccgcgcgctggatgaagggcaaatcagcgcggtggtgcatctggtatccagcgccgttgcgggtctgccgccaggtaacgtcacgctggtcgatcagggcggtcatctgttgactcagtccaataccagcagccgcgatctgaacgacgcgcagttgaaatacgccagcgatgtggaaggacgcattcagcgccgtatcgaatcgattctttcgccaatcgtcggcaacggcaacgtccatgctcaggttactgcgcagctggattttgccaacaaagagcaaacggaagagcaataccgtccgaacggcgacgcatcgcaggccgtgctgcgctcacgccagcttaatgaaagcgagcaaatcggctccggctatccgggcggcgtaccgggtgcgctgtcgaatcagcctgcgccggcgaatgctgcgccgatcagcacaccgcctgctaatcagcaaaacgcgcagaacacgcagacgaccaacaatgcgaacagcaatgtgccgcgcaatacgcagcgcaacgaaaccagtaactatgaagtggatcgcaccattcgccacaccaaactgaacgtgggcgatgtgcagcgactctccgtggcggtcgtggtgaactaccgcgccctgccggacggcaaaccgctgccgttaaccacggaacagatgaagcagatcgaagatctgacccgcgaagcgatgggcttctccgacaaacgcggcgatacccttaacgtggtgaactcaccgtttaccgcaacggacgacctgggcggcgagctgccattctggaaacagcaagcctttattgagcagttgatctccgcaggtcgctggctcctggttctgctggttgcctggattctgtggcgcaaagcggttcgaccgcagcttgctcgccgcgctgaagagacgaaagccgcacaggaacaggcgcaggttcgtcaggaaaccgaagaagcggtagaagttcgcctcagcaaagacgaacagacccagcagcgccgggcgaaccagcgtctgggcgcagaagtgatgagccagcgtattcgcgaaatgtcagataacgatccgcgcgtcgtggcgctggtcattcgccagtggatgaataacgatcatgagcaataa

SEQ ID NO: 74905 - DNA, 999 bp, Citrobacter koseri
atgagcaataaacttaccggcaccgataaaagcgtcatcctgctgatgaccattggcgaagaccgtgcggcagaggtgtttaagcacctctccacgcgcgaagtgcaaaccctgagttcggcaatggcgaacgtgcgccagatttccaacaaacagctgaccgatgtgctggcggaatttgagcaagaagccgaacagtttgccgcactcaacatcaacgccaacgaatacctgcgttccgtgctggttaaagcgctgggtgaagagcgtgccgccagcctgctggaagatatcctcgaaacgcgggataccgccagcggtattgaaacgctcaactttatggagccgcaaagcgccgccgaccttatccgcgacgaacacccgcagattatcgccaccatcctggtgcatctcaaacgcggccaggccgccgatattctggcgctgttcgacgaacgtctgcgccacgatgtcatgctgcgtatcgcgaccttcggcggcgtacagccagccgcactggcggaactgaccgaagtgttgaatggtctgctcgacggtcagaacctcaagcgcagcaaaatgggcggcgtgagaaccgcggcagaaatcatcaacctgatgaaaacccagcaggaagaggcggttatcagcgccgtacgcgaattcgacggcgagctggcgcagaaaattatcgacgaaatgttcctgttcgaaaatctggtggaagtcgacgatcgcagcatccagcgtctgttgcaggaagtggattccgagtcgttgctgatcgccctgaaaggcgccgagccgccgctacgcgagaaattcctgcgcaacatgtcgcagcgtgctgccgatattctgcgcgacgacctcgccaaccgtggcccggtacgtctgtctcaggtggagaacgaacagaaagccattttgcttattgtgcgtcgtctggcggaaaccggcgaaatggtaatcggcagcggcgaggatacctatgtctaa

SEQ ID NO: 74906 - DNA, 705 bp, Citrobacter koseri
atgtctaacgaattgccgtggcagatctggacaccggacgatctcgtccctcccctggccgagtttgtgccaatggagcaccgcgacgaaccgatagccatcgatgacgaaccggagctgagtgccgaacagcagcttgagcagcaactggcgcagctgaaaatgcaggcgcacgagcaagggtataacgcgggcctcgccgaaggccgccagaaaggccacgaacagggctatcaggaaggattagcgcaagggctggagcaaggccagacgcaggcgcgcgctcaacaggcgccgctgaatgcccgaatgcagcaactggtcagcgagtttcagaatacgctggacgcgctggacagcgtgattgcctcgcgcctgatgcaaatggcgctggaagccgctcgccaggtgatcggccagacgccagcggtggacaactccgcgctcattaaacagatccagcaattgttgcaacaggaaccgttgttcagcgggaaaccgcaattacgcgttcacccggatgatttacagcgcgtcgaagagatgctcggggccacgctcagcctgcacggctggcgtttgcgcggcgatcccacgctgcatcatggcggctgtaaagtgtccgccgatgaaggcgatctggacgccagcgtcgccacgcgttggcaagaactctgccgcctggcggctcctggagtcgtctga

SEQ ID NO: 74907 - DNA, 1371 bp, Citrobacter koseri
atgactacgcgcctgacccgctggctgaatacgctggataacttcgaagccaaaatggcgcagctcccgtcggtgcgtcgctacgggcggctgacccgcgccaccggtctggtgctggaagccactggtttgcagctgccgctcggcgcgacctgcgtcattgaacggcaggacgggacggaaacccgcgaagtagaaagcgaagtcgtcggctttaatggccagcggctgtttttaatgccgctggaagaggttgaaggcattcttcccggcgcacgcgtttacgcaaaaaatattgccggggaaggtctgcaaagcggaaaacagctgccgctcggccctgccctgctggggcgcgtgctggacggcggcggcaagccgctggatggtcttcccgcgccagacaccacggaaaccggcgcgttaatcactcagccattcaacccattgcagcgaacgcctattgagcatgtgctggataccggcgtccgccccatcaacgcgctgcttaccgtcggacgcggacagcgtatggggctgtttgccggttccggcgtaggtaaaagcgttctgctcggcatgatggcgcgctatacccgcgcggacgttatcgtcgtcgggctgattggcgaacgtggccgcgaagttaaagattttatcgaaaacattctgggcgctgacgggcgcgcgcgttcggtggtgattgccgcgcctgcggatgtctcgccactgctgcgaatgcagggagcggcctatgccacgcgtattgccgaggatttccgcgatcgcgggcagcacgtactgctgatcatggactccctgacccgctacgcgatggcgcagcgtgagattgcgctggcgatcggcgaaccgcctgcaaccaaagggtatccgccttcggtcttcgcaaaattacctgcgctggtggaacgtgcggggaacggcattcacggcggcggctccatcaccgcgttttatacggtattgaccgaaggcgacgatcagcaggacccgatcgccgactcggcgcgtgcgatcctggatggacacattgtgttatcccgtcgtctggccgaagccggtcactacccggccattgatattgaagcgtcgatcagccgtgcaatgacgtcgctgatcaccgagcaacactatgcacgcgtacggaatttcaaacagttgctgtccagtttccagcgtaaccgcgatttggtgagcgtcggcgcgtatgccaaaggcagcgatcccatgctggataaagccattgcgctgtggccgcagctggaggcgtttttgcaacaaggtattttcgaacgagccgactgggaagattctctccaggcgctggaactgattttcccgacggtgtga

SEQ ID NO: 74908 - DNA, 444 bp, Citrobacter koseri
atggcacaacatggtgcgctggcgacattaaaagatctggccgagaaagaagtggatgatgccgctctcttattaggggaaatgcgacgcggattccagcaggcggaagaacaactgaaaatgctgatcgattatcagcatgagtatcgcaacaatctcaatgccgatatgggccaggggattgccagcaaccgctggattaactatcagcaatttattcagacgctggagaaggccattgagcagcatcgccagcagctgacgcagtggacacaaaaagtggacgtggcgctaaacagctggcgtgaaaagaaacaacggcttcaggcctggcagaccttacaggacagacaaagtgcggcagcgttattggctgaaaaccgcctggaccagaaaaaaatggatgaatttgctcagcgtgctgcaatgaggaaaaccgaatga

SEQ ID NO: 74909 - DNA, 1215 bp, Citrobacter koseri
atgatcaccttgccccaactgatcacgaccgacacagacgtaacgacaggccttcaggctggtaaaacagccgattcagcccaggattttctggcgctgttagccggtgctttgggcgcaggcgacgcgcagggtaaagatgccccgctttcgcttgccgatctccaggcggcaggcggcaaactgcaaaaaggattgctgcaaaaaaatgccgatacgccgcagacgacagcgctggccgatcttctggcgcgccaggatctgctgacggatgacgccacagcagacctgaccgaggcacagcagttgctgtccacgctgacgccttcgctgaaaagcaacgccctgaacgcgttaagtaagactgcccggcaggacgacaacgcaccggcgctgagcgatgaagacctcgcgaatctgagcgcgctcttcgccatgttaccgggccagccggcgctgacgccaaccacgcgaaccgcgtcggctgaaggcgcactctccgcctcggcatcgctgcgtggcgatacgcgcgccgctatgcaggatgcggttgccgggctgacgactgccgagctgaaaaaagggaaagtcgatgccgcgcctgacgtcaccgcaaactcagcaagcaaccagccggtaacgccgctggtcgccgccgctgccgctaaagccgacatggaaagcacgccttctccggtcacgaccattggcgccatgaccacgcctggcggtatgacgacgcagacgcaacccgcgcctgtcgcagccgccccggtgctcagcgcgccgctgggcagccatgagtggcagcagtcattaagccagcatgtgacgctgtttacccgccaggggcagcagagcgcggaactgcgtctgcacccggaggaactggggcagattcaaatctccctcaaaatggatgataaccaggcgcaactgcaaatggtgtcagcgcatagccacgttcgcgccgcgctggaagccgcgttacccgtactgcgtacccaactggcggaaaacggcatccagctgggacaaagcagtatcagcagtgaaagtttcgccggacagcagcagtcgtcatcccagcagcagcacgcttcccgcgcacagggacaagaggcttttgccgccgaagatgacatcgcactgacgacgccgggctcgctccaggctgccgctcgcggcgatggcgcggtggatatcttcgcctaa

SEQ ID NO: 74910 - DNA, 468 bp, Citrobacter koseri
atgactgactccgcgattaacagaaagagcaaacgctcaatttggatccctttgctggtgttgattactcttgccgcctgcgcaaccgccggctatagctactggcggatgcaggagcacccgaccgccagcgctaccgcggccccgccaccgccgccagcgcccgtatttttcgcgctggatacgtttaccgtcaatctgggcgatgccgatcgcgtgctgtatatcgggattacgctgcgtctgaaggacgaagtgacgcgcgcgcgtctgagcgaatatctgccagaagtgcgcagccgtctgttgctgctgttttcgcgtcaggatgccactgcgctttcgacggaagccgggaagcagacgctgatcgcggcaatcaaagaaacgctctctactccgctcgttgctggacaaccgaaacaggaagtcaccgacgttctttatacagctttcattctgcggtaa

SEQ ID NO: 74911 - DNA, 1005 bp, Citrobacter koseri
atgggcgatagtattctttctcaggctgaaatcgatgcgctgctcaacggcgacagcgaggccaaagacgaacccacccctggcggcgtgggcgacaatgatattcgtccttatgatcccaatacacagcgtcgcgtggtgcgcgagcgcctacaggcgctggagatcattaacgaacgtttcgcgcgtcaattccgtatggggctgtttaacctgctgcgtcgcagcccggatattaccgtgggcgcgatccgcattcagccatatcacgaatttgcgcgtaatttacccgtaccgaccaacctgaacctgatccatctgaagccgctgcgcggtacgggtctggtggtgttctcgccgagtctggtgtttatcgccgtggataacctgtttggcggcgacgggcgttttccgaccaaagtggaaggtcgtgagtttacgcataccgaacagcgcgttatcaaccgcatgctgaagctggcacttgaaagctacagcgacgcgtggaaagcgatcaacccgctggaagtggagtacgttcgctctgagatgcaggtgaaattcaccaatatcaccacctctccgaacgacattgtggtgaacacaccgttccacgtcgaaattggcaacctgacaggcgagttcaacatctgcctgcctttcagcatgattgagccgctgcgggagctgttggtgaacccgccgctggaaaactcgcgtcatgaagatcagaactggcgcgacaatctggtgcgtcaggttcagcattcagagctggagctggtggcgaactttgcggacatcccgctgcgcctttcccagatattaaagctgaaacccggcgacgtgctgccgattgaaaaacccgaccgcattattgctcatgtggacggcgtacctgtactgaccagccagtatggcaccgtgaacggtcagtatgcgttgcgcgtagagcatttgatcaacccgattttgaattcgctgaatgaggaacagcccaaatga

SEQ ID NO: 74912 - DNA, 414 bp, Citrobacter koseri
atgagtgacatgaataatccgtccgatgagaataccggcgcattggacgatctgtgggctgacgcgttaaacgagcaaaaaacaacgaccagcaaaagcgcggccgatgcagtcttccagcagttgggcggcggcgacgtcagtggaaacctacaggatatcgatttaatcatggatattccggtcaagctgaccgtggagctgggtcgcacgcgcatgaccatcaaagagctgctgcgcctgacgcaggggtcggtggtcgcgctggacggactggcaggcgagccgttggatattctgattaacggctacctgattgcccagggtgaagtcgtggtggtcgccgataaatacggcgtgcgcatcacggatatcatcacgccgtctgaacgtatgcgtcgtctgagccgttaa

SEQ ID NO: 74913 - DNA, 375 bp, Citrobacter koseri
atgaaaacccaggctaccgtttcacagccctctgccgtatcaggctcgccgttagttcaggtgagcggcgcgctgtttgggatcatcgtgttgattctggtcgcagcctgggtcattaaacgcctggggtttgcgcccaaaggcgccggtacgcgagggttgaaagtgtcagccagcacctcgctgggcccgcgtgagcgcgtggtcattgtcgatgttgaagacgctcggctggtactgggcgtcacggccacgcacgtcaatgtgttgcataccctcccccctgcgcctgtcgttgcagaagaaaaaccggccgcccctgcggatttccaggccatgatgaagagtttgttgaagcgttccgggagatcctga

SEQ ID NO: 74914 - DNA, 738 bp, Citrobacter koseri
atgcgccgtttgttatccctcacgctaatggctttgtggtttatcagccctgccgcgttcgcacaattacccggactggtcagccaaccgctacccggcggcgggcaaagctggtccctgccggtacagacgctggtctttattacgtcactgacgttcctgcccgccattttgctgatgatgaccagctttacccgcatcattatcgtcttcggcttgctgcgaaacgcgctgggaacgccctctgcgccgccaaaccaggtacttctcgggctggcgctgttcttgacgttttttattatgtcgccggttatcgacaaaatttacgtggatgcctggcagcctttcagcgaagagaagatttccatgcaggaagcgctggaaaaaggcgctcagccgctacgggagtttatgctgcggcagacccgtgaggctgacctgggcctgttcgcgcgtctggcaaacagcggcccgctacaggggccggaagccgtgccgatgcgaattttgctcccggcctacgtcaccagcgagttaaaaaccgcttttcagatcggttttacgattttcatccccttcctgattatcgatctggttatcgccagcgtgttgatggcgctcgggatgatgatggtgccgccggccaccattgcgctgccgtttaagcttatgctttttgtcctggtcgacggctggcagttgctcgttggctctcttgcccaaagtttttacagttag

SEQ ID NO: 74915 - DNA, 270 bp, Citrobacter koseri
atgacacccgaatcggtcatgatgataggcacggaggcaatgaaggtcgcgcttgcgcttgccgcgcctctgctgctggttgcgctgtttaccggccttatcatcagtattttacaggccgccacccagatcaacgaaatgacgctgtcatttatcccgaaaattgtggcggtatttacggcgattattgtggcgggcccctggatgcttaacctgctgctggattacgtgcgtacgctgttcagtaacttgccgtatatcatcggataa

SEQ ID NO: 74916 - DNA, 795 bp, Citrobacter koseri
atgttgcaggtcacaagcgatcaatggttatactggcttaacctctacttctggccgctgttacgtgtactggcgctgatctctaccgcgccgatcctcagtgaacgtacggttcccaaacgggtaaagctggggctggggtttatgatcactctcattatcgccccttcactcccggcgaataatgtgcctgttttttccaccgaagccttatggctcgccatgcagcaaatcatgatcggcattgcgctagggtttaccatgcagtttgcctttgctgcggtgcgtacggcgggggaattcatcggtctgcaaatgggtctctctttcgccacgtttgttgacccgggcagccgcctcaatatgccggtactcgccagaatcctcgacatgctcgccatgctgctgtttcttacgtttaacggccatctgtggctgatctcgctgctggtagacaccttccatacgctgcctatcggcggcgacccggtcaacagcaatgcgtttctggcgctcgcccgggcaggcggactgatcttcctcaacggactcatgttagccttgccggtcattacgttactgctcaccctcaacctgtcgctcgggctattaaaccgtatggctccgcagttatccgtatttgttattggcttcccgttaaccttatccgtcggcattttgttaataaccgcgctcatgccattaattgcccctttctgtgaacacttattcggtgaaattttcaatttgcttgctgatatcgttagcgaaatgccgacaaccaataacccataa

SEQ ID NO: 74917 - DNA, 624 bp, Citrobacter koseri
atgtcaacgattattatggatttatgcagttacacccggctaggtttgaccgggtatctggtaagcagaggggtgaaaaaaagggaaatcaacgacattgagaccgttgacgaactcgccatcgcttgtgactcacagcagccttctgtggtgtttattaatgaggactgtttcatccatgatccatctaacagtcagcaaataaagcagatcattaatcagcatcccaacacgttatttattgtttttatggcaattgctaatgtgcattttgatgaatacttattagtaagaaaaaacttattgattagttcaaaatcaattaagcccgattctctggatgatattcttggcgatattctgaaaaaagagacggatattgtaggagtagtaaatttacctacgttatctttaagccgtactgaatccagtatgttgcgaatgtggatggatggacagggaacaatacagatttcagatcaaatgaatatcaaggcaaagacggtgtcatcccacaaagggaatattaaacggaagataaaaacgcataataaacaggttatctatcatgtcgtgcggctgacggataacgtgacaaacggaatttttgttaacatgcgatga

SEQ ID NO: 74918 - DNA, 189 bp, Citrobacter koseri
atgaaggtgaatgatcgggtaacagtcaaaacagacggcggccctcgtcggccaggcgtggtattggcggttgaagagtttagtgaaggtacgatgtacctggtttcgctggaagactacccgctcggtatctggttcttcaatgagtcaggccatcaggatgggatctttgtggaaaaaacagagtaa

SEQ ID NO: 74919 - DNA, 228 bp, Citrobacter koseri
atgaaaaccgcgaaagagtacagcgaaacggccaagcgcgaagtcagcgttgatgttgacgccctgctcgcggcgatcaatgaaatcagcgagagcgaaattcatcgcagcgctgatgatcctgagaaagtcagtgtggatggccgcgattatcatacatggcatgaattagcggatgcgtttgaactcgatattcatgattttagcgtcacggaaatcaatcgctga

SEQ ID NO: 74920 - DNA, 1716 bp, Citrobacter koseri
gtgccgcatgaaacaacgccaggaaacaggagctggctgagaacgttagcacgacgctttgggccaggccatgtcgtaaatatctgttttctggttgtgatgatttgttcaacattgctgacctggcgtgaagtggtcgtgctggagtcggcataccgggccagtcaacgtaaccatctggaaaacgttgctaatgtgctggacagacagctgcaattcagcgtggataaactcttgtttctgcgcaacggtatgtacgaagcgctggtcacgccgctcgattttgccgacctgcacgatgcggtggcgcaatttgcgcaactgcgcggcaaaagtttctggcaactggagctagacagacggcgaacgttaccgcttaacggcgtctctgacgcgtttgttaaccgtacaacgcttctcacgcgggataacgatgcgctggcaaacgagttaagcgccacgctggaactggggtatttgttacggctggcgcattcttctaccatgctggcgcagcggacaatgtatgtttcgcgttcaggcttttatgtctcaactgaacccacaaccaatggcggcgacattatgtcccgctattaccagtatgtgatccaaccctggttcagcgggcaatcccaacgacaaaattcagcgcgcggcgtgcgctggtttagctcgccggtgccgggcggtgaagtgcaacaaaaagtcaccgtgagcctgtcgctggataacgaaagacactggtatggcgtgctggcaatggatattcccgtgtcatccatgaagcgtttcctggaggatgcggtcgaaaaagattccgaaggggagtaccagctctacgactatcagctcaggctactggcgacctcaacgccggaaaagcgtcaggttaatacctttgatgaccttgaactggcgttgctcgcgaatgacatcgaacatgatacgcatggtggtatccgtatgggcagccgctatatcagttgggaaaggctggatcatttcgatggcgtgcttttgcgtgttcataccctgagagaaggcgtgcagggggcttttggcagtatcagtattgcgcttggtctcctgtgggcgcttttcacgatgatgttgctcatctcatgggttgttatccgcaagatggtcagcaatatgtttgtgctgcaaagttccctgcaatggcaggcctggcacgatcctttgacgcggctgtataaccgtggcgcattgtttgagagggcgcgcgtactgatacagcgctgccatgagcagcggcagccgttttccgttattcagatcgatttggatcactttaagagcgtcaatgaccgtttcggccatcaggcgggagaccgggtgctctcccatgccgccgggcttattagcggcacaatacgttcgcatgaccttgccgggcgcgtaggcggcgaagagttctgtattgtcttaccggggacgacgctggtgcaggcagcacagatcgcagagcggatacgccagcgcgtgaacgacaaagaaatcctgatcgcaaaaggtacgaccctgcgcattagcgcatcgctgggtgtaagcggggcgcaggagaacggagactacgattttgaacagttgcagtcgctggcggatcgccggttgtatctggcaaaacaggccgggcgcaatcaggtttgtgtccgtgacgaccatcccgcgccgtcgcctgatacacgctga

SEQ ID NO: 74921 - DNA, 183 bp, Citrobacter koseri
atggtcttttttgtcagtgaggaagttatcgcaaaagaaggtggtccacgcatgatcgtaaccggttattccagcggcatggtggagtgccgttggtatgacggttttggcgtcaaacgggaagcattccacgagaatgaacttatgcccggtgatggcaggcggttgcgggaagatgtctga

SEQ ID NO: 74922 - DNA, 912 bp, Citrobacter koseri
ttggcaggaagtagtttgctgacgttgctcgatgacatcgccacgctgttggatgatatctcgatgatgggaaaactggccgcgaaaaaaacggcaggtgtattgggtgatgacctgtcgctaaacgcgcagcaggtgacgggcgtgcgggcgaaccgcgaactgccggtcgtctggagcgtggcgaaagggtcgttgatcaacaaggtcatcctggtgcctctggcgctgctgatcagcgcttttatcccgtgggcgattacaccgttgttgatgattgggggcgcttttctctgttttgaaggcgtagagaaagttttacacacgcttgaggcccgaaagcacaaagagagcccggaggcgcgtcagcagcgtctggccgcgatcgccgcacaagatcctctcacgtttgagaaggagaaagtgaaaggggctgtgcgcaccgactttatcctttctgcggagatcgtcgcgattacgctgggaattgtcgcggacgcgccgttgctcaatcaggttctggtgttgtccggtatcgcgctggtggtgacgattggcgtttatggtctggtgggactcatcgtaaaactggacgatatggggtactggctggcggaaaaacgcagcgtactggctcaggcggtgggcaaagggttactggttacggcgccctggcttatgaaggcgctgtccattgtcggcacactcgcgatgttcctggtggggggcgggatcgtggtgcacggcatcgcgccattacaccacgcgatcgaccattttgctcagcagcagaatggtcttattgcgctcacgcttcccatgttgattaatctggtgctcggtttcatcatcggcagcgtggtggtggggctggtaaaaactgttgccaacgttcgcggtggttcgcactaa

SEQ ID NO: 74923 - DNA, 921 bp, Citrobacter koseri
atgcgtttcaggcagttactaccactttttagcgcactcttcgcgctgtatatcatttggggttccacgtacttcgttattcgtattggcgttgagagttggccgccgctgatgatggcgggcgtccgttttctgtctgcggggattttgttaacaacattcttacttcttcgcgggcataaactgccccctttgcgtcaattgctcaatgccgcgctgattggcattctgctgctggcggtggggaacggtctggttaccgtagcggaacatcaggatgtaccgtccggcatcgccgccgtagtggtcgcgacggtcccactcttcacgctgtgcttcagccatttctttggcattaaaacgcgaaaactggagtggacaggtatcgccatcggcctggcggggatcatcatgctcaatagcggcggaaatctgagcggcaatccctggggcgcgctgttgatcctgattggctcgatgagctgggcattcggctccgtgttcggcgcccgcatcgcgttgccgacaggcatgatggccggagcgattgaaatgctggctgccggtgttgtgctgatgttcgcttcctttatcgccggggaaaagctgacgacgatgccgacgctctccggcttcatggcggtaggttatctggcgctattcggttccattatcgccattaacgcctatatgtatttgatccgtaatgtcagcccggcgctggcaaccagttacgcctacgtcaacccggtagtggcggtgttgctgggaacaggtctggggggagaaagcctttcttccgtcgagtggctggcattaggggtaattgttttcgctgtcgtcctggtgacgctggggaaatatttgtttcccgccagacccgcgaccgcagcgagcgaatcggaaaaatcactccagtaa

SEQ ID NO: 74924 - DNA, 471 bp, Citrobacter koseri
atggcggacgtacacgataaggcgacgcgcagcaagaatatgcgggcgatagccacgcgcgatacggcgatagaaaaacgccttgccggtctgttgcaggagcaggggatggcgtttcatgtgcaggacgccacgttgcccggacgcccggattttgtcgtggatgagtatcgctgcgttatctttacgcacggctgtttctggcatcatcatgactgctacctgttcaaagttcccgctacgcgtaccgagttctggctgaacaaaatcggtaaaaatgtggagcgcgatcggcgagacatgctgaggcttcgcgagcttggctggcgtgtgctgattgtctgggagtgtgctttgcgtggccggttgaaactcagcgacgccgcactggcggaacggcttgaagagtggatctgcggcggtggccccaccgcgcagatcgacacgcagggtattcatttactggagtga

SEQ ID NO: 74925 - DNA, 1395 bp, Citrobacter koseri
atgacggacaatgccggggctgccgtacaggcgctgctgggcaaactgctggaaatctatgatgtgaaaacgctggtggcgtatctgaatggcgttggggagaaccactggagcccggctatttttaaacgcgtcgtggcgaacgcaacggcgtggcatcgtctgagcgagagcgaatatacgcacctcaggacattgttgccaacgcctccggcacaccatccgcattatgcctttcgttttgtcgatctcttcgccgggatcggcggaattcgccgtggctttgaagcgataggcgggcagtgcgtgtttaccagcgaatggaataaacacgcggtacgcacctataaagccaattattactgcgatccgcaacggcatcatttcaatgaagatattcgcgatattacgctgagccaccgcgacggcgtgagcgatagcgaagcggcggagcatattcgccagcacataccggagcacgatgttctactggccggttttccctgccagccattctctctggcaggggtatcaaagaaaaacgcgatgggacgggcgcatggtttcgcctgcgatacgcaggggacgctctttttcgatgtcgtgcgggttattgacgcccgacgcccggcgatttttgtgctcgaaaacgtcaaaaacctgaaaagccacgaccagggaaaaacgtttcgcatcattatgcaaacgcttgacgaactggggtatgacgtcgctgatgctgcggataacgggccggacgacccgaaaattattgatggccgccattttttaccccagcatcgggagaggattgtgctggtggggttccgccgcgatcttaatctgaaaaccgattttacgctgcgggatattgccacccgctatccgcagcagcgcatcacgctggcggagctgcttgaaccggcagttgaagcgaaatatgtgctgacgccggtattgtggaagtatttgtaccgctacgcgaaaaagcatcaggcccggggtaacggtttcggctatgggatggtctatcctgcgaatcccggcagcgtaacgcgcacattgtcggcgcgttactataaagatggcgcggagatactgattgaccgtggctgggatatggccgcaggagaggcgaatttcgacgatccggtgaatcagcagcaccgtccacgccggttaacgcccagagagtgcgcgcggttaatgggattcgaatcgccgcagggatatcagttccgcattcccgtttcagacacccaggcctaccgtcagtttggtaactccgtcgtggttccggcatttgccgcagtagcaaaactgctggagtcgagaattaaacaggccgttacattgcgccagaaagagagccagcatggcggacgtacacgataa

SEQ ID NO: 74926 - DNA, 696 bp, Citrobacter koseri
gtggatttacactactggcaatcgcagttcgaagcgtggttgggcaaaaatcaccacgagcaggatagcgctcatgacatttttcattttcgtcgcgtctggggaacggcacaaaagctgtcgacggatgaggatgttgactggcttgttgtactgaccgcgtgttatttccacgatatcgtcagcctgccgaaaaatcatcccgatcgccatcgttcatccgtgctggccgctgacgcggcacgtcgcatattaatgaacgatttccctgcgtatcctgaagagaaattagcggcagtcagtcatgcgatcgaggcgcacagttttagcgcccacattgcgccaatgaccagcgaggcgaagattgtgcaggatgccgaccggcttgaagcactgggcgcaatcggtctggcgcgcgtgtttgccgtttccggcgggctgggcgtttcgctatttgatgctgaagatcccttcgcgcaacgtcgcccgcttaacgataagcaattcgccctcgaccattttcagacaaaacttctgaccttgccgcaaaccatgcaaaccgcgcggggaaagctgctggcagagcataacgccgacttcctggtgacctggatggcgaagctaagcgcggagctaagaggggagtacgactcgttggatcagacggtaattcaggcttttagccgcgataagtag

SEQ ID NO: 74927 - DNA, 1188 bp, Citrobacter koseri
atgaaaagaaaagttctggcgatgcttgtccctgctttattaattgcaggcgctgcaaatgcggctgaagtgtataataaagacggcaataaactggacctgtacggtaaagttgatggcctgcgttatttctctgacgatgcaggcagcgacggcgacatgtcctatgcccgtctgggttttaaaggcgaaacgcaaattgccgagcagttaaccggttacggtcagtgggaatacaacattcaggccaacggtactgaaggtgataaaggtgactcctggactcgtctcggcttcgccggtttaggttttggtcaaaacggtactttcgattacggtcgtaactacggcgtggtttacgacgtagaagcctggaccgatatgctgccagaattcggcggcgatacttacactcagaccgacgtttatatgttaggccgtactaacggcgtagcaacctaccgtaataacggcttctttggtctggttgatggtctgaactttgcgctccagtatcagggtaataatgaaaatggaggtgctgactttggccaggaaggttccggcaacagtactaatcgcaagctggccaaagaaaacggcgacggcttcggtatgtccacctcctacgacttcgacttcggtttaagcctgggtgcggcatacgccaattccgatcgtaccaatgctcaggttgctcgtggttacggtgacggcatgaaccagcgtaataactatgctggtggcgataaagctgaagcctggaccgttggtgcaaaatacgacgcctacaatgtttatctcgccgccatgtacgctgaaacccgtaatatgacttactatggcaatggcgacagcgaacttaatggcggtatcgccaacaaaacgcagaactttgaagttgttgcacagtatcagtttgatttcggtctgcgcccgtctattgcctacctgcaatctaaaggcaaagacttaggtggtcaggaagtaagacacggcaactggcgttacaccgataaagatctggtgaaatatgttgatgtgggtatgacctattacttcaacaaaaatatgtccacctatgttgattataaaatcaacctgctggatgaagacgatagcttctacgcagacaacggtatcgcaaccgatgatatcgtagccgtcggtctggtttaccagttctaa

SEQ ID NO: 74928 - DNA, 897 bp, Citrobacter koseri
atggctggagttcagggctaccgcctgttcaacgttcaactggcgcgtaagacggaggtttccccttcgctgctgagcctggttttcagcgggcaggaggtggcgcagatgaaatgcgactcgccggatcaacgcattaagatgttgtttccgtctgaagacggtacgccgccgtcgttgcctgccgaagggcactggtatcagcttgtactggggatgccaaaagagaagcgcccggttatccgtacctatacgctgcgacatgtcgatcctgctcgccaggaggtcaccgtggaatttatcaatcatggtacagaaggaccggcttcggcatgggcgattaacgccagacccggcgacgccattcagatggtggcgcctgacgcggcgtatgctgaagacagcggtggctatgaatggacgcctcccctgggactgcggaatgcgttaatcatcgctgatgagacggcactccccgccgcgcgcggtatccttgagatgctggcgagacagaccaacccgccacaggttcaggcgttctttgaagttcctgaacagggcgactgcgcgaatttaagcgagtttaagttcgccgacattttttggttgccgcgtaaccccacagcggcgaagcacggtgaatgcctgattcaggccgtaaaaacgcatgccagagtacccgaaagtcgccatcccgatacggtggatacggtgaaagaagaagccgaaggggagcttctctgggataaggccacgaccagcagcacggcgttttatgggtgggtggccgcagagtccaccgtcgtcaaactgctgcgccgccatttaattggcgagcgtggcgttgagcacaaagcgattaactttatggcatattggtctaaagggcgcgcgtga

SEQ ID NO: 74929 - DNA, 1212 bp, Citrobacter koseri
gtgacgtctcttgagagcgcggaaacgccgcaaaaaccattgtcctgctggccgcttgcgttcagcgcggggttactcggtgtcgggcaaaacggcctgctggtcgcgatccctgtactggtgattcagacaaacctgagcctgtcgatttgggcggctttgctgatgcttggttcaatgctgttcctgccgtcttccccgtggtggggaaagcaaattgcccgtgtgggcagtaagcctgtggtgctgtgggcactggggggatacggcgcaagctttactctgcttgggctgggaagcatgctgatggcgaccggtgccgtaacaacagcggtggggctgggaatattaatcatcgcgcggatcgcctacggacttaccgtgtcggcgatggtgccagcctgtcaggtctgggcattgcaaagagcgggggaagggaatcgcatggtcgctctggcaaccattagctccggcttgagctgcggcagactattcgggccgttgtgcgcggcggcgatgctggcaattcaccctctggcgccgatggggctgctgatggcagcgccactgctggcgctggtgatgctgctgcggttgcctggcacgccaccgcagcccgcagcggagcgcaagagcgccagcctgaggctggattgcctgccttatctgctttgcgcgctgttattagctgcggcggtgagcatgatgcagcttggtctttcgcccgcccttactcgccagttcgtcacggataccgccgccattagccaccaggtggcgtggctgttagggctggccgcagttgctgcgcttatcgcacagttcggggtgctccgcccgcagcgcctgacgccgatggcgctgctcttgagtgccggagcgctgatgatttgtggcctggcgataatgctcgccgaacagctatggttgttttacctcggctgtgcggtgctgtcgtttggggctgctctggcaacacccgcttatcagcttttactgaatgataagctgacagacggcgcaggcgcgggctggatcgcgaccagccacacgcttggctatgggctttgcgcattgctggtgccgctggtgtcgaaaaccggcgccgcagcggcgctgattgtggcggcttttttcgtcgctgtgttatttaccgtggtgtctggctttatctggcgcagccgctaccgttcacgtcattccgcgatttaa

SEQ ID NO: 74930 - DNA, 1782 bp, Citrobacter koseri
atgagaaaccttatcggcataattcgcattatcataacgagtgggatctgtttgattatgactttgccaactaaaacgtcagccctggatgtggctgcgcagtgcttcctgaattccctggttcgtgaaaccaaagactggcggctgacggaataccagccaaccgaattgatcatcccgctgggcgaacagcaggcgctccatttcagagtggcttatttttccccaacccagcatcaccgctttgaatttccggcgcgtctggtcacggcctctggcagtcaccccgtcgatttcgccaccctctcccggcttattgttgataagctccagcaccaactcttgctgcccgcgaccagttgcgaaaccttccaccagcgcgtgatggaaagccacgcccatacgcagcaggcgattgatgcccgccatgactgggcagccctgcgtgaaaaagcgttgaactttggcgaggcggagcaggctctgctggtcgggcacgccttccacccggcgcctaagtctcatgaaccgtttaaccagcaggaggccgaacgctacctgccggacttcgcgccccacttcccgctgcggtggtttgcggtggacaaaacgcagatcgccggtgaaagcctgcatctcaacctgcaacagcggttgacgcgatttgccgcagagaatgcgccgcagttactcaatgaattaagcgacaatcaatggctattcccgctgcacccgtggcagggggagtatctgttacagcaggagtggtgccaggagcttgtcgctaaagggctgattaaagatttaggcgaagccggcgcgccgtggctaccgaccacctcttcccgctcgctctactgcgccaccagccgcgacatgatcaaattctccctgagcgtgcgcctgaccaactccgtccgtaccctgtcagtgaaagaagtgaagcgtggaatgcgcctggcgcgcctggcgcaaaccgacgactggcagacgctacaggctcgcttcccgactttccgggtgatgcaagaagacggctgggccgggctgcgcgatctccacggcaacatcatgcaggaaagcctgtttgccctgcgtgaaaacctgctggtggatcagccgcaaagccagactaacgtactggtctccctgacccaggccgcgccggatggcggtgattcgctgctggttgcggcggtaaaacgcctgagcgatcgcctcggcatcactgcgcaacaggccgcccatgcatgggtcgatgcttactgtcagcaggtgctgaagccgctgtttacggctgaagcggattacggcctggtgctgctggcgcatcagcaaaatattttggttcagatgcttggggatctgccggtcgggcttatctaccgtgactgccagggcagcgcgtttatgcctcacgcggcaggctggctcgacaccattggcgaggcgcaggcggaaaacgtcttcacccgtgagcagttgctgcgctacttcccttattacctgctggttaactccacttttgccgtgaccgccgcgctgggcgccgccgggatggacagtgaagcgaatctgatggctcgcgtacgaaccttgctggctgaagtgcgtgatcaggtgactcataaaacctgtctcaactacgtgctggaaaatccgtactggaacgtaaaaggtaactttttctgttatctgaacgaccacaacgagaacaccatcgtcgatccctcggtgatctacttcgatttcgccaacccgctgctggctcaggagggctaa

SEQ ID NO: 74931 - DNA, 948 bp, Citrobacter koseri
atgtctaaggcaaacatcgttcacagcggatatggactgcgctgtgaaaaactcgacaagcctctgaatcttagctgggggctggacaatagcgcggtgctgcgctggccagggccgctgccgacagggtggctgcgcgacgcgctggatcagatatttatcgccgcaccacaactttcagcggtggttctcccctgggccgaatggcgtgaggagccacaggcgctgacgcttttcgggcaggtaaaaagcgacatcatccatcgcgccgccttctggcagttaccgctatggctgagttctccggcaaaccgggcctccggcgaaatggtttttgatgcagagcgtgagatttatttcccgctgcgcccgccccgtccgcagggcgaggtttatcgccgttacgatccacgcgttcgcaagacgctgagtttccgcgttgccgatcccgttcttgatgcagaacgtttcacccgctggatgaacgatccgcgcgttgagtatttctgggagcaaagcggctctctggaggtacagaccgcctatctggagcgccagctcaccggtaaacatgcgttcccgctgatcggctgcttcgacgatcggccgtttagctatttcgaaatctactgggcggcggaagatcgcattggccgccactattcgtggcaaccctttgaccgtggcctgcatctgctggttggtgaacagcaatggcgcggagcccactacgtgcaaagctggctgcgcgggctgacgcattacctgctgctggatgagccccgcacgcagcgcaccgtacttgagccacgcgccgataaccagcgcctgttccgccaccttgagcctgcgggataccggacaattaaagagttcgacttcccgcacaagcgctcacgcatggtgatggcggatcgccataacttcttcacggaggtcggtctgtaa

SEQ ID NO: 74932 - DNA, 1734 bp, Citrobacter koseri
atgaatcacaaggattgggattttgttaaccgccagttggtggcaaaaatgctggccgagctggagtatgagcaggttttccacgcggaatctcagggcgatggccgctactgcattaacctgccgggcgcgcaatggcgcttcaacgctgaacgcggcatctggggctggctgtggattgatgctcaaacgctgcgctgtgcggacgagcccgttctggcgcaaacgctactgatgcagctaaagccggtgctgtcgatgagcgatgccaccgttgctgagcatatgcaggatttgtatgccacgctgctgggcgacctgcaactgctgaaggcacggcgcgggctgagcgccagtgacctgattgatcttgatgccgaccgcctgcaatgcctgctaagcggccatcctaaattcgcttttaataaaggccgccggggctggggcaaagaggcgctggagcgatatgcgccagagtacgccaacaccttcagactgcactggctggcggtaaaacgtgagcatatggtctggcgctgcgacagcgagctggatattcagcagttgttggcggccgcgatggacccgcaggagtttgcccgcttcaatcaggtctggcaggaaaacgggctggataacgactggctgccactgccggtacatccgtggcagtggcagcaaaaaatcgccctcgacttcatcgccgatcttgccgaaggcaggatggtttctctcggcgagtttggcgacttgtggctcgcccagcagtcgctgcgcaccctgaccaacgccagtcgccagggcgggctggatatcaagctgccgctgaccatctacaacacctcctgctaccgggggattccgggcaaatacatcgccgccgggccgctggcctcacgctggctgcaacaggtttttgcgaccgacgccacgcttaagcaaagcggcgcggtgatcctcggtgaaccggcggcgggctatgtgtcccatgaaggctatgccgcgcttgcccaggccccctaccgctaccaggagatgctcggcgttatctggcgtgagaatccgtgtcgctggctgaagccggacgaaagtccgattctgatggcgacactgatggagtgcgatgaaaacaatcagccgctgataggcgcatatatcgaccgctccgggctggacgctgaaacctggctcacgcagctgttccgggtggtagtggttccgctgtatcacctgctctgccgctacggcgtcgcgcttatagcccacggacaaaatataacgctcgccatgaaagagggcgtaccgcagcgcgtgctgttgaaagacttccagggcgatatgcggctggtgaaagatgcgttcccggagatggactccctgcctcaggaggtgcgggacgtcaccgctcgcctgagcgccgactacttaattcatgatttgcagaccggccacttcgtgacggttctgcgctttgtttcaccgctgatggctcgccttggcgtaccggagaggcgtttttatcaactgctggcagcagtgttgagtgattacatgcaggaacatccacaaatgtcagcgcgctttgcgcttttctcactcttcaagccacaaattattcgcgtagtgctgaacccggtaaaactgacctggcccgaccaggacggcggcagccgcatgttgccgaattaccttgaggatctgcaaaacccgctgtggctggcaaccagggactga

SEQ ID NO: 74933 - DNA, 1335 bp, Citrobacter koseri
atgacaaacactgtagattttattggcgtaggcatcggcccgttcaacctgagcatcgcggcgctgtctcatcaggccgaaggattaagcagccgcttctttgacggccgcccgcattttgcctggcatcccggcatgctggtgccggactgccatatgcagaccatgttcctgaaagatctggttagcgctgtagctcccacaagcccgtacagctttgttaactatctggtgaagcgcaaaaaattctaccgcttcctgaccaccgagctgcgtaccgtgtcccgcgatgagttttccgattacctgcgctgggccgccgaagggatgaacaatctgcatttcaatcataccgttgagagtattgatttcgacgagagacgccagcggtttgtggtgcagaccagccagggcgaaagcgttgcccgcaatatctgccttggcattggcaagcaaccgcacctgccgccttgcgtaaaaacggcgacgcaaacctgcttccacgccagtgaaatgagcctgcgccagccagatctcggcggcaagcgagtcaccgtggttggcggcgggcaaagcggcgccgacctgttcctcaatgcgctgcgcggagaatggggcgacgttgcagagatcagttgggtctcgcgccgcaataactttaacgcgctggatgaggcggcgttcgccaacgaatacttcacgcctgagtacgtttcaggcttcgtcggtctgaatgaaagcgcgcgccagaagatgctcgacgagcagaaaatgacctccgacggcatcacggccgactcgctactgaccatctatcgcgagttgtatcaccgcttcgaggtactgaggcaaccgcgtaacgcccgtctgctgccaagccgctcggtcagcgggctggaaaatcgcggccagagctggcaactgctgctggagcatcatctggataacggctatgacactctggaaagcgacgtggtgattttcgccaccggctaccgtcccgcgctgccgcagatactttcaccgctgatgtcgcgaatcgccatgcgcgatgagtgcaatttcaaagtacgcgacgacttcaccctggagtggaacggcccgaaagagaacaacatcttcgcggtcaacgccagtatgcaaacccacggcattgccgaaccacagctcagcctgatggcctggcgctccgcccgtattcttaatcgcgcgctggggcgtgatttattcgatctcagtatgccgcccgccctgattcaatggcgcagcggcagccgggaaaaaccgcagccggaggctgcttctttaactcgctacacagcatctttgggctga

SEQ ID NO: 74934 - DNA, 2199 bp, Citrobacter koseri
atgataagcaaaaagtatacgctttgggctctcaacccgctgcttctcgccatgatggcgccagcagtcgctcaacaaaccgatgatgaaacgctcgtggtgtctgccaaccgcagcaatcgcaccgtagcggagatggcgcaaaccacctgggttatcgaaaacgccgaactggaacagcagattcagggcggcaaagagctgaaagacgcgctggctcagctgatccctggccttgacgtcagtagccagagccgcaccaactacggtatgaacgtgcgtggccgcccgctggtcgtgctggttgacggcgtgcgtctcaactcttcacgcaccgacagccgacagctggactctatcgatcctttcaatatcgaccatattgaagtgatctccggcgcaacggccctgtacggcggcggcagtaccggtggtctgatcaacatcgtgaccaaaaaaggccagccggaaacccagatggagtttgaggctggcaccaaaagcggctttaacagcagtaaagatcacgatgaacgcattgccagcgccatctccggcggcaatgaccatatctccgggcgtgtttcagtggcgtaccagaagtttggcggctggtttgacggtaacggcgatgccaccctgctcgataacacccagaccggcctacagtattccgatcgcctggacatcatgggcaccggtacgctgaacatcgatgaaacccagcagcttcagctgatcacgcagtactataaaagccagggcgacgacgattacgggctgaatcttgggaaagatttctccgccattagcggggccagcacgccatacgtcagtaaggggctgaattccgaccgtattcccggcaccgagcgtcatctgattagcctacagtactccaacagcgatttctttggtcaggagctggtcggccaggtttactaccgcgatgagtcactgctgttctacccgttcccgaccgtaaatgcgaacaaacaggcgacggctttctcctcgtcacagcaggacaccgaccagtacggcatgaaactgactctgaacagcaaaccgctggacggctggcaaatcacctacgggctggatgccgaccacgagcgctttacctccaaccagatgttcttcgatctggcccaggcaagcgcttccggggggctgaacaaccagaagatttacaccaccgggcgttacccgtcgtatgacatcaccaacctggcggccttcctgcaatcaagctatgacatcaatgatatctttaccctcagcggcggcgtacgctatcagtacactgagaacaagattgatgatttcatcggctacgcgcagcaacagcagattgccgccgggaaggcgacatccgccgacgccattccaggcggctcggtcgattacgacaacttcctgttcaacgccggtctgctgatgcacatcaccgaacgccagcaggcatggctcaacttctcccagggcgtggagctgccggacccgggtaaatactacggtcgcggcacctatggcgcagcggtgaacggtcaccttcctctgaccaacagcgtgaacgtcggcgacagcaagctggaaggcgtgaaggtcgattcttatgagctgggctggcgctttaccggcgacaacctgcgcacccaaatcgcggcctactactcgatttccgataagagcgtggtggcgaataaagatctgaccatcagcgtggtggacgacaaacgccgcatttacggcgtggaaggcgcggtggactacctgattccagataccgactggagtaccggtgcaaacttcaacgtgctgaaaaccgagtcgaaagtgaacggtagctggcagaaatatgacgtgaaggtggcaagcccatcgaaagcgacagcctacattggctgggcgccggacccgtggagcctgcgcgtacagagcaccacttccttcgatgtgagcgatgcagaaggctacagcattgatgggtataccaccgtcgatttgctcggcagctatcagcttccggtgggtaaactcagcttcagcgttgaaaacctcttcgaccgtgactacaccaccgtctgggggcagcgcgcgccgctgtattacagcccaggttacggccccgcgtccctgtatgactacaaaggacgtggccgcacctttggtctgaactactcagttctgttctaa

SEQ ID NO: 74935 - DNA, 714 bp, Citrobacter koseri
atgtcagaaggagtttcgaaaaaatccagatatgaaattattgctatcctgagagaagaattcagggttaagtctaaactggattttagttttaacgatctgagctggcaatcagatttacgaaaagttgacagttcatctttttatatcgatctccctccctcttttcagccttcgttatctgaaaacgacgatgtctgttttcagatccacagtaaacttggcaggattgagtttgccaccgcgcagataaatactgagcacaatagcccggataatattttccgctttgccattcctgagagcataaacatactgcaacgacgatcgtccccccgacttaagacaagagagagttatcaattctgttgttctggtcgttataaaaatggcattaccttcagacatacattaaatgatgtctctgacggcgggtgttctttcatatccacccaatctcaacttaaatttatgcgtaaagataatgtgttagaaaacgttgagatgagctttggtgaatatggcagcgtaatgactaacttaaaaattatcagcgtaacagaactccatagcgaaaaatcgtatgaagaagcagatttccgcatctcttgtatgtttcagcataaaagtgacgattataaacattacatagagaatgttatcgtcaaattaattattgacaataaaattaaaaataagatttttttagtttaa

SEQ ID NO: 74936 - DNA, 585 bp, Citrobacter koseri
ttgagtaatttattattttacactgatgataatctcattgggcaatcaatcctgcattacatggtggacaatgagataaatattaccacgctgggctatcaggagatcgccgggagaacctgtgcccctcagtcgggtacgattattatcaatgtcattcataaggatatctctgcggccaggacggtcgccttgctcaatagattacgaatgtatctcacgcactgcacgctgctcgttctgattgtaaaaagcgacctcgccagcttatgccgtgaacttctcgatcttgaaaatgtattgattctgacggaaaacgcgtcttgctccgatctctcggccatcttcaaacatcctttaacggcccgcgaatatcagcgcttatacacccggcgaaaactcactaccagggagcagcaggtgctggcgctaatgatcgccaaccataacaataaacaaatagcagagcttctcaatattgactataaaacagcccacactcacagagcgagtattatgagaaagttaggcatgaataactcgcaagtgatgaacaaaagaatcgtcaatatgtttcgatgctaa

SEQ ID NO: 74937 - DNA, 705 bp, Citrobacter koseri
atgtttttcaatcataatttgtcacgtagcgatatatccgttcgatatgtcttccaaaaaatgttttcacctctcggggcgcttgtcgccgttgagtgcctgagccgctttgaccatatccctgtttctccagaagagttatttcgttatgccaatgcggacttacgggaaagtatctttatggaacaactggcgttaatagaaaaacataaagcgtggtttataaaaaacaatgtttctgccacgattaacgttgacgaccatatactcagcgtcctgctacggccagaagtgaaagcgaaagtcaaagcactgggctgcgttcactttgaaatcacggaaaactctaacgaactgttgaataactctctcgccgcctggtgtgattcccacagcaccccactctggctcgatgactttggcgctggctacgcgggaattaacgcgattcgcggctatcattttgattatgtcaaaatcgacagaaacttcttctggcatttaatgcaaaaagagtctggtcggccattgatggatgcgctggtcactttcctttcccgtaaccaacataatgtgattattgaaggcgtcgaaagcgaagcgcataagaaatggttgcagggtatggagtggtttgccattcaggggcattactggaaagaagtcagtattgaacaactggtcaaagaagagattacggtttaa

SEQ ID NO: 74938 - DNA, 651 bp, Citrobacter koseri
atgcgtgattcagcacagtataaaaatatcagacgactcactcagttgaccctgataagcggaatgcttgtcgcctcttcagcgtggggatttgaaaccaattacgatagcggacgggtggacttcgcaggacgagtgacggatatctcctgtagcgtggcgctcaacgggggcgacaatgcgggcagcggtagcgtctggctggctccggtaagcctggcggaagtacatgcccgtggcgcgggcgcatttatgaaaccgcaatccttcaccctggaattgtcgaactgtcagttacgtcatgatggtggcgctgcgaataacgatgagatcagcacggtaagtgtgcgctggattgatggattcacggtcaataccgtcggcaacgaaaatgccggttatctggcgaatacacgagcggatggggccagccatatttttctggcgctgtcgaccaacgacaataatacgctggataaaagcaataaaattgttccggctgacccgcagcaaaaccgggtgcctttggtggaaaaagcggtaagcggcggtgtgtttacttattacatcggttacgttacgccagcgccggagaaagcgaccagtggcccgttgaccagttgggcaacctgggagttagtgtataactga

SEQ ID NO: 74939 - DNA, 996 bp, Citrobacter koseri
atgtcgctgagtaaaagactgacgctttttattggattaatggcgctggggacaacgtcggcatgggctttctgctcgcgcctttcacagccgacggtgacattagacatggccatcgggcgagtggttgttccgccggatctgccggtgggctcagtgattgtgtcccgtgactggacaatgtcggcgtcgggtggcgcaagctatagctgttcagccggtactaaccgttttgcggcgaaaattgtcgtgcccggagccaccgacctggggaataaaatttattcgacaaacgtagacggcatcggcttgcgttttagccgcggtggcgcaacggtcaatattgtctacccggatgtctactcctcctatgtcaacaggcagaccaattattcactggaaggctcccgctttacgctggaagtgattaaaactgcgaacgtgaccggcagtggcaccctggcggcggggaaatatacctcttatgactgggaaaacggcagtaacccgatccttgaaacgttcctcagcgccaatgccatcaccgtcgtctcgccctcctgtaccgtgttaagcggtaagaatatgaacgttgatatcggtacgattaagcgcagcgatctgaatggcgttggcaccacggcgggaggcaaagattttaatatccagttgcagtgcagcggcggcgtaagtgaatccggtttcgccaatatccatacgactttttccggcaacctggcgacaagcaccactgccgctcagggcgtgctaatcaacgaaaaaagcggaaacgctgcggcgaaagggattggcgtccaggtactgaaagatggcaccccgctggaatttagcaagaaatataatatcggcaccttgcagacccaggaaacccgttacattacattgccttatcgtgcacgcttctatcaatacgcatcgaccacaagtaccggtgaggtggagtcgcacatgatctttaacctgacgtacgattaa

SEQ ID NO: 74940 - DNA, 2487 bp, Citrobacter koseri
atgaagcagaggtcaatccgcccggaaagattaagtacggcaattgcgattgcactgtactgctttccgccattttcaagcggccaggaaaacccaggaacggtttatcagtttaacgatggctttattgtcggcagtcgcgaaaaggtcgatctgtcgcgcttttccacgagcgctatctccgagggtgtttactcacttgatgtgtataccaatggtgagtggaaaggccgctacgacctgaatatcacccgtggaaaagacggcaaaatgggcgtctgctacaccaaagcgatgctgatgcaatacggtatctcgccagaaaaatttaacccacagcttagcgcgaaagagggctattgcggacgactgcaagagtggcgtaacgaagaaaatgtcagcgacaacctgattcagtcctctctgaggctggatatttccgtaccgcaaatctacgaagatcagcgctttaagaattttgtcagcccggagttctgggataaaggcgttgcagcgctgaatttaggctggatggctaacgcctggaacagccacacgtcatcggccaacgggtcagataacagcagcgcctatcttggcgttaacgcgggtctttcctgggacggctggctgctcaaacacattggtaacctgaactggcaacagcagcaggggaaggcgcactggaacagcaaccagacctacctgcaacgtccgattccgcaaattaactcgattgtcagcggtgggcagatttttaccaacggtgagtttttcgacaccatcggcctgcgaggggtaaatctggcgaccgatgacaatatgttcccggacggtatgcgttcctatgccccggaaattcgcggcgtggcgcaaagtaacgcgctggtgacggtacgtcagggcaacaatattatctatcagaccaccgtgccgccgggaccgtttacgttacaggatgtttacccctccggctatggcagcgaccttgaggtttcagtaaaagaagccgatggctcggtacaggtgttcagcgtgccttatgcctcggtagcgcaattactgcgtccggggatgacccgctatgcgctctctgccggtaaggttgatgatagttcgctgcgtaataaaccgatgctctaccaggcgacctggcaacagggcttaaataacctgttcaccggctatgctggcgtgaccggttttgatgactatcaggcattcctgctggggaccgggatgaacaccggcgtcggcgccttgtcattcgatgtcacccattcgcggttgaagagcgatactcttgacgagcatggtcagagctaccgcgccacctttaaccgtatgttcaccgaaacgcagaccagtattgtcctggcggcgtatcggtactccaccaaaggctactacaacctgaacgacgcgctgtacgccgtcgatcaggaaaagaaccacaacagcaactacaccgtgtggcgacagaaaaacagcatgacctttaccgtaaaccagaacctgccggacggctggggcggtttctacttaagcggtcgggtgtcggattactggaaccgttcaggcacggagaagcagtatcagctcagctataacaatatgttcggtcgtctctcatggtcggtcagcgcccagcgcgtctatacgccggacagctccggtcatcgtcgcgacgatcgcgtttcgctcaactttagctacccgctgtggttcggcgagaatcgcactgcgaatctgacgtcaaatacctcgttcaacaactcgcacttcgccagttcgcagattggcgtcaacggctcgctggacagtgaaaacaacctcaactacggcgtatcgaccaccaccgcgaccggaggccagcacgatgtggcgctgaacggcagctatcgtaccccgtggactacgctgaacggcagttatagccagggcgaagggtatcgtcagagtggtctgggcgccagcgggacgctgattgcccatcagcacggcgtggtgttctcgccggaaagcggcaccacgatggcgctgatcgaagcgaaagatgccgcaggcgccatgttgccaggttcgccgggaacccgcattgacagcaacggctacgccattctgccgtatctgcggccttaccggattaacgccgttgaaattgacccgaaaggcagtaatgacgatatcgctttcgatcgtaccgtggcgcaggttgtgccgtgggaggggagcgtagtcaaagttgccttcaataccacggtgcaaaacaatatcacggtgcaggcgcgccaggcgaatggtctgccgttaccgttcgccgccacgatctttgacccgaacggaaaagagatcggtgttgtggggcagggcagcatgatgtttatcagcgacgccagcgcgtcaaaagccacggttaagtggaatggcgggcaatgtacggtggatctgagtcaggcaaaaacaaaggaaacgctatgtcgctga

SEQ ID NO: 74941 - DNA, 702 bp, Citrobacter koseri
atgaagcttattgccctttttttctgtttcatttttagttttgcggctaatgctaataacattattgttaatggcacccgctttatttatccaggaaatgaaaaagaaataacggtgcagctctctaataccgcagatcgtccggcactggcacaagcctggctggataacggtaatgccgatgcgacgccggatacgattactacgccatttattattacaccacctatttcccgcgttgacgctaaaagcggtcagactttgcgtattaagcttggcagcaatgcagggctcgctaaagataaagagacattatggtggctgaaccttctggaaattccgccggtagaggctaaccagaaaaatgaagggcagaatattctgcaactggcgattcgttctcgctttaagtttatctatcgtccgaatggattaggcaaccgtgatgcggcggcggaaaagttggtgctttccgccaacggcagcagcctgtccgtcaacaatcccacgcctttttatatcaccgtaagccgtatctctcgtgacggcggcaaagcgctgaacagcaaaacggtgatgtttgccccacagtccagtcagaccatcgcactttcctcgacagtgaacaaaggcgagaccctgactgttaacaacattaatgactatggcgcagatgtcgcagtgaaagttgccgttaaataa

SEQ ID NO: 74942 - DNA, 609 bp, Citrobacter koseri
atgaaaaaggttcttctctctgctgcaatcgcgactgcattttttggcatggctgcggcaaatgctgctgatactaatgtcggcggcggtcaggttaatttcttcggtaaagttaccgatgtatcttgtactgtttccgtaaacggccagggcagcgatgctaatgtttatctgtctccggtaacgttaacggaagttaaagctgcggctgcggatacctatctgaaaccaaaatctttcaccatcgatgtttctaactgccaggcggctgatggtacgaaacaagatgacgtgagcaaactgggtgtgaactggaccggcggcaacctgctggcgggcgcttccggcaaacaacagggctacctggccaatacggaagcggctggtgcgaaggatatccaactggttctgtctaccgataacgacaccgcgctggccaagaaaatcatcccgggagacaccgctcagccgaaagcgactggcgacgcaactgccgttcaggatggcgcgcgtttcacttactatgttggttatgccaccagcacgcctgacagcgtgacaaccggtgtggtcaatagctatgcgacttacgaaattacctaccagtaa

SEQ ID NO: 74943 - DNA, 798 bp, Citrobacter koseri
atgattaagtggccctggaaagtacacgaaacagaccagaatacggccttgccgtgggatgacgccctggcaattccccttctggtcaacctgactgcgcaagagcaagccagattaattgcgctggccgagcgttttttacagcaaaaaaggttggtcgctcttcagggatttgaactggatgcgttgaaaagcgcgcgtattgcgctgcttttttgtctcccggtgctggagctgggcatcgaatggctcgatggcttccatgaagtgctaatctaccctgtgccttttgttgtggatgatgaatgggaagatgatattggtctggtgcataaccagcgcgttgtccagtccgggcaaagctggcagcaaggcccaataattctgaactggcttgatatccaggactccttcgatgcgtccggcttcaatctgattatccatgaagtggcgcataaacttgatatgcgcaatggcgaccgggccagcggcatcccgttgattcctctgcgcgaagtggccagttgggagcacgatctccacgcggccatgaacaatattcaggatgaaattgatcttgtgggcgaaaccgcatccagcattgatgcttacgcagcaaccgaccctgctgaatgctttgcggttctgtcagaatacttcttcagcgccccggaactgttcgccccgcgtttcccggcattgtggcaacgtttttgtcagttttatcgccaggaccccttactgcgactgcgtgataatccagaagaggacaatataccgacatcacacgtccattaa

SEQ ID NO: 74944 - DNA, 951 bp, Citrobacter koseri
gtgaatttccagcaacttaaaatcatccgcgaggcggcccgtcaggattacaacctgactgaagtcgccaatatgctttatacctctcagtcgggagtgagtcggcatatccgcgagcttgaagatgagctcggtattgaaatttttatccggcgcggcaagcgcctgctcgggatgacagaaccgggtaaggcgctgctggtcattgccgagcgcatcctgaatgaggccagcaatgttcgcagactggccgacctgttcaccaatgatacatctggcgtactgaccattgccacgacgcacacccaggcgcgatatagtttaccggaagtgatcaaagcctttcgcgagattttcccggaagtccgactggagcttattcagggcacaccgcaggagatagaggggctgttgcaaaacggtggcgcggatatcggcattgccagtgagcgtctgagtaatgatccgttgctggtggcctttccctggtttcgctggcaccacagtttattagtacctcgcgatcatcccctggtgcagacctcgccattgacgctggaagcgatcgcacactggccgctaatcacttatcgtcagggcattacagggcgctcccgtattgatgaagccttctcccgcaaagggttgttgccggatattgttctgagcgctcaggactctgatgtgatcaaaacgtacgttgctctggggctggggattggattggtcgccgagcaatccagcggcgagcaggaagagggggcgctgacgcgtcttgatacccgacatttatttgatgccaataccgtctggctggggctgaaacgcggacagttacagcgcaactacgtctggcggtttattgagttgtgtaatgcggggctgtctgtcgaagatattaagcggcaggtgatggagtcggatgaggcggtcattgattatcagatataa

SEQ ID NO: 74945 - DNA, 918 bp, Citrobacter koseri
atgaacttcagacgactgaaatactttgtgaaaatcgtcgacatcggtagcctgacgcaggccgcggaagtattacacattgcgcaacccgcactcagccagcaggtcgctacgctggaaggggaactggatcagcaattattgattcggacaaagcgcggcgtgacgccgactgaagcaggaaaaatcctgtatacccatgcgcgaacgattttgcgtcagtgtgaacaggcacagctggcggttaataatgtcgggcaaacgctgagggggcaggtgtcgatcggtctggcgccgggaacggccgcttcgtcggtgacgatgccgctgctacaggccgtgcgggcggaattgccagaggtgttggtctacctgcatgaaaacagcgaggtggtgctgaatgataaattactcagcggccaacttgatatggcggttctttacgagcgttctccggtggccggtattactagccagccgctgctgaaagaagatctttttctggtgggaacccgggattgccctgggccgagcgtggatttaacggcggttgcggagatgaatcttttccttcctcgcgactatagcgccgttcgttcgcgcgtggatgaggccttttccttacgccgattgaccgcaaaagtgattggtgaaatcgaatccatcgcgacattaacagcggctatcgccagtgggatgggggtgacggtgttaccggagtcggcagcccgatcgttaagcggtgcggcaaatggctggatggcgcgtatcaccacgccgtcgatgagtttaccgctgtcgctgaatatgtcggcgagggggagtctgacgccgcaggcacaggcagtgaaagagatcctgatgtcgctggtgagccgccctatgctggaaaaccgtgagcttctgctggtgagctaa

SEQ ID NO: 74946 - DNA, 1011 bp, Citrobacter koseri
atgagtttcacttcgtaccgttactattgggcgatgtggagcgcggtggtggtactggcaggattaatgttactcagtattgccaaaggcgctgtttcgttatcgctgttgcaggtgctgggagcgatggggattgcagatgtgccggtatcggatatggtcagcagaattgtgattgacttacgcgtgccgaggacgctcctctctgtacttacaggggcagggctggcgatagtgggcgcgttgttgcagaccaccacacgtaatgatcttgccgatccatttttatttgggctgtcatcgggcgcatcggcgggcgcggtgctggtcattacccgattcggcaatcagcttggcacgctgacgctccccgtatcggcatttgttggtgggatctgctccgctatggcggtgatgttactgttccacttcaaaaagcaacgcggggctgagcagttaattatcagtgggcttgctatctcctttctgtttggcgcgttaaccagctatttcattttttctggcgatcaacgtgccgccagttccgtgctgttctggtcactgggcggcctgggattagccagttggggcaatctgcctttcgccttactgagcctgatattactgagcgcttttattctgctgcgatggcgtgcgctggatggcatgctggccggtgagcagacggcgttatcgctggggattaacgtcagccgcctgcggatggaaattttcctgtgctgcgcgctggcgacctctttcttagtggcactgacgggagtgatcggctttgttgggctgatggtgccacatctgtgtcggtacttttctggcgttaagcatctgcttttactgcctctttgtggtgtctggggggctgtgctgttgtgcggcggcgatattgtcagccgaacgttgctgacctcgcaggaactgcctgtcggcattattacggcgggtattggcggtttgtttattattgtgttgctcgccagaacgtcgtcaatatga

SEQ ID NO: 74947 - DNA, 957 bp, Citrobacter koseri
atgaaaaaattgcttgcaggcatggttgctattttgtcggtatcggcagtagaggctgcggattttcctgtcaccatagaaagttgtggaacccccgtgacgttcacggaaccgccaaagcgagcgattattaatgaccttaatatgtctgaaatggcgttcgctctgaatttacaggatcgtatcgtcggtctgaccggtatcagcgggtggtacaaaatgacgccggaatttaaaaaagcaatggggtcgatccctgaactggcaccgaaatatccctctctggaaacattgctggcggttaatccagatttctttttcgcaggctggaattatggcatgaaagtagggggtgaagtgacgccttcttcacttaataaatatggcatcaagacttttgttctgagcgaaagttgcgtctttactgccgcgcataagcgtaaagccagtatggatctactttataatgacgtactgacgctggggaagatttttggtaagcaagatgacgctcgggcgctggttaatcactggaaaaagacgctggaggcgctgcccaaaccgccgaaaggaacccgaccattaagcgtgtttgtttatgattcgggagaggataaaccttttaccagcgggaaatacgcgatgcctgacgccattatcgaagcggctggtggtaaaaatgcgatggaggcgctggatatcagttggggcacaacttcctgggaaagtgtggctgccactgagccggactttatcattctgctggattatcaaacgggaagtggggctgatgagcttcgtcacttcctggaaaatcacccgttgatgaaactcacgccagcggtgaaacaccaacgttatctgaagctgcaatatgctgaactgacgccaggccccgcgaatgtcaaagcagtagaaaaactggctcgggccatgtatcagacggctgcacaatga

SEQ ID NO: 74948 - DNA, 804 bp, Citrobacter koseri
gtgcaattcgtcgcatccagtgataacccggcgagtgctctaagcgtcaatattgcgtcgctacagcgacccggaggcggagaactgctttgtgcaattcgctttgaggttgaggaagggaaatgcctggccgttattgggcctaacggcagcggtaaaacgtctttactgagggcaataagccaggaactcccccttcagaagggcgatattcagctactgggccagtctgtttcggcgctgtcgcggcagcagcgggcaaagcagatcgccgttctggcgcaaaatgatacgcccgatctgaggctggctcttgaggattatgtggcgctggggcgtatcccgcacgcccgggatgcaccacgcgacaggcatgatgccatcgtgacgaaggccattaaagagacgggattactggcgttgcgaaagcggtcgctgtccgcgctttctggcggagaaaggcagcgggcggcgctggcgcgggtgttagctcagatgccgagcctggtgctgcttgatgagccaaccaaccatctggatccctccggtcgggtggaactgctttcgttggtgaaaaacaaggggataacggtggtggcggtattgcacgatctgtcgctgattgaatcttttgctgaccgcgttcttcttctgtcgcagggaagaatggtgctctgcgacacaccggagcgtgtgctggtgtctgaaaacctttatcccgtttttgggttgacctgctttaccgtaccacaccctgatacggggaaagcgctgcgtatttttgaagttcctggctatgcataa

SEQ ID NO: 74949 - DNA, 1317 bp, Citrobacter koseri
atggattccaccctcacctccacgcgtccccaggatgagacgccttcgcttaatcgcgcgcgccgcgccgcattaggaagcttcgctggcgcagtcgtcgactggtacgattttctgctctatggcatcaccgctgccctggtgtttaatcgtgaattcttcccgcaaatcagcccggcgatgggcacactcgcggcgtttgccaccttcggcgttggctttctgtttcgcccgctggggggtgtgatcttcggccacttcggcgatcgtctgggccgcaagcgtatgctgatgctgaccgtatggatgatgggtatcgctaccgcactgattggcatcctcccttctttcgccactataggctggtgggcgccggtactactggtgatattacgggctgttcagggttttgccgtcggtggcgaatggggtggcgcggcattgctgtcggttgaaagcgcgccggagaacaaaaaagcgttttacagcagcggcgttcaggtgggttatggcgtagggctgctgctctcgaccggtctggtctcgctgatcagcacgctgacgaccgatgaacagtttctgagttggggttggcgcatcccattcttgttcagcattattctggtgcttggcgccttatgggtgcgcaatggcatggaagagtccgccgaatttgaacagcaaaaacaggaaacaccaccggcgaaaaaacgcttgccggttatggaggcgttgagccgccaccctggcgcatttctgaaaatcatcggcctgcgcctgtgcgagctgctgacgatgtatatcgtcaccgcgttcgccctgaactactccacccaaaatctgggccttccgcgtgagctttttctgaatatcggtctgctggtggggggactaagctgcctgacgattccctgctttgcctggcttgcggaccgcttcggtcgtcggcgtgtctatattacaggtgccttaatcggtacgctcagcgcattcccgttttttatggcgcttgaagcccagtcaatcttctggattgtgttcttctccatcatgctggccaatattgctcatgatatggtggtctgcgtacagcagccgatgtttaccggcatgttcggtgcaggttatcgctacagcggtgccggagtcggttatcaggtcgccagcgtcgtgggcggcgggttcactccctttatcgccgccgcactggtcaccttctccgatgggaactggcacagcgttgccatttacctgctggcaggctgcctgatctctgccgttacggcgctgttgatgaaaaataaaccacacgtctaa

SEQ ID NO: 74950 - DNA, 1455 bp, Citrobacter koseri
atgaataataagggcgccggcctgaccccgtctcaggcgctggataaactggacgaactctacgagcaatcggttcaggctctgcgtagtgcaattggcaagtatgttgaaaacggggagcttccagatattacagcccgaaataatggcctttttgtttacccatcgctttccgtctcctggagcggcaatgcgacgaatccccccaagacccgcgcctatggccgctttacccatgctggctgctacaccacaaccatcacccgtcctgcgctgtttcgcccttaccttgaagagcaattaacgctgctgtatcaggattatgacgcgcatattgcggttgaaccgtcccatcatgaaattccgtatccttatgtcattgacggttccgagctgtcgcttgaccgctccatgagcgccggattgacgcgctttttccccaccactgaactggcgcagattggcgacgagaccgcagacggtttgttccaccccggtgagttttatccgctctctcacttcgacgcgcgccgtgtcgatttctcgctggcgcgactgcgtcactacacggggacgccggttgaacattttcagccctttgttctgtttaccaactacacccgctatgtagacgaatttgtgcgctggggatgcagccagattctggacccggacagtccctatatcgcactttcctgtgctggcgggatctggatcaccgcagaaaccgaggctcccgaagaagccatctccgacctggcgtggaaaaaacaccagatgccagcctggcacctgattacggctgacggccagggaattacgctggtgaatattggcgtcgggccgtcaaacgccaaaactatttgcgatcacctggcggtactgcgcccggacgtctggctgatgattggtcactgcggcggcctgcgtgaaagtcaggcgattggcgactatgtgctggcgcacgcctacttacgtgacgatcatgtgctcgatgccgtactgccgcccgatattcccatccccagcatcgcagaagttcagcgcgcactgtatgacgccacgaaaatggtgagcggtatgcctggcgaagaggttaagcagcggctgcgtaccggcacggtcgtcaccaccgatgatcgtaactgggagttgcgctactctgcctccgcattgcgtttcaacctgagccgcgccgtcgccattgatatggaaagcgccacaattgccgcccagggctatcgcttccgcgtaccttacggcacgctattgtgcgtctccgacaaaccgttgcacggtgagattaaacttcccggccaggctaaccgtttttatgaaggtgcaatttcggagcacctgcaaatcggcatccgcgccattgacctgttacgcgcagaaggcgatcgcctgcactcacgtaaactgcgcacattcaacgaaccgccgttccgttaa

SEQ ID NO: 74951 - DNA, 1779 bp, Citrobacter koseri
atgagcaacctaactcccctttccgccctgcgtaatctcctgattgcgcaggggctggatggcatgatcgttcctcgcgccgatgctcatcaaagcgaggactgtacgccacacgataataaactggcctggttaacgggctttagcggttctgccggactggcgttagtgcttcgcgaccgcgcattgctgtttgtggatggccgctaccaggttcaggcccgcgccgaagtcgatcgcaatgattttgaaattcatcacctgcataacgagccgcttgcggagtatttgcaggaacaggttgcctccggcgcacgtattgccttcgaacctctgctgatggtcaacagccagtttgagacactctcagccacccactgcgaactggtggcgttagacagcgatccgttcgacgttgtatggcaaaaccgccccgccgccccctgcggcatcatccgggaaatgcccgttgaaatcagcggtgaaagcagcgcaaagaaacgcgcgcgcattctcgatgaactggcaaaacagcaggcggattacctgccgatcaccctgccggataatatcgcctggatgctgaacgtgcgcggcagcgacctcaacatggtgcctgttcctttctcgtttgcgttattgcaccgcacgggcgaactggaatggttcgttgatgaaaagaaaactcagctgttacctgaaagtttgctcagcacgctgaccatttccccgccgggtgagttccttgcacgctgtcagcaacgcgcggccggaaagcgtttcctggttgataaagatttcgccccggtcgccctgcgcttcgctattgagcagcatggcggtgacgtcatctggtcagcagatccgattacgctgatgaaagcgcacaagaacgaaaccgagctggcaggataccgcgaatgccatgagcaggacggcgccgcctgggttaatttcctcgcctggctggcgcacgaagtgccgctgcgtgaagccgcaggcaatccgataacggagctggaagcccaggaaaaacagcgggcttatcgccagcaacaaccgggatttcttgagcagagctttaacaccatttctgcatcggcaggcaatgccgccatgtgccactatcattcaagcgagaaaacaaacgcgccagtcacaacccaggagatgtacctgaacgattcgggcggtcaatatcagaacggtacgacagacacgacccgtaccctcgcatttgggccgcaggagccgcagcgtcggttacactacaccgctgtgttgaagggctttttgtcgctgattaccctgcaattccccggcggaactcagggacaccagcttgacgcctttacccgccgggcgctttgggatcttggtctggattacgatcacggagcgggacacggcgtaggtcatcagctattgattcatgagcagccacaccgtatcgccaaaaaagtgaacccctggccgctggtggcgggcaacatcattacgatagagccgggctattacctcgccggacaatacggtatccgcattgaaaatcaggtcgaaattgtcgaaagccgccctggtttctgcaaattctccacactgacgctggtgccgatcgacttaagtctcgtggaattgcatctgcttagcgaggcagaaaaactgtggattgatgagtaccatcagcaggtaagagaaacattatcccctcgcgtagaaagcaacgcccgcccgtggctgttcgccgctaccgctcccatacgggtgcgcgcaaattaa

SEQ ID NO: 74952 - DNA, 990 bp, Citrobacter koseri
atgaataataatctttatcgtttgattgttgactttcaagataatgtccaggttgctttaaagctaatgcatcggtctggaattaaaatgccatcaagttgctatgggtggattgaatctgatatacccaatgttggtgagttagatggtggtgtcaaatattataaacatggggctggatgcagggtagatctaaactccgggagcgtagattttgattttggggggcgaggtgaggtaggagggtttaattcttggtggttgaccaactttgtaggggaaaatctaatagattacggattcagaaattttgatgatgtctctgatcatttaaaaaaggccctagatgatggagagctgatttttccagatcatgatctttattattttgctaatgtcccacatacttacgctatagatacagattgccgcccccctgaggacatgctcccatgtcgcaatcacgaccgcgtattaacactacaaattcattatttcgaaacggctgatcttatgtttaaaaattacaataagctcaacaaaaaaatgacaagaaatggccatttgagtgagagagaagaatttgacatgggaatttatctttctacatggttaggttttttaggtgtggtctgcgaaggatttaaaagcttaaacatgcgactcttactcgataatgaacgccctagagaatttaaagaattattgccaatttcagatggcatcggaaagttgatgaaagaacattcgagctcactcaggatatttagaaataatgtttttcatcttagagaaagtactggctttatacatcatttttttgataaagaagttgagcgtcttccatgggcacgtgaattacatatagcactttcagattttttttcgcagtatagagttttttgcgaagtgcattatgttgttaatgggcgtaaaggagagagcaatatgataaagaaaaaggtaacacgccctaacaagttactttga

SEQ ID NO: 74953 - DNA, 1023 bp, Citrobacter koseri
gtgaattcttttttccaggaaaacgataatgtccgccgagaagctctcttggcggcccagcaagcccaccctcagcaattacctgcatacattattgaaaaagacttttacgttacatgcatactccacgttctttatgtagatattgctcctgcatttgcgaaaagaagcgcaatcccttttgtgtttaaaggcggcacttccttgtcgaaatgttgcaatttgataaaccgaatgtccgaagacatcgatctatcattttccatggacttattgacatctagcgaagtttctcgagaacccattagaagccgtaagcaaatggagagagaagccgatgaaatcgatgtgaaggcaagaaattttgttttagaggaacttatggaccctttaacaaaatcactccaaacgtttgataagcggatagagatcaagatagagaatgatgagcctctacatattggaattcactatccatctgttatcgagcaaggaaatgcggtacttcggagagttttacttgaaactggaagcctttcgcagaacaaccctgtaggaaatattgacatttcacacatgctaggtgagtgcatcccgaattttgaagaaccaaaattttcagtagtttatctcatgccagaacgaaccatggttgagaaaatgtttggtgtccattgtaacttatcaaatggcaatccgaaaccaaaatatgctcgacatttatacgatattttaaaactccatgaaagagacagcacttggtgtgagaacaaacaattgttgcttgaccatgttgaattttgcgatattcactatcgtacaaatttagattactgcactacggcgcgaaatgggccattgcgactctgccctacggacagtgatatgcttaatcactatcaaaaagattgggaagagatggctgatatgttcccaaatagcaatttgccttattcttttgaagagttacttagcggcataaaaaaaatcgaaacgcatattaatgctttctactatgcctga

SEQ ID NO: 74954 - DNA, 687 bp, Citrobacter koseri
atgactatcaaagctgtcgcattcaaggtaccaagagcccctaaagtttcggaattggtgtcaggatatgtaaaccacattcaccttggtaagccattcactttagagcaacttgcctctaaatacgacctatccaatactgatcggcaagccgcaagtaaggctcttcagcgtttggttgcggacaagaaagtcacacgtcttgctaaggggacttactatcgtccaaagatctcaaggtttggacctttacctttggagactttagaaattgttaaggtagtaaccaagaccaaaaaggctactatcgttcctgctggtgcggcagcagttaaccagctaggcttggatacccaattaccaatggtattaagttattatgtatcagtgagaacgcgtactcaattggcacataactctttgaaatttcaatacaaagaaactctacaatattttgtacacaatctgaaaattgggaacaaagagacaaaaaatacagcgctattaatctggagtgcacttacgtatctagagagttcagctcaaccattgtatctaaagaaattgctaaaaaaatttcgacaggaatttgaaccagaatcacaagcgaaatttatttcagcactaccgccatctatgcgttgggcaaaagaactctttgaatctaggactatggacaaggaataa

SEQ ID NO: 74955 - DNA, 759 bp, Citrobacter koseri
atgtcttcggatattattcaatacctgaaaactaaatggaaaatcgttaccccatcattagcccttatcgttaccgttggtgcagggcttatcactctcaaggacgcaaaggaagtgatctggtcttggttctcatctgaagagaatatgtcggttattcaggcacggttacaacccttccgcattaagccagatatcaaagaagggcaagacgaggtgttcctgatgatggagatcaggaattacgatacatcacctctgatgattgtctctgctgatgttgacggtagcggtaataagcttgttaccaagggcaaagcaggctggcagtctcgttgtaccttcagctctgatgcgaaccgaaacgaacctctgactgttagaccaggccaaaccgtatggataatggtagggaatgccgtactcctgaagggactgaatgacctgatgaatggtcttgatttgaaaagcctacataacttcgaacctgatgccggtgttggaatctacgaggtcggttttgtcgatatcctgaatgaagccttggagaagaaatacgggaagaatgcggagattgtggctagcctttatacagggccggataagaacaagcacaccttctctttccccctgaatcaaggcaaagatttcttttccaaggatgggagtctccaacacgattggctcttggcgaaatggatcaaaccggactacaaaacctatctccagttaagcaaggactgcgaatcaaagttgtga

SEQ ID NO: 74956 - DNA, 936 bp, Citrobacter koseri
atgggaaaactcggggaccatctgatcgcccatgtcgcagacaatctttcccctaatgacctgaaactctgggatgagatccaccccacgatcggaactgatggtttagaagcagcattgctcaaacgagccccgacaccagcccttgaagcaatcattgtcaaatctaccggggaatacatagccgcagccgaagcagctattatctctgaggtgtttaaaaacgagaaaacacttcggcttacaatgttacttcctcatttattaaaaccagataaaggcatacccattgttacaactaactatgaccgcttagttgagcttgcctgtgaagaagctggattaggagttgatactatgttcagcgggcattttgctgctcggctagtgcctcttgatagccattggggattttgccgcggagccaaacttgttggtaagcatgtgcgatacaagttcacaccaaaagtgaacgttttcaaaccgcatggcagcttggattggtatcaccgtaaagggaacccggtgcgatatacaggggatcttcctcttcctcgtctaattattacacctggcttgaataaattcaggagcggctacgacagtccctttgacaaacacagggaaaaagctaatgacgcaatcgataaagcccgtcgtttctttatcatcggttatggttttaatgatgatcatttggaaacacatctcacgcctcgtattcggtctggagtcagaactatcattttgacccatacactttctgcaaaagctaaagaaatagctaagttaaataagaatgtaattgcagcggagtttcatagcgatgcaggaactaccggtgcgcgcttcattgtcgatggtaatgagatatttttccctagtgttgattactgggatcttaaaggattcgtagaaggagtcttatccgcatga

SEQ ID NO: 74957 - DNA, 1749 bp, Citrobacter koseri
atgaccagtcctgctctaaaatttacagaaaacgaacaaataggccgtgtggctggagtagataccagccgtgtggctattgatgtcaccaactcagaaatgctgacacgtgttggaattggacagcttatagcaataaaaggagcaacacaggccgaattcctgattggaatgacagatcgcgttactcgctcactacgagaagaactacctgacccagaagaggatgagtcagggatgttaactgtatcaccgtcagaccatatgcaggctttcgtcattggcacttatagaactgttgatggagataaaacagacattttcaaacgaggtgccgatagttttcctcagatcgatcgcgaatgctttgtgatagaaggtgttaatcttcagcgttttatgggcatactcggtgccggtttacccaacgaagaacgccttaaactaggtactttcgtggcggatcggagtgctgaggctattgctagtggggatagatttttccagaggcatgcggccatcctaggaagtactggttcaggtaagagttgggctgtagccctaatactagagcgagcagctaagcttaaatatccgaatatcgttgtgttcgatatgcatggtgagtacgccacacttgctgacaaaaccaaaggaggttacgcacaacgattccgtatcgccggaccaggagaccttactgcacctaaagatgatgcactatttctgccgtattggttactgaatcgagatgaaatgttgtcgatgattcttgaccgtagcgatcagaatgcaccaaaccaggcctctcgtttcactcttcatgttcgggatctcaaaggcgcaactctggactcatctggtaagccgaaagtcaaagagacattcactgtagactcaccaataccttacgctatttctgatttagttgctcttttaaccaaggataatataacgaagggtgtcgggaaaaacggagctgctgtaaagggggactgggaagacaagctgacacgctttctttctaggctggaagcaaaacttgatgatcgccgatatggttttatgttttccccacctcctgaagctctcaattatggatggcttgccaaacagattataaaactacttcgagctgattctggtaacggtattaaaattatcgatttctctgaagttcctgctgatgtcctgccagtagtgacaggaacgttagcccgcctactctatgatattcagttctggatgaacgcaaattctcgtacaccaatcactttactttgcgatgaagcacatctttatcttcctgtaaaagatgacgccgattcagttcaaagacaggcgctatggtcctttgaacgaattgcaaaagaggggcgtaaatatggtttctcattattagttgtaagtcagaggccatcagatgtaagccgaacaatcctttcccaatgtaacaacttccttgctctcaggctaacaaatgacagcgatcaaaatgttatcaagagacttatgcctgattccctcgcaggtctaacagctatgcttccacttttagatacaggtgaggctttgttgcttggggatgcggttcttctaccaacacgcattaaacttgaccaaccgcaggtaaaacccgacagcgccacccgtgacttctggaaagaatggggttctcttaaccctgatctaggcttattagaggcggcagttgaatgtttaagaagccagtcaagaattaataaataa

SEQ ID NO: 74958 - DNA, 780 bp, Citrobacter koseri
atgtcgttagatcttgattttcaggacaaacgcatactggttactgccggcaccaaaggcgtcggcaaagcggtcgttggattattaaagcaactgggagccagggtgttaaccaccgcgcgtcatacgcccacagaatgtatcgccgacgccttcgtggcggcggacctgaccacggtcaacgggtgtgcttcagtagctgaagccgttcagatgcatctgggaggtgtcgacgtcatcatccatgttgcgggcggttctacctcacctggtggtggctttgcagcactgggcgaaacggagtggcagcaggaactcaaccttaatctgctgccagcggtacgcttagatcgtgcgctgttgccagggatgctggcacagggcagcggggttatcattcacgtcacctctatccagcgtgaactgccgttaccggaatcgaccaccggttatgcggcggcaaaagctgcgctgtcggcgtacagcaagagcctgtcgaaagaggtatccccgaagggggtccgtgtggttcgtgttgcgcccggctggatcgaaaccgaagcttcggtagctatggcagagcgactggcgaagcaggcgggaacggattacgaaggcggtaagcaaatcatcatgaatgcactcgggggtattcctcttggtcgtccgtcaaagcccattgaggtggcgaagctcattgctttccttgcgtcgtctcatgctgccgccatcaccggcaccgaatatgtgatagatggcggcaccatcccgacggtgtaa

SEQ ID NO: 74959 - DNA, 327 bp, Citrobacter koseri
atgtcattagccctaccgcacgctatttctgactattttgcgatcagcaacggagcagatattgccaacgttaagcactgttttaccgccgatgctgtcgtgacagacgaaggtaaaacgcataagggacacgcagcgatcgaggcatggcaacgtgccgcacaggccgcgtttgactacagcgttgagccggttcagttcctcaccgaaggccaccgggtgacggtcacctcaaacgtcgtcggtaattttcccggcagcccggtcgtgcttaaacatgctttcggcctggtcggcgacaagatcaacacactggagattatctga

SEQ ID NO: 74960 - DNA, 327 bp, Citrobacter koseri
atgagtaagttatacactccagaatctgccgcaagcggcgtggagcatgtgctgcgactgctggaaggtcgctggaaattaattattctttttcatctgttcgatggaaaggtacagcgctattctgattttgaaaaactgatcccgggtatttcacagaagatgctggctcagcaactgcgacaactggaagccgacggcatagtatcacgcacgatgtaccctcaggtgccgccgaaagtggaatatcgcctgaccgagtgggggcaagaactgtgcccggcccttgatgcaatgctgaaatgggcggaaaaacgcgaagattag

SEQ ID NO: 74961 - DNA, 1734 bp, Citrobacter koseri
gtgctactggctatcaggtacgtctttgcgtcatgcccacttcgtattaccgcacttatcgtcgttgtgttgcttcaggggctgataccggccctcaacatctttatgaccggccaaataatcaacacactgcatgcagtgcaaaccaccgacggcgatctgatgctgagcgttgcggtctggtgtgtttcactccttggcatgcagcttatgcagcccctggtcaatcttgttcagggggatgtcacggagatttcgactaatcacttcagcactaagattatgtgccgtatgaacgactctttttccctgagcctgtttgataataaggagcgttacgagcaactggaatatttgaaaaaagaagcggcgtatcgaccgcttaatttcatcatctgtatcatttacgttatccgggcaatcgtcatggctggcagtctgctgctggttctgatcaactattcaggagcaggggcggccatttgcgcgctttccgccataccgatgattgccatcaatatgcgtatccagcagagatacgtgcgggatttattcttcacgtctaaagatgcgattgcgatgcgctacgtatatggcgtcagtatggacaagagttttttgcaggagatccggctttacggtcttggtaaatatctgctgactaaattcaatgcgtccgctcgcaatacctataatcgcatgcacaaacagcgcatccgcgcgctaatcacgcctgtgccggccatgatgctgagcctgactatgctgttcgtcggggtaactttttttttaaacaacttacgcaccagtgatattgccgtgagcgcgttggtgatggtgtttcagtccattgtgatgatgaaatcgcacctcgacgagatagccaattatggttcgaatctcgtcagcatgagcagttttttcacccgctaccatgcgtttatgacggataagattgaaccggtgaaaaacgggcaccttaccttacccgccgaaacacctttttccctcagcattcacaaactccggtttcagtatgaggggcgtaatcatccagccctgaatggggttaaccttgaaattgcccccggtgaaaaggtcgctattctcggtgagaacggcagcggaaaaacaactctgataaaaatgatcctgcgcatgtacgccttcagtgagggggcggtgtctgtgtcaggcgtgccgctcgacaggttggatattgaaagttaccggaaccagatagccaccgtgtttcaggattacggaaaatacgagttcacggtgggcgaaaacattgccctgaataattatgatgcagaaaccccgtcgtcagcggttgatgaattactgaaaaaagtaggatttccgtatgaccagcacacccggctgggcaagcagttcggcggcgatgaactctccatagggcagtggcagcggctcgcgattgcacgggcgctataccgaaaggccaatctgtttatttttgatgagttctcttcatcactcgatcctgaaactgagcaccggctgtttaatgatattctggccctgaacacaaccgtgatcgcagtgacgcacaggctcggtaatataaaagagttcgacaggattatcgtgatgtctgctggagaggtcatcgaaaatggggacttcactgcgttgataagccgtcggggaaaattttacgacatgtggcatgcgcagtttaaatcggtgatgactcaggcagtttaa

SEQ ID NO: 74962 - DNA, 474 bp, Citrobacter koseri
atgaacggaacaatcacaacgtggtttaaagataaaggttttggatttatcaaagatgaaaacggtgataatcgctattttcatgtgattaaggttgccaaccctgagctgattaagaaagacgcggcggtgacttttgaacccaccaccaataacaaaggcttgtccgcttatgctgtgaaagtcatcccggaaagcaaatacatctatatcgcgggcgagcgcctgaagctcacgtcgatcaagtcttatctggtttacagcgaagaagtaccagccgatactcgaattgataaagaaaacgcggtgctctctgtgggcgtgctgatgagtagtatcagacccaaatcagccgcaaagcccggtgaaatgcgctcgctgagaaaactggcaatcaccaccttccagggaacgacgttaatcttctcggaagatgagatagacatagaggccacggtgaaactgctcaagtaa

SEQ ID NO: 74963 - DNA, 540 bp, Citrobacter koseri
atgacaaaactcaccttacaagagcagatgctaaaagcgggattagtaaccagtaaaaaaatggccaaagtccagagaacggctaaaaaatcacgagttcaggcgcgtgaagcaagagaggctgtggaagaaaataaaaaagcgcaacttgagcgtgataaacagctaagcgagcaacaaaaacaagcggcgttatccaaagaatataaagcgcaggtgaagcaacttattgaaatgaatagaatcagcatttcaaaaggcgatattggttttaacttcacagataataacttaattaaaaaaatagatgtggataaggcgacgcaagcccagttgattaatggtcgcctcgccattgcgcgtttggttgttgataacggtggggaatgtgaatacgcgattatccccgcaagcgtagccgataaaattgcacagcgagatgctaacagtatcgtcttaaatagtgcgcttagtcaggaagagcaggacgaagaagatccgtatgctgattttaaagtgcctgatgatttgatgtggtaa

SEQ ID NO: 74964 - DNA, 1656 bp, Citrobacter koseri
ttgtggaggcttatcttagcggcgaaaaatcttttgtcaaacctcatttccctggtggcggttcaattgctgcttctctcaacagtttgttgcaattgcagacattttacagggaaaaaactttgcagctttttggattctccctcattatttgaaatgaggtttcaactttcttcattaaggtccactttgaacgtctccgcagccttacgccaggccgtctcccgtacgccctggtatgccaaacgtaagagttataaggttcttttctggcgtgaaatcaccccgcttgccgtgcctatctttctggaaaatacctgcgtactgctaatgggggtgctgagcacctttctggtcagttggttgggtaaagaggcgatggccggggtagggcttgccgatagcttcaacatggtcattatggcgttttttgctgctatcgatctggggacgaccgtggttgtggcgtttagcctgggaaaacgcgatcgtcgtcgcgccagggccgccgcgagacagtcactggtgatcatgacgctttttgccatcgtgctggcggcggttattcactattttggcgagcagattattgatgtcgtggccggggaggcgtcttccgaggtgaaggctctggcgctgacatacctggaactgacggtgatcagctatcccgctgcggccatcgccctgattggcagtggtgcattgcgtggagccggaaataccaaaattccgctgttgatcaatggcggtatgaatattcttaacatcatgatcagcagcgtcctgatttatggcgttttttcctggcaggggctgggttttgtcggggcgggactcgggctgaccatctctcgctatatcggagccgtcgccatcatctgggtgttgatgattggttttaacccggcattgcgcattacgttgaagagctattttaagccgctgaacttcaccattatctgggaagtgatggggattggcatccctgcgagtatcgaatctgttttgttcaacggtgggaaattgttaacgcagatgttcgtagcgggaatggggaccagcgttattgccggtaacttcatcgctttttcaattgccgcgctgatcaacctgcccggaaacgcgctaggttctgcatcgacaatcatcactggccgacgactggggaatggtcagatttcccaggcagagattcagcttcgtcatgtgttctggctatctaccattggactgaccgcgattgcatggttaagcgcgccgtttgcgggactgatggcctcgttttatacccacgatcaggatgtaaaagatgttgtcgtggttctgatttggctgaacgcggcgtttatgccgatttggtctgcgtcctgggtgttgccctcagggtttaaaggggcgcgggacgcacgttttgcaatgtgggtttcgatgctggggatgtggggctgccgcgtggttgcgggttatacgctggggatcgtgcttggctggggcgttgtcggggtctggctggggatgttctttgactggtcggtgcgcgccgcactgttttactggcgtatggtcagcggtcgttggctatggaaatacccgcgtcctgagcgtgaagagcgtataaaatcgcccgttcagcctgaatctccaacgaaatga

SEQ ID NO: 74965 - DNA, 1257 bp, Citrobacter koseri
atgtcccttaccgacgcgaaaatccgcactctcaagccttctgataaaccctttaaagtctccgattcccacggtctgtatctgctggtcaagccgggtggctcacgtcactggtatctcaagtaccgtattaacggtaaagaatcgcgcattgcgctgggtgcctatcctgccgtctccctctctgatgcgcgacagcagcgtgaaggtgtccgtaaaatgctggcgctgaatatcaacccggtacagcagcgggctgctgaacgtggctcacgaacaccggataaagtttttaaaaacgtggcgctggcgtggcataaaagtaaccgaaaatggtcgcagaacaccgctgaccgtctgcttgccagcatgaacaatcacatctttccggtcattggcaacctgcctgtatcagaacttaaaccccgtcatttcattgacctgctgaaaaggatcgaggaaaaaggtctgctggaagttgcgtcccgcacgcggcagcacctgagtaacataatgcgccatgcggttcatcaggggttaatcgatacgaacccggcagcaaatcttggcggcgtgaccacacctcctgtcagacggcactatcctgccctgccactggagcggctgcctgaactgcttgaacgtattgaggcatatcatcagggccgtgaactgacgcggttggccgtcctgctgatgctgcatgtgttcattcgctccagtgaactgcgtttcgcccgctggtcagagattgatttcacaaaccgagtctggacgatacccgcgacgcgagaacccattattggcgtgcgttattccggccgcggggcaaaaatgcgaatgccgcatatcgtccccctctcagaacagtccatcgccattctgaaacagattaaggatatcaccggtaataatgaactgatcttccccggcgaccataacccgtataagccaatgtgtgaaaacacggtcaataaggcactgcgggtgatgggctacgacacgaaaaaggatatctgtggccacggctttcgggcgatggcatgcagtgcgctgatggaatcgggtttatgggcaaaggatgcagtagaacgccagatgagtcatcaggagcgcaataccgtgcgcatggcttatattcacaaggcagaacacttggaagcccgcaaggcgatgatgcagtggtggtcggactatctggatatatgcagaaaagcatatgtgtcgccttatatgatggttcaggagaaccgctga

SEQ ID NO: 74966 - DNA, 1974 bp, Citrobacter koseri
atgagcagcccccttaaatcggtgtttaaaaaggagcacagcgatgagatcagtaaccacagcgtgaaccccgtcttttctgaggtagtcagcgcttttatgtcccgtcgccgctttctgcaaatgggaatggtggcgggcgctgccgtctcctttccttatctagtcaagccagaaaacgccttcgcggcgaaggcaaatccctcagcattatctaaagcggtgtcactgggcttcaccagcattcccgtttcgacagcagacactgtcaccgtgccggaaggctatatagcccgtccgttttatcgctggggcgatgctgtgggcataaagggtaatctgccggaatttaaattcgacgctagcaacaccaccgacgaacaggcggcgcaggccggtatgcaccatgacggcatggcctggtttagcctgccgcagggcaaagagaacccggcacacggtctgctggcgctcaaccatgagtacattgataacggcatgctgtttaaagacggtaccgccaactgggatcttgataaggcccgtaagggtcagaatgcgatgggtatatcagttatcgaggtgaaaaaagataacgtgggctggcaggtagtccgtccctccagctttgctcgtcgcattaccgttaatacaccaatgcaactgagcggtccggcgcgtcatcaggcgttgatgaaaaccgccgccgatccgcaaggcgaagtggtactgggcaccatgcaaaactgcgccaatggtaaaaccccgtgggggacgtacctgacctgtgaagagaactggtcggatatttttgttaaaaaagcgccgcgtaacgtgctggagaagcgctacggcattagcgatagcgatgaatcctaccgctggaacgaggttgacgaacgtttcagcgtcgataaaacgcccaacgagccgaaccgctttggctgggtggtggagattgacccctacgatccgacctccacaccgcgcaaacataccgcattaggtcgctttaagcatgaaggtgccgccgtgacgctggcgggggataatcgcgttgtggtctatatgggcgacgatcagaaatttgaatacatctataaattcatctccgagaacaaatatgaccctggcgatcgcaaggcaaatatgcagttgctggagtcaggcacgctctatgtcgccagattcaatgacgacggttccggcgactggctgccgctaatcttcggtgaaaatggccttgatcaaagcaagggtttcgacaatcagggcgatctgctgatcaaaacgcgccttgctgccgatacggtgggcgcaacaaaaatggatcgcccggaatggatagccgttgatacccatgcgaaaggcagcgtgtattgcacgctcaccaacaattccgatcgcggtaaagagggcaaagccccggttgacgcagccaacccgcgcgccaacaaccagttcggccatatcatgcactggcgcgaagagagggcagaccccgcctcagcgaaatttacgtggaatattctggtgctcgccgggcgtactgacagtgacgatcctaaagcgaaaggctccatgcagggggcagaattcggcagccctgatgggctctccttcgatcaccgcggcgtgctgtggatccagactgatgtttcctccagtacgattaataaaaaggcgtatgaagggatggggaataaccagatgatagcgaccctgcccggcaccaatgagtatcgccgctttttgaccgggccacgcgggtgtgaaattaccggtatcgcctttacgccggacaaccgtacgctgtttattaatatccagcatcccggcgaaggcggcgacgacattaccgatccgagcaaccctcgggctatctccaactggccagattcaagatcagacggacgaccacgttcttcaacagtcgttatcactaaatcgaatggcgggataatcggtacctga

SEQ ID NO: 74967 - DNA, 738 bp, Citrobacter koseri
atgcacgactactctttgcgttttgcaaatctggcgctgggttatgagggtttacctgcgatacaaaatattaccgggacgatacaaaaagggtcccttacagccatcatcggccctaacggttctggtaagtcaacactgcttaaaggtatcgcagggattctggctccgttaagtggctcctgtaccgtagaaccaaaggcgcgcattgcctatctgccacaaatatcggaattggatcgcactttccctgcaactgtttcagatttagtttccctaggtttatggcctgaaagagggttattccgtcatcacagaattgaggatcgtaaacggcttactgatgcattgggatcagtaggattagcagggtttgaaaaaagacagcttagtgcattatccggggggcagcttcaacgcgcgctcttcgcacgggtcattcttcaacaggcaaacatcatcttgcttgatgagccttttaatgccattgacgccactactattgatgacttgcttgtgctgataaaccgctggcatgctcagaaacgtactgtcttagctgtcatgcatgatatcggtctggttagaaatcattttccacaggccattttgttaaacggtaaattagtggcatgggacgaaacagaacaagttctgcgccatacctcacttctaccggcacagaatatgggcacagcacgtgctttacctgggcaacatgaggctacacattcatga

SEQ ID NO: 74968 - DNA, 858 bp, Citrobacter koseri
atgaactggcttcatgaatgggttctagcaccttttgtcggcttcggttttatgcgccgggcgctttatggttcatttctgctttgtttaagcgcttgcccggttggcgtttttttaacattacgccgtatgagtctggttggtgatgccatgtcacatgctatcttgcccggtgctgcatttggcttcttactctacggattagatatattaccgatgactattggtgggcttgtcgcagggctgatagtcgctatttttgcaggggcggtttcccgcttaacagtgcaaaaagaagacgcttcaatggctgctttttatttaatctcactcgcagtcggcgtgctcattgtatcgcttcgaggctcaagcgtggatcttatgcatgtcctatttggaactgtgcttgcactcaatcacgaagcgctgttgttaattttctctgtcgcgctgctcacacttctgctggtttctatattctggcgcgcacttattgctgagtgccttgaccctttatttcttcgctccgtttcacgattgggatcgccagtccattttattttcctggccctggtggtactgaatcttgtcgctggttttcaggcactcggcactttgctctctgtcggggtaatggtcttgccagctgtgacggctcgtttctggacgagacgtgtagcaacaatgtgcatagcctctgtcctgataggaatgcttgcatgtataagcggtttgttattttcatttcatttttcactaccttcaggaccgtcaatcatattatctgtgggaattatgtatcttgtctctgctgctgccatgatggtgaaaaacatccacttaaaaaaacttcgttaa

SEQ ID NO: 74969 - DNA, 951 bp, Citrobacter koseri
atgagaaaacccggttttatatctttatgcatcctgacgacatcaatgctttttttactttttactttcccggcgaaagcgaaaattaatgtcatagcaagcttttctgttattggcgatatggcaaaaaacatcggtcgggaccgcatcgaactgcgtactattgtcggccctaatggcgatgcccatgtttatgagccctctcctgctgacgcgatcgctatgtctaaagcggatgtcatactggtaaatggtttacaacttgaaggctttatttcacggttgatcgaggcaagtgaaacttccgcaccggtaattgaaacaacaaaaggagcaaatattctccaggacccggcaggcggacactatcatttttatgacggtaaagcggtctttcatgctgcaccgtttgatccacatgcctggcaatcagtagggaattccagaatatatgtgaaaaatattgcagaagccttttgtgcacaagataaaagtaattgtgatttttatcaggctaatgcccgtgcttatgatgcaaaacttgcggatctggaaaataaaattattaagactgtcgctacgatcccacaggaaaagcgtactgtcgtcgtaggccataatgcattcaaatattttgaacaggcatatggtatacatttcctttcccctcagggtatatccaccgaatcagaggcctctgccgctgacgttgccggcatacttaagaaaattaaagaaaataacgcatcagctgttttttctgaaaatatttccaatccacgtctggttgaacaaattgccagagaagctggccttaacgtggctggcgtgctttatacagatgccttgtcagaaccaggaggaccggcttctacctacctggaaatgatggaacataacgtaacggcgattgcgacagcggcgagcaatagccgtaatacccagccataa

SEQ ID NO: 74970 - DNA, 1251 bp, Citrobacter koseri
atgaagaaacgcttattatctacttcaatctcaacgctgcttttgggcctttctgtgatgcctgctttcgcagatgaagacgtaaccgcatggcgtctgttcatcgccgatcatgataaacccgttgtgaatgttattgatgcactggatggagataagctcgcaacatttaatgttaaaggccctgcaaatttatctcgcagcgaaagtggtgccacaattttcgctatccagggtagtgctggcgtagtatctacaatcgcttcaggcattgctttccatgatcacggagatcatgcagacattgatattgacgctcccaaattattaccgctggaactaacgggtaaaaaacctggtcattttgttgaacgtcagggcaaaattgcccagtggtttgacggggaagatagcgcgcaaatcctgggtgaaagcgccgttcttaaaggtcagaagaatataacgaaagtaaatgttgttgcgccacatcacggcgttgctgttccttacgataattatgctgtcgtatccattcccaaccctgatgatgcgtcaaaacgacctgtcggcgctcgcgtggtggacctgcaaggtaaaaaagtgggtgatgatgccttatgccccggacttcacggctcagccggctcgggtgatacttttgccctatcatgtgagactggcctcctgctgattacgcaaaaaaatgcggcaccggttatcaggcaccttccctacgcgaaaacgttgccagagggaagcacatccaccttgatcggtggtaagggaatgcaatattttatcggtaattatgggccagaccggattattctggtcgatcctaccgaatcggatagcttccgtttgattcagttgcctacccgtcgagtccatttcgttgtagacccggtacgcgcgaaattcgcctatgtgtttacagaagacggaaagcttaatcaaatagatgtcctgaaaggggaaatttcgcagtcagtgcgtgtcactgatccctattcaatggatggccactggaatgatccacggccgagaatcgcagtagctgacaataaaatttacgtcaccgatccgttgaaaagtaaaattattgtgttagacgctacttcttttaaaaagaccagtgaaataagcgtcgaagggcagccatttaatattgttgcagtcggcggttcaggaaaagtacatggtgaacatcacgatcatgaagctcatcatcatgatgatcacgctcattaa

SEQ ID NO: 74971 - DNA, 255 bp, Citrobacter koseri
atgaaaatcagtaagatagttgcattctccctgacaatggcttcgactccggctctggcatttcaggcgaaagatacgactggttcagatctttcaggaaagcagttgcgcgcaacagaagacagcatcatcagtaacttttacagccagcatagcaggcagtttcagacgacgactttaggaacctgtgctgctgtggcagtacctggatgcaattgccctttctgttcaatgttgcgtaatcaaaagctttga

SEQ ID NO: 74972 - DNA, 1185 bp, Citrobacter koseri
atgtcggtcaaaaaaatagcagttattggtgcaggcgtactcggcctgtccgtggcccgctccctggcgcaacagggagcaaaagtcactgtttttgagcgtagccatgtgggggcggggacaagcagcacgacttttgcctggattaattcaaatggcaaaacaccagaaagttatcatcatctcaatgccctggcgattgacgagcatatccggctacaacaggaacggaccacagaaggtcattggctaaaagcgactgggacttatgaatgggcggctggtgcgccagagcaaaaacggttacaagaccgggtcagccgtcttttggaactgaactatcctgttcagaacctttccgcagatgaacttaagcgcaaagttcctgaaatccgcgtgggatctcatgccggagatatctggtattttccaggtgaatgcttactggtaccttccgtttttatggcatggctggtgtccgagcttcatgttcataacgccgaactgaaaacacaaagcgaagtgacagagttaactgaagaaaaaaatagggcagagataagccttgccaatggcgaacgttggcagggagacagtatagtcattgcggcgggaagatggtctgccgaactcgcttcgctacttgggcagcaactggcaatgatcgatccgaaccagccgaataaaatcgcatgtggttttctgggctatacgcgcccggtgttaacccagttacaggcgaatttaatcacgccagggttaaatgtccggccagaaggaggggggcgattactgcttcagtgtcccgaccttgacagctttgccaatcctgcaaatccggcaccggtagatagctatatcggtgaagaaatgcacaaaaggctacggaagctatttaataatatggaaatggcacagctggaacgtatagctgttgggcagcgttcccgaccggcagatggtcttccagggcttggttatatctctggtaagcgacgaatctacctcatggtgacgcacagtggtatgactctggggccgttgatcggacggctttgcgcggaagagattctccacgataagcgttcttcgcttttgagtgatttctctcctgaaagattacttgggaaaacggcaaaggattttcctgcttttactacgttacatttcccggctgcacagtaa

SEQ ID NO: 74973 - DNA, 336 bp, Citrobacter koseri
atggtcgaaaccagtaaacaggaccgtatgccttatctacttttcctgtgtgaaaaccgcattcttgcacagaatatcgatggtcatgtcattgatcttggtggattaaccaaacaaaacggcaccattgactggcttctggatagcaataaggaaaagggggaaaatctcaaaacagaaatcgaagcgctggaggatattgccaataagatagattttctttttcttgatggtcagtttaccagccttcctgacatatcggctgaatataaagataagcttacatcagccccttcaatggaaatcgtattgaatgaacttggcgataagccataa

SEQ ID NO: 74974 - DNA, 1023 bp, Citrobacter koseri
gtgagtattattattcctggttctttcccggcacgacgactgcgccgttctcgcacccattctttcagtcgccgtctggtcgctgaaaatcagctgaccgtagatgacctgattttaccggtattcattattgaggggcaaaacctgcgacaggaagtgccgtcgatgccgggcgtatttcgtctgtcggttgatatgttgcttcatgatgccgcgcaatttgttcaggcaggtatacctgctattgcactatttccgtgtatagaaagttctgctaaatcgctgatggcagacgcttcgtgggatccatccggtttagtaccgcgagctgtaagggcgctgaaaaaggcttttcctgaactcggggtgataactgacgttgctcttgacgcctatacgacacatggtcaggacggcatcactgacgaaaatggatatgtacttaatgagccgacaaaagaaattctcaccagacaggcgcttacccacgccgaagcaggcgcagatattgtcgctccaagcgacatgatggatggccgcatcggtcatatcagacaagcgtttgaaacgaatggactgcttaatatccagataatggcgtattcagcaaaatacgcgtcgaactattatggtccttttcgcgaggcgacgaaatctgctgtatcactgggtaaacgggacaaaaaaagctatcagatggatccggcgaatgcaatggaagctatgcatgaaattgcccaggatttgcaggaaggggcagacatggtgatggttaagccgggcatgccttacctggatattatcagggaagccaggaaaacttttgcagtacccgtctttgcctatcaggtttcaggggaatatacgatgcatatggccgctttccgaaatggttggctggacgaagaaaaaacggtgcttgaatcacttatgtgcttcaaacgcgccggggcggatggaatactgacttattttgccaatacagtagcccagttgcttaatcaacataaacgggaatattga

SEQ ID NO: 74975 - DNA, 1347 bp, Citrobacter koseri
atgaagcctttattactgaccaatgcattaataatcaatgaagacttgcgctatccggccgacatcctcattgataaaggacggatccagaaaattgcctcgcttattccctcccgaacggaatggcaggttattgatgtgcgagggaaatgggtgatccccggtatgattgacgatcaggttcatttccgcgaacccggtctgacgcataagggaaccattgccagtgaatcagctgccgctgtaatgggaggcattaccagttttatggaaatgcctaacgttacgccaccaacaacgacccttcaggcgctgcgtgagaaatttcaacgtgcctcgcattcttcgctggcgaactacagtttttacttcggcgcgacgaacgataatcttgacgaactgaaagcgcttacggcttcgcaagcctgtggggtgaaggtgtttatgggagcttctaccggaaatatgctggtggacgatgaacagatcctggaaagtattttcgccaacgcaccctgcctggtagcaacacattgcgagcataccccgacaataaagcataatgaggagacatggcgggctcgtttgggggacgctattcctgctggcgaacatgccgctattcgttctgtggacgcctgcctgacatcttcccaccaggccgtctctctggcgaaaaaacatcgtacccgattacatgtcctgcatatcaccaccgcagatgaactcgctctctttgatgctgctcccacgctggaggcgctgcgccagaaaaccattacaactgaagcctgcgttcatcacctgttttttaattatgacgattatgaaatgctggggcataagctcaaatgtaatccatccgtaaaatcctcttttcatcaggaagccctctggagaggcgttaatgaaggcattattgacgttatcgcgactgaccatgcgccgcatttgctggaggaaaagcagaatgactattttgctgcgccttccggcttaccgctggtgcagcatgctcttcctgcactgctggatatgagcagcagggggatttttaccccggaaatggtggtgagaaagacaagccatgctgtagccgagcgcttccagctcaaagatcgtggctatatcagagaaggctattgggcggacctggtggttatcgatccgtttagtcatcaacagataatccgggaggatgtggcatacaaatgcgggtggtccccctttgaaggccggattttgtcaggcggggcggttgatatgacgctggtaaatggccacgttatctggaatgggcgcaccatacagcagaagtacggcctgccactggaattctgtcgctag

SEQ ID NO: 74976 - DNA, 852 bp, Citrobacter koseri
ttgattaagcaaagcagaagcgatatcccccgacgcgagagcggtcgtcacgtctggccggtgaaggaggatgatacccaaagcaacgatatcgatttttataaaacggcgttcagagaacagtccaggcgatgggggctttccgagatcattcttagtaatactggtgatggagaaatatcactctatcagtctgttaatcagggggcagatgttcctcacgtactgattgcggcagggtttcatggagaagaacccgcgggatgttgggggatgctggattttttgcgcgagggctcccctgaattgtttgataacgtagccgtgagttttttaccgcttgtaaacctctctggtctgcgcactggtagccgccttaatagtcttggacagaatccaaaccgaggctttaccaaaggtgcagaagtcgagccttctattgaaggaaaagtactgctcaactatgaaacgcttctgaaaaacgcagcaagtcatggtgtgctctgttgccatgaagatattcttcgtcataaggcgtatctctacactttcgaacatgctactcgcttgggtcatttcagcgtggcattacgtgatgaacttgaacgctttttcccggtcatggaaaaagagcgagttgatggttgtgaatgtgaggatggcattatttttaaccatttcgattcgtcatttgaatcatggttgttttcttcctgttccgacgtcgcagcgtgcactgaaacgccgggattgcaaccctttgcaaaacgagcagaagcaaaccgttatttaatcggcgcgtttatctcatcgatactggagcgcaacagcatcgggagcgggatgtcatga

SEQ ID NO: 74977 - DNA, 1953 bp, Citrobacter koseri
atgtcagaagcgcctataacagagtcagaacctctcacttttactcttcctgatggctctctgaagcacgtcagaaaaggggcaactttgcagaacgttgcagaaagcatcggttcttccgtcgcgaaaagcgctgtgtacgcggaaattgatggtaaatgtgtggatctgcttgagaaagcaaagaacagtggaaagctcaatatcattacagtttttgatgaagaagcgttgggcccgattcgccgaggttgtcttctccttctcgcagcgtctgtaaaacagctgtttccctcggccaggatggttgaagggcaactgactaaggaagggttttattacgatttcgcggtagataaaccttttactcgcgatgacctggggatgattgagcagcacatgacaagtctgatcgctgaaaacccgccgattattaaagagcaggtcacgcgggcacaggctattgactgttttgagcagcggggcgagaaattcaaatcaacggagttgatggaaatactggcagataagtcggtgacactatgccatctcaggcagttcacggacggctttaatggcccattggttccggatcttcgttttctaaaaaatatgaagttgcttaacgtatccggtgcttactggcgtggtgaagccaacaatgtacagctacagcggatttatggcacggcatgggccagcaaaaaacagcttgatggctggcttgagaaaacggcagaagcggagaaacgtgatcatcgcaagctgggtcgggagctggatttgtttcattttcaggacaatgcgccaggcgcggttttctggcatcccagggggtggacaatctttcagtcgcttattgcctatatgcgtagccgccatgaggtggcgggttacgttgaggtcaatacgcctgatgtcatggaccgcagcctgtgggaaatttccggtcactgggataattatcgtgatcatatgtttacgacacaaaccgaggatggccggaatttcgctctcaagccgatgaactgtcctggggcggtatcgctgtttaaatacgggatcaagagttaccgcgatttacccgttcgcctgtctgaatttggtaaagtccatcgttatgaaccctctggatcgctgcatggcttattacgggtccgccattttactcaggatgacgcgcatatcttttgcacgctgcaacaggtcgagggggaatgtaaaagtatccttcagttggtgcttgatatttataagcaatttggatttgaagaggtcgcaatcaagttatccactcgtcctgaaaagcggatgggaagcgacgcagactgggataggctggaaaacgcgctctcagcctctctggaagcgcagggattacaatggtcggtaaatcccggtgaaggtgccttctatggccctaaactggagtttgtgttacgcgacgcgattggtcgtgactggcagtgcggaacgctacaggtggatatgaatctgcctgagcgatttgatattggctatattgccgaggatggctcgacaaaacgcccggtgatgttgcacagggcgctcttcggctcccttgagcggttcaccggtatccttcttgaacattacgtcggtaaactgcccgcctggctgtcgccggttcaggccgtggtcatgacgattaccgacaagcagcatcactatgcggagcaggttttgaaggcgcttcgcaagaaagggctgcgttgtgaggccgacctccgcaatgaaaaaattggatttataatccgtgaacagactctggcccgcattcctttcctgctgatcgttggcgatgcggaggagaatgcggcgcgtgtcacggtgcgcgatcgtaccgggaggtgcatggggacgctgttactcaatgaggcggcagacgctatcaaaatatgttgccagccaccggaggttcaccttgattaa

SEQ ID NO: 74978 - DNA, 915 bp, Citrobacter koseri
atgcttcaactaaagacggtaaagataatcctgttaagcacctttatcacaggactgacagctattcatggcgcttatgctgctgaaaagtttaaggtcatcacgacattcacggtaattgctgacatggcacagaacgtggcaggggacgccgccgaagtcagttcgattacccggcctggcgcagaaatccatgaatatcagcctacaaccggagatataaagcgtgctcagggggcacagctaatcctttcaaatggcttcaacctcgaactctggtttcaaaaattttatcaacgattgaaaaacgtaccggatgtggtggtcactacaggtatcactccaataagcattaccgagggtccgtatgatggaaaaccaaatcctcatgcctggatgtcgcctgataatgcactgatttatgtagataatattcgtgatgcgctggtgaaatacgatcagggaaatgctgaaacttacaaagccaatgcggacgcctataaacaaaagatccgtcagacgcttgaaccgctgcgtaaacaaatagaaaccctccctgccgaacagcgctggctggtatcgagcgaaggcgcattttcttatctggcacgcgatctgggactgaaagaactctatctatggccgattaatgccgatcaacagggaaccccgcaacaggttcgtaacgtaatcgataaagtccggcagaataaaattccggcggtatttagcgaaagtaccgtttccaataaaccagcccgtcaggtcgcacgcgaaacaggtgcacattatgggggcgtactttatgtggattccctgagcgcagcaaatggcccggttcccacctaccttgatctgctgaacgtcactacccggacagtggtacagggtttgcacagcggaatgaaggagtaa

SEQ ID NO: 74979 - DNA, 822 bp, Citrobacter koseri
atgagccaggcggcaggcatcacagtagcgggcttaactgttgtttatcgtaacggccataaggcattacagaatgcatcattcagcgtccctaaaggttcgaacgcggccctgctgggggtaaatggttccggaaaatccacactattcagggcaatgatgggattcgtatccccttcatgcggaacgatttcacttctcgggatgcctcctgcacaggcgcttcgccgcaatattattgcctatgtacctcagtccgaggaaattgactggtcgttcccggtattggtggaagatgtcgtcatgatgggccggtatggccatatgggtatgctgcgtagagcgggtaaagaagatcgcaggatcgttaatgatgcgcttgagcgtgtagatatgcttccttaccgccaccggcagattggtgaattatccggagggcaaaagaagcgggtgttcctcgcgcgttctattgcacaacggggcaaagtaatccttcttgatgagccttttaccggtgtggatgtcaataccgaaaagaaaatcatcacgctgcttggcgaactgaaagaagaaggcagcaccctggtggtttcaacgcataaccttacctccgtatccgaatattgtgattataccgttctggtgaaaggcaccgtgctggcaagcggtcctgtcgccacgacatttacgccggaaaatataaaaaagacgtttagtgcaaacattgagagtgagtcagatatattgccagttcagggaggatcaacacagccaaattatcaaccttccgctgaatatgaagataaaggcaggtcatcatga

SEQ ID NO: 74980 - DNA, 861 bp, Citrobacter koseri
atgagctggcttctggagccttttggttatcaatacatgctcaatgccatgtggatttcggcaatggtcggaggaatatgtgcttttttatcctgttatctgatgttgaagggttggtcactaattggcgatgcgctgtcccattctatcgtacccggagtagctggcgcttttatgctgggactgcccttctcggtgggtgcgtttgtttctggcgggctggcagcaggcagcatgttccttcttaatcaacgtacccgtctaaaagaagatgtcatcattggtttgatcttttcatcctttttcgcgcttggattatttatcatctcgctgaatcctgtttcggtaaatatacaatcaatcattctgggaaatatcctggcggttccgccagaagatattcttcagcttaccgtcattggcattatttcggttattacgttgttattaaaatggagagatttattactgacctttttcgatgaaaatcatgcgcgggcggtaggattacatccggaaaggcttaagatattatttttccttctgttaaccctctccaccgttgcggcattacagaccgtaggcgcgttcatggtgatctgccttgtggtaacgcctggcgcaacggcctggctgcttactgatcgcttcccccgcctggtctgtattgcggtgaccataggcagtgtcaccagctttctgggtgcgtgggcaagttactaccttgatggcgtaacgggtggcattatcgtggtcgctcagaccctcattttcttgctggtgttcattttcgccccggtacatggcttactggcgaaccgccgatcggtttctcagtcaaaaggaccgcgtaaatgctga

SEQ ID NO: 74981 - DNA, 828 bp, Citrobacter koseri
atgctgaatatgctcattgaacctttccgctttgacttcatcaattatgccctgataatcgcgctgctggtctctgttccctgcgccctgctgtctgtttttctcgtgctgaaaggttgggctctgatgggggatgccatgagccatgccgtgtttcccggggttgtactggcctggattgtagggttgccattaggcaccggagcttttgtggctggattatcctgtgctttacttaccggatatattaaagataacagccgcataaagcaggatacgctgctgggtatcattttttcgggtatgttcgcctccggactgattttgtatgtctcagtccgtccggatgctccgcttgaacatatcctctttggcgacatgcttggtataaacgccaccgacatactccagacgggcaccattgccttatttatactgctgattaccggaattaaatggcgtgatttcctgctttactgttttgatattcagcaggccagggtcagtggactacggacgggatggctctattacggattactgagcatgatttcgcttactgttgtcgccacgctaaagtccgtggggattattttatccgtctctttgcttatcgcgcccggtgctattgcagttcttttgacgcaacgatttagcaacgcattattcatcgctgtggctttatcggctctggtatcaacgaccggcgtttacctctcttatttcattgatagtgcgcctgcgccaacggttgttttgctttttgccctgatatttatagttatttttatatactcaagctttaaatataatgagaaatatctctga

SEQ ID NO: 74982 - DNA, 810 bp, Citrobacter koseri
atgaaaaaagcaattatctttctcctttcattttatagctgcgtgggattcgctgagcctcagcaggcacgaagcgactattctattgaagaaagtcaggcgaaagttaacaaaatccttcataccacttcgttgtacagaaatggcctcagctataatgaacgcgttgctgagatatcctcccgtttcctcggaacgccttaccaggcgcatacactgattggatcatcttcgatgcaagagaggctggtcactaatcccagtaccgtggattgttttacttttcttgattatgttcgctccatggcgcacgccagtagctggcaaacttatgtatctgaacttgttaagactcgttatacaaacggaatgattgattttactggcagaaaacattttttcacggactgggcggtcatatctccgcgaaatgcacaagatgttactcaggacatcagtccgtatactattactgtcaacaaacagctaaaccaaaagaataaaaaacaagaatatgttaagggtctcggcattatctcacgacggataagttacataccggcttctgcaatagataaagaggtaataaataaactgcaaacaggtgattatgtgggtatttattcaacaaaaagaggcctggatgtttcacatgttgggatcattatcaaagaccacaataacatctggttcagaaatgcatcgtcattagcgaaaaatagaaaggtagttgactcaccttttattagatacatggctacaaaaccgggtattgtagttttacgagacaaaacagatcaatacccctga

SEQ ID NO: 74983 - DNA, 867 bp, Citrobacter koseri
gtgaaactttttattaatgatctgacggtcatggattttagtttccttgatgcggaatccgggttgattggcgatagccttattgttgatattattcttgagggagatctgaatgctgagtcaatggtaatggatttctcacatgctaaaaaaagtatcaaacatgaaattgataaactggccgatcatgtcctgattgtgccggaacaaaatagtcatattattgttagtcatgcaggcactacgacggaagtcgccatgctgcgtaagaatggggagacccagtgttttatttccgggccgcaggagagtttctggctggtccaaacagataatattaattcccgttgccttgaatcccaaatagaaaaacatttactggcgtgtttgccgcaaggagtaaaagacataacgataacgttacggccggaaagtattaatggggacagttatcactattcgcatggactgaaaaaacaccgcggaaattgccagagaatagcgcatgggcatcgctctgcgatcagaatttttgtggatggtgagcgaagccatatgtgggaacagaagtgggcaacgcgatggaataacgcttatctattaagccgggaagatgtcgttacagtgacaacactttcaccgcgtggcgttgcatactggcataaggggctgacatgttcttcctggcggagttctcagggatactttgaaatcatgctttgttctgaggtagtagatattctgccgtgtgataccacggttgagtcactggctttatttatcaggcagtcaattgagcacggtttacccgcagcgaaaatagaagtccatgcctttgagggagtggggaaaggcgctattgcctga

SEQ ID NO: 74984 - DNA, 561 bp, Citrobacter koseri
atgttacgtaaaaacccatcaggtcataccccagtggtgtcaacaaaggcctatatcgatcccaccgcggtaatttgtggacgtgtcattattcatgattatgtttacgtcggaccttatgcggttatccgggctgacgagctaaatgcagacggggatatggatcctatcattatccattcccactctaatattcaggacggggtggttattcactcaaaaagcggcgcgccagtgacaataggaagcggaacgtctattgcccaccgtgcaatagtgcatggcccctgtcaggttgacgagcgggtatttattggattcaacagcgtgttgtttaactgtcatattcagactggttgtgttattcgctataatgcagttgtggatggcgttaccttgcctgagaatacctatattccatcaacggaacgcgtggggcctgattccgatcttaaaagttattcgagggtagaccccgcttctttacaattttcagaagaagtggccagtaccaacgttaaactggtcgaaggttatcagaagttacgcaatgaattctga

SEQ ID NO: 74985 - DNA, 936 bp, Citrobacter koseri
atgagtattgcagccaaacaaaccttatgccccggaatgctaccggatattcagtccactaagggtgacggtgagggcgagtcattatcctgggttggcatggaacaaattgacctgccgatagacatcgcaggcaggccggtatcagcaaaggtcaatgctggcataaaccttctcagttcacctgaagctgaaaaggggatccatatgtctcgtctttatcttcttctggacgaactgacacaaggggaaatcacaccggcattattgcaacatgtgttgaaagcatttctggtatctcatcagggacgtagtgatgaagccagtattgagatttcaggggatttgttactgtcgcgtaagtcgttaaattctaatcactccggctggaaagcttatcctctgactctgagcgccgaactcaggcaatcttttacggttaccctcaaagtgggtatcccttattcgtccacctgcccggcttccgctgcacttagccgccacgtcgcgggtttgcagtttagcaaagactttggtaacaggatcgacaggctcccggcagcagaaatagccgactggcttgttgagaaaggaatgccggcaaccccgcacagccagcgaagctgggcatgggtgagtatccgtcttaatcctgaagcaaaatcactgcctgtgattgaactgattgattatgctgaagttgctctcgggacagccgtgcaaacggttgtcaagcggagcgacgaacaggcttttgcggtggctaacggtcagaatctgatgttttgcgaagatgctgcccgtcggctcaataacgtttttcgttgtgcacccttttgtgaagcatttgatatcagggttgagcatcaggaaagcctgcatcctcataatgccgttgcccgtattcactggaaaggaagtaaaaatgttacgtaa

SEQ ID NO: 74986 - DNA, 423 bp, Citrobacter koseri
atgactaaacctacccgcgctgaacgagaaaaaatcctggcgatgctgccagaagattacatgaatcctgtgcaacaggactacttccggcggcttatccgccacgaaaggcaggaggtgcttgatcatatagaccagatgaagcaacaactgcaggataatccagaaacgggtgacgaaggtgacatcgccattcgtgaagagcagttacgtctgctgttcagacagatagacagagaaagccgcctgttgccgaaatatgatgcagcgcttatgcggcttgaaaaaggagaatatggcttctgccgggatacaggcgaacctatcggtctgcaacgcctgctactcaggcccaccgcagaattaagtattgaagccaaaacaaaggaggaaaaagttgagattcagtaccgaaagaaataa

SEQ ID NO: 74987 - DNA, 1200 bp, Citrobacter koseri
atgaaaagaacaccgctcattatccttaatggttttctgggggcagggaaaactactctgctaaaaaaccttcttacacaggcacacaaacggcgaatgactgtatccgtcatcgttaatgacatgagtgaacttgatgtggatggcgtcctgatagccaacacagaaatcgttgatgcagccagtaacaattttgtgagtatttcagcagacagtatcagcagcagaagcgggatccagaagctggattccgcgctgaaaaacctgctcgaaaaacggtctgcggattttattttactggaaacctcaggtagcagccatcctcttcccctggtccgctatctgcgagaacatacccaggtaagtctcaaagcatttttgtctcttgttgatacggtcatgcttaatgatgactacgacggtggaaagaagcttattccggttttccaggagcacctcaataaaggaacccggggagtggaaagcctgctggcagaacagattatgttctgtaataagctcttattaaccaaaaacgaccggttacccttctatgtggttactgaggtagccagagccatacatccccttaatccccaggttgcaattatggccgtgccctggggaaatttacagctggatgaattgctttccatgccggattacgattttcatcgggtggcgttacttatcgatgagcttcaggatgccattgacgcagttttgccggatgaaaccgataaaaaatacgatatttcgtggagggtcattgaggatgaccgtccatttcatccgcagcggctgtgggatacctgccatcgcttcatgggcgcaggcgtttaccgcagcaaggggtttttctggctaccgggaagggatgacctggcattattgtggaaccaggcagcagggagcatcaatctcgaattcataagctactggaaagccggggtcctgactcacactgataattcattgacaaaggaagaacgcgcagctatccgtcagcaactggcaaaaatgcctggcagatttggtgaccggcgctgccgcctgactgttattggcgagagcggcgaaattgacgattttgccctcgcattgcgccagtgtttactcactgaagaggaaattctctggtggcagcagggggggattttccacgatccctggcccacgaaagtggcccggctggcttaa

SEQ ID NO: 74988 - DNA, 453 bp, Citrobacter koseri
atgacaacaccagtagccaaaacgtatgactggaagcaaacgttgcgcacacatggtttgcgggcaacgccatccacccttgctacactgcagtgccttgaacatgccagccaggccatgagccatgacgatttaactcagcaactgggcgagcaggctcccgatcgtgtgaccctttaccgaatactggaacggctaatgcaggtcagtattgtccagcgttataccgactcggcaagaactcagcgtttcgctctgacccaacgggctgccgtaggactttttgaatgcgataactgccatcatgttattcctattgagcaggatccagccctggaagcggccattgaattggtaaaatcacatctcactggacatggtatgaccgaacgggaaattaccctttccagtcatggtatctgtccggactgtaatcgtactatcaccaaataa

SEQ ID NO: 74989 - DNA, 1383 bp, Citrobacter koseri
atgattaaactaacaaacacgcttggtatgcaaaaggagctattagttccggttaaagagagcaaaatcggcatgtatgtatgcggcgtgacggtttatgacctttgccatcttgggcacgccagaacctttgtagcttttgatatgattgtccgctatctgcgttttcgcggatacgatgtgactttcgtgcgtaacattactgatatagatgataaaattattcagcgcgcccgtgatacgggagaggactggcgcagcctgacagagcggatggtgcatgaaatgcacattgattttgcaaagttaggcatcctgccgccaaacatcgaacctcgtcccacagagcacatcccacaaatcatcagtatgatcgaacgacttctgcatcgacaatttgcttacattgcagagaatggtgacgtcatgttctccactgcatcggcaaaaggctatggaaagctttcgggacaggatattaccatgcttcgtgccgggacccgcatcgaagtgaatgagtataaacgcgatccgctggattttgttctctggaagcgggcaaaacccggcgagcccgtctggccatcaccctggggtgaagggagacctggctggcatattgaatgttccgcaatgaactgccattaccttggtacccatttcgacattcatggcggtggttctgacctgatatttccccatcatgaaaatgagattgcccaatccacctccgccaatgatggcccttacgtaaattactggcttcacaccggcatggtgacggtgaataaagagaagatgtcgaaatcgctgaataacttttttaccctgcgcgatattctgaatcggttcgatgcccagagtgtgcgcttcttcctgctaagcgcacattatcgtaagccgctgaattatagcgaggagaatattcacctcgcgcgcgcctcgctgacacggctctacaccgcatgccagttcgctgacgggtctcgatctgaacagcacgatgcatggcgggccagattctgtgaggcaatggatgatgatttcaatacaccccaggcgcttgccattttatttgaactgacaagagagattaacaggctttgcggaacgaatgatgatgaagccgcagcacttgccaccacgctgaaagacctggggaatgtgctgggtttgcttgaacaatcagcggatgcctttttgaaaaaccgcagtgatcttcatcctgcagaactgcaacttattgaaaagttaattcaccaacgcagtgaggcacgacgtatgggcaagtgggacaaggccgatcgtttaagaaatgaattagcggagcaaggcattgatcttgaagatgtcggcgaaaatacctcatggcgtatccgataa

SEQ ID NO: 74990 - DNA, 1131 bp, Citrobacter koseri
atgaaccaaccacgcgaagtcgttattgtcggtgcgggtccggccggggtgggtatggcggcgcttcttcgtcgtagtgccatacaggatatcctggtcgttgacagtcacgaagtaggtgcctcctttatgcgctggccggaagaaacccgttttattactccttcttttttttccaatccgtttggacaaccagacctgaactctgtgacccctgacagttcattggcgcttttctgcggtgaagaacatcctggggggaaaacttatgccagttaccttaaggccgtactggatgagtatcagatacccgtcatggctcccgccaggattgcaaaggttgcgttgctcagttccggtaattttatactgataacagaagcaggagagaagctggaaacacgctctttaatatgggctacaggcgaattccagttcccagaccggcagatttttcctggagcagatatttgttgccattacggtgatgtgaccagctggaaggatttcaggaaaggtgaatacattgttataggcggctatgaaagcgcggtggatgccgctgtaaacctgctggaaaatggctcatcggtaaaaatgttaacccgctcagccccctggtcaactaaccacatcagcgatcccagtctatcgctttccccttatacccgtgagcgtttgaacagagtgatgaatcaccgtcttttcgaaatttatgaagatgcggatgtctgtgaagtaatcagaatgcccggcccgggaagttcgtacaaagtccataccacaaacggacgcgcctgggctactgacgaggtgcctgtgcttgctaccggcttccagtgtggcggaggagcaaggcaactggctgctttttttgaatggaatgatgatggctatccggtcttaacggacgaagactgctcaaccctttttcctggtttgtaccttgtcggccctcatgtgcggcatgccggtaatatttattgctttatctataagttccgtcagcgctttcccgtcgtggcagaaagtatcacgcgtcatctgggcctgtcctctgaaggagtacgggactggtgggttctgccttcagagcctgactgctgtgccgatgaggactgtgcgtgctga

SEQ ID NO: 74991 - DNA, 1650 bp, Citrobacter koseri
atgcaatcattcgttttaatgggattagaaagtgcaggaaaatctaccctgtttaatatcctgacggaaagtgctgccagtgatgagcgtaatttcaggggatcgaccgttgtatgtcgggaaggtctcattaatgatgcagggatctgcctggttgatacgccaggcatacgttttcagagcgacagtgaaaccacaaaactcgcccttgatgcgctaaatcagcatgatggcattctggtggttctgcgggccacgcacgctcagcaggagtggcaaacgctctgtcacctcataccgccacaggcaaaacacgttgttatactcctgacctttgctgataagatcagaaagggccttctggaagtgactgaatacctgagtgaaacatcaggtgcgccggtactggcagtcaatgcccgggaagctggcagcaatgttcgccagggaatagtgcagttgctgttgcaggataaacctgcaccctccgctgtctctttaccccgtcaaaagataccggtaattaatctgctggctgaatttcctcaacaaacgatatttgaacatcgttggtgtggaaaagttgctgcaatagtatgccttttcctgctgtttgccgttccggtatggggggcatggctgctgtcagattttattcagcctgtcattgacagtgcggttattcagccgcttaagaatataacgacgagctggcccgacgttctgaagacactatttgtcggcaattacggtctttttagtctgggactttattcgtttgtatgggcatttcctgtggtggtactgatagggttgtctctttcgctgactgacgacagtggacttaaggaaagaattacagcgacgctggatccctggttgagaaaactcggcctcagcggtcaggaccttattcctgtattaagcggtttcggctgtaatgtcgtggcggtttttcagagccgttcgtgttcgcgatgcacccggcatgcttgtataagtatgattagctttgggtccgcttgcagctatcagacgggggcgacgctttctctttttaatgccgcccatcaaccatggctctttatcccctatctcagtctgctgtttttcacaggcgcaatacatacgcgcctctggaacgggtcgttgaagcctggccaaaaccagcgtctgacagagatcacctggctacaatggccacgctggcgaaatgtgacatggatgctgaaaaatatcctccgtcagttcattacgcaagccatgccgttattcctgattatctgcattgttgcggggatgcttgattacgcagggatcactcgctggctgagtgaaacgacggcacctttacttcatctttttaaactgccagcagaactgatgcccgggatcattttttcactgctaaggaaagatggtttgatggtgctcaatcaggatggcggcagcttaatacagtctctcagcacatctcagttactgctacttgtctggctcgcctctacgttgatggcctgccttgtcacggtatttaccatcgcccgggaaataaactggcggtttgcagcagcagtggcgggaaaacaggtattaagttctctggtggtggctctggtgatatcccagttatttattcatgaggcataa

SEQ ID NO: 74992 - DNA, 207 bp, Citrobacter koseri
atgatccccaagacttaccagcaatggtaccggtgcatcacagaagaatgtggaattcccttgacgcaggcatttattgcatcccgtctggcagtccttgagtcccaagatcatcaggaaaccagacgttttgtctcgctatatgggcaacaacatctgaatagtgttgtacagtggttcaaaaaagctggggaagaattgttgtaa

SEQ ID NO: 74993 - DNA, 1224 bp, Citrobacter koseri
atgtccgaagtcagtgcaaattttcatggcgataaacgcctgccggttaccgtactttcgggatttttgggagcagggaaaacgacactgcttaaccatattctgaacaaccgggaaggccgtcgtgttgctgtcattgttaatgatatgtctgaggtgaatattgatgctgcccttgtgagggaaggtggtgcagaactctcccggactgatgaaaaactggtagaaatgagcaacggttgcatttgctgcacattgcgcgaagatcttcttctcgaagttaatcgtctggcaaaagaagggcgttttgatcagcttgtcattgagtccaccggtatatctgagcctctgcctgttgctgaaacatttacctttgcgggcgatgacggtgaaagcctttcgacggtggcccgccttgacaccatggtcactgtggtggatgcgtacaattttctgaaagactacggttcggaagacagcattcagtcacgcggagaatcgttaggtgaaggtgatgaaaggagcgttgttgacttgctgatcgatcagattgaattctgtgatgtgctggtccttaataaagttgaccttatcagtgaagcgcaaaaagaaaaactgatggcgattttacgttcgcttaatccacgggccagaatcgttgtttcacagtttggacaggttccgctgggcaacatacttaataccgggctgtttgatttcgagcaggccgctcaggcacccggctggcttaaagaactccggggcgaacatacgccggagacagaagaatatgggatcaccagctttgtctttcgcgcccgccggccttttcatccgacccgtttctggcaggtgatggaaaatgagctggatggagtcgtcagatcaaaaggttacttctggctggccagccgtccggaattcgcaggttcatggtcgcaggcaggtggcattgcgcgccaggggctggggggcatgtggtgggctagtgtgccgaaaggacgttggccagaggatgctgagtcactgaagttcatcatgtctaactggatagatggcattggtgatgcccgtcaggaactcgtttttattggaatggatatgaatgaatcagaactgcgcaacagactggattccgccctgttaacggatgcagaaatggcagaagggcctcaaaagtggcggcattattccgatcctgttgagccctggttcgaagaatga

SEQ ID NO: 74994 - DNA, 222 bp, Citrobacter koseri
atgtttctcttactggaaaaagcccatgcaggtgcagtttttaaacttgaagatatcctggcatcaataccctgggattctcatggattgatcgctgcgattgcacagcaatatgacactggagaggtgttgatgcttgcctggatgaatcaacaggctcttgatgaaaccttattgactggcagagcctgttactggtcgcgatcccgatcatgcctttga

SEQ ID NO: 74995 - DNA, 483 bp, Citrobacter koseri
gtgagtaatagcccatattctctaagtacaagggacactgcattatcgtctacggattgttccgggcggagagagctgattgagagtaagaaaatacgaatcacaccgctccgggagagagtttataatttcgtcagtcatgctaaagaaaaaggcattagcgcataccagatactggaattaatgaagaaatataatccgaatgcaaaaccggctacggtttatcgttctctggattatttgcaacaggcagggattatcgtaaaaatagaatgctgtagcaaatttatcaaaaaaaataatttatcctctgatgttgtgactatttttttgatttgctcaaactgcggaacaataatccaacatactgaccacctcattcatacttacattgagaaaaaagcaatagattatggttgtgctgtacaaaaaaaagatattgaagttaaagtaatttgccctgattgtcgaggaaagggttaa

SEQ ID NO: 74996 - DNA, 888 bp, Citrobacter koseri
gtggatgagccggtatctgccatggtcagcagaattgtgacggatttacgcgtaccgaggatgttgctctctgtgctgacaggggcgggactggcaatggtaggggcgttgttacaaactaccacccgtaacgatctggccgatccttttttgttcgggctatcctccggcgcgtcagcgggggcggtgctggtgatcacccgttttggtgatcgacttggtgtattaacgctccccgtatcggcgtttgttggtggtgtgtgttccgccatagcagtaatgctgttgtttcattttaaaaagcaacgcggagctgagcatctaattctctgcggtcttgccatctcttttttgttcggggcgctgaccagttatttcattttttcgggcgatcagcgagctgccagctctgtgctgttctggtcactgggtggtctgggattagccacctggaataatttgcctttcgcagtgttcagcctggtgttgctgtttgcttttgtcctgttacggtggcgctctctggatggtgtgctggcaggagaacagacagcgttgtcgctggggattaacgtgagtcgtctgcgcatcgagatttttctttgttgcgcactggcaacatcgttgatggtggcattaaccggcgtgattggatttgttggcttaatggtgcctcatctgtgtcggcattttgcaggagttaagcatctgttgttgttacctttgtgtggcgtctggggtgcaatattactgtgtggcggcgatatagtcagccggacgatactggcaccgcaggaactaccaattggcattattacggcgggcattggagggttgtttattatcatgttactcgcacgaaattcgtccagaaatacggcctgttaa

SEQ ID NO: 74997 - DNA, 957 bp, Citrobacter koseri
atgaaaaaaatgtttatatccctgctggcggtactgtctgcctcagtagccagtgctgctgattttcctgttactattgaaagttgtgggactcctgtcacattcgccggtccgccgaaaagggctgttatcaacgaccttaatatgtcagaaatggcgtttgcactgcatttacaggatcgtattgttgggctgactggtattagtggctggtacaaaatgacgccggaatttaaaaaggcgatgggctcgatcccagaactggcacccaaatatcccactctggaaacattgctggcagccgaacctgatttctttttcgctggctggaactatgggatgaaggtgggtggcgaagtgacgccggatacgctaagcaaatatggcatcaagacttttgttctgagtgaaagctgtgtgttcaccactgcgcacaaaaataaagccaccatggatctgctgtataacgatgtcctcacgctgggtaagatttttggcaagcgcaatgacgcacagtccctggtcagcggctggaaaaagaggttgaatgaactgccgaagccagcggcaggtacccgtcctttaaaggtgttcgtctacgactcaggcgaggataaaccgtttaccagtggtaaatatgcgatgcctacggccataattgaggcggctggtggtaaaaatgtaatggaggcggtggataccagttggggaacgacttcctgggaaagcgtggccgctactgagccggacttcattattttgttggattaccagacgggcagcggtgcggatgcactgcgtcattttcttgagaatcatccgttaatgaaactgactccggctgttcagcatcatcgatacctgaaattacaatatgctgaactgacaccggggcctgccaacgttgatgcggtggaaaaactcgcgcgggcgatgtacccgtcaacggcgaagtga

SEQ ID NO: 74998 - DNA, 1263 bp, Citrobacter koseri
atgtcccttaccgacgcaaaaatccgcaccctcaagccttctgataaaccctttaaagtctccgattcccacggtctgtatctgctggtcaagccgggtggctcccgccactggtatctcaaataccgtattagcggtaaagaatcccgcattgcgctgggtgcctatccagccatctccctgtctgatgcgcgacagcaacgtgaaggtatccgtaaaatgctggcgctgaatatcaacccggtacagcagcgggctgctgaacgtggctcacgaacaccggagaaagtttttaaaaacgtggcgctggcgtggcataaaagtaacaggaaatggtcgcagaacaccgccgaccgtctgcttgccagcctgaacaatcacatctttccggtcatcgggaacctacctgtatcagaacttaaaccccgtcatttcattgacctgctgaaagggatcgaggaaaaaggtctgctggaggttgcgtcccgcacacggcagcacctgagtaacataatgcgccatgcggtccatcaggagttaatcgatacgaaccctgcagcaaaccttggcggcgtgaccacacctcctgtcagacggcactatcctgccctgccgctggagcggctgcctgaactgcttgaacgtattggggcatatcatcagggccgtgaactgacccggcatgccgttctgctgatgctgcatgtgttcattcgctccagtgaactgcgtttcgcccgctggtcagagattgatttcacaaaccgagtctggacgatacccgcgacgcgagaacccattattggcgtgcgttattccggccgcggggcaaaaatgcgaatgccgcatatcgtccccctctcagaacagtccatcgccattctgaaacagattaaggatatcaccggtaataatgaactgatcttccccggcgaccataacccgtataagccaatgtgtgaaaacacggtcaataaggcactgcgggtgatgggttacgacacgaaaaaggatatctgcggtcacggcttccgggcaatggcatgcagtgcgctgatggaatcgggtttatgggcaaaggacgcagtagaacgccagatgagtcatcaggagcgcaataccgtgcgcatggcttatattcataaggcagagcacctagaagcccgcaaagcgatgatgcagtggtggtcggattatctggaagcatgccgagaatcttatgcaccgccttatacaattggtaaaaataagtttatcccatag

SEQ ID NO: 74999 - DNA, 864 bp, Citrobacter koseri
ttgtgtgagtgggtaaaagaggccagtacaacgacgcagaacgcaccactggcggtggataccgccctcaatggcgaggcgtataaacaacaggttgcacgcgccgttgcggagatccgccgtggcgagtatgtcaaagtgattgtctcgcgcgctattcccctgccatcgcggattgatatgcccgccacgctgttatacgggcgacaggcaaacacgcctgtgcgctcgtttatgttccgtcaggaaggacgcgaagcgctgggctttagcccggaactggtgatgtcagtgacgggcaataaagtggtcactgaaccgcttgcgggcacccgcgatcgcatgggaaacccggagcataataaggcgaaagaggcagaactgctgcacgacagtaaagaggtgcttgagcatatcctttctgtcaaagaagcgattgctgaactggaggccgtttgcctgccgggcagcgtggtggttgaagatttaatgtcggttcgccagcgcggcagcgttcagcatctggggtccggcgtgagcggtcagcttgcggaaaacaaggatgcctgggatgcgtttaccgtgctgtttccgtcgattaccgcctcaggtatccctaaaaacgctgccctgaacgcgattatgcaaattgagaagacgccgcgagagctctattccggcgcaattctgctgctggacgatatgcgcttcgatgcggcgctagttctgcgttccgtatttcaggacagccagcgctgctggatacaagcgggggcgggaatcatcgcgcaatctacaccggaacgcgaactgacggaaacccgggagaaattagcgagcattgcgccctatttaatggtgtag

SEQ ID NO: 75000 - DNA, 1140 bp, Citrobacter koseri
atgtcagagcccctcgatctcaatcagttagcgcaaaatattaaacagtgggggctggaactgggctttcagcaggtcggtattaccgataccgatctcagcgccagcgaacccaaattacaggcatggctggataaacaataccacggcgaaatggactggatggctcgccacggaatgatgcgcgcccgccctcacgaattattgcccggcacgctgcgcgtcatcagtgtgcgcatgaattatctgcctgccaatgccgctttcgccagtaccctaaaaaatccctctctgggctacgtcagccgttatgcgctgggccgtgactaccataagctgttacgtaaccgtctcaaaaaactcggcgagaggattcagcagcactgcgtttcgctgaattttagaccgtttgtcgattctgcgcccattctggaacgtcctctggctgaaaaagccgggcttggctggacaggtaagcactcactaatccttaaccgcgaagccggttcgttctttttcctgggggagttgttaattgatttgcctctccccattgatgcgccagttgaagaaggctgcgggaaatgcgttgcttgtctgaccatctgcccgactggcgcaatcgtcgagccctacacggtggatgcgcgccgctgcatctcctatctcacgattgagctggagggggcgataccagaagcgcttcggccattaatgggcaaccggatttacggctgcgacgattgtcagcttatctgcccgtggaaccgctactcgcaactgaccgatgaagaagatttcagtccccgcaagcatcttcacgcgccagagctgattgaactgtttggctggagcgaagcctggtttttaaaagttacggaaggatcggcgattcgccgcattggtcacttacgctggctgcgaaatattgccgtcgcgttaggcaatgcgccctgggataacgccgtaattaccgccctggaaagtcgccggggtgagcacccacttctcgatgaacacatagagtgggcgattgcgcagcaaattgagaagcgaaatgcctgcgtggtggaggtgcaattaccgaagaaacaacgcctggtcagggtcattgaaaagggactgccgcgcgacgcctga

SEQ ID NO: 75001 - DNA, 1533 bp, Citrobacter koseri
atgaagaaaaaccccgcaagtataccacactccatctggcccgccgatgagatcaaatgggcggaacgcgaggcggcggacagcttagggctgacgctgtatgagctgatgctgcgggcgggggaagccgcatttcaggttgcacgcgacgcgtatcccgattcacggcgctggctggtgctttgcggtcacggtaataatggcggcgacggctacgtggtggcgaggctggcgaaagccgcaggtattgaggtgacgctactggcgcaggagagcgataagccgcttcctgaagaggcagcgcaggcacgcgaggcgtggctcaatgccgggggcgtcattcatgcgtcggatatcatctggccggatcatattgatgtgattattgacgccctgctggggaccggcctgacgcaggctccgcgcaccgccctctctacgcttattgaacgagcgaacagccatccagcgccggtggtggctattgatatcccttccggtttgctggcgcaaacgggcgccacgcctggtgcggtgatgaatgccgcgcataccgttaccttcgttgcgctgaaacccggtttactgacgggcaaggcgcgggatgtcgtgggagcgctgcactttgacgcgctggggctggaaagctggctggcaggacaagaagctcgtatccagcgctttgcggcttcgcaactttcccactggctgacaccacgccgcccgacgtcgcataaaggcgatcatggtcggctggtcattattggcggcgaccacgggacggcgggagcgatacgtatgaccggcgaagcggcgctgcgtgccggtgctggattagtgcgggtgctgacgcgcagcgaaaatatcgcgccgttgctgaccgcccgtcccgaactgatggtgcatgaactgacgcctcaatctcttgatgacagtctgcaatgggcggacgtggtggtgatcggcccagggctcggacagcaggaatggggtaaaaaagcgctacagaaagctgaggattttcgcaaaccgatgctctgggatgcggatgcgctgaacctgctggcaatcaatcccgataaacgtcacaatcgcgtgatcacgccgcatccgggggaagccgcgcggctactgggttgttctgtcgcagaaattgaaagtgatcgcttactttcagctcgtcgtctggtaaaacggtatggcggcgtggcggtgctgaaaggtgcgggaacggtcgtcgccgcccaatcgcatgcgttgggcattattgatgccggtaacgccgggatggccagcggtggaatgggcgatgtgctttccggcattattggcgcattgcttggacagaagttttccccgtatgatgcagcgtgtgcgggatgtgttgcccacggtgcggcggcggatgttttagcggcgcgttatggcacccgcggcatgctggcaaccgatctcttttctacgctacagcgtattgttaaccctgatgtgattgacgtaaaccatgatgaatcgagtaattccgctacctga

SEQ ID NO: 75002 - DNA, 462 bp, Citrobacter koseri
atgatgaatcgagtaattccgctacctgacgagcaggcgactttagacctgggactacgcgtagcgaaagcctgtgacggtgcgaccgtcatctatttgtacggcgacctgggggcggggaaaaccaccttcagccggggatttctacaggcgttgggccacaaaggtaatgtgaaaagcccgacctacacgctggttgaaccctatacgctcgataacttaatggtgtatcacttcgatttataccgacttgcggaccctgaggagctggaatttatggggatccgtgattattttgccaacgatgccatttgcctggtggaatggccgcaacaaggtaaaggtgtactgcctgacccggatgtcgaaatacacatagattaccaggcgcaaggtcgtgaggcgcgcattagtgctgtctcctcatcaggtgatttgttgctggcgcgtttggccggttaa

SEQ ID NO: 75003 - DNA, 1398 bp, Citrobacter koseri
gtgctgtctcctcatcaggtgatttgttgctggcgcgtttggccggttaaccttaagggtggcgggatgatttatcgcatcagaaattgggtggtggcaacgctggtcctgctgtgcgcgcaggcgggagccgccagtctctccgatattcaggtatctaacggcgatcggcaggcgcggattacgttcagttttatcggcgatcctgattacgcgttttcgcaagaaggtaaacgtaccgtcgcgctggatatcaaacagaccggcgtgattcagggactgccgttgcagtttagcggcaacaacctggtaaaagcgattcgctccggtacggcgaaagacgcgcagtcgctgcggttggttgtcgatctgacggagaacggtaaaaccgaggctgtgaaacgacagaacggcggtaactataccgtggtctttaccatcaacgccgatacgcctccgccgccacctccaccgcctgtcatcgcaaaacgcgttgagacgccggtggtcgctccgcgtccgactgaacctgcgcgaaatccgtttaaaacaaaccaggatcgcgctaccgctgtcaccagcagcaatacggtaacgcgcccggcagcgcgggcgacatccagtaacggcgacaaagtggtgattgccattgatgccggtcacggcgggcaagaccccggcgctattggccccggcgggacgcgggagaaaaacgtgacgattgctatcgcccgtaagctgcgcacgctgttgaataacgatccgatgttcaaaggcgtattgacccgcgacggggattatttcatctccgtgatggggcgctccgacgtggcgcgtaagcagaacgccaatttcctcgtctccattcatgcggatgccgcgccaaaccgcaacgcgacgggcgcctcggtatgggtgctgtcaaaccgtcgcgccaacagcgaaatggcgaactggctggaagaacatgagaagcagtctgagctgctgggcggcgcgggcgatgtgctggcgaacagccaggctgacccctacttaagccaggcggtgctggatttgcaattcggtcattcccagcgcgtagggtatgatgtggcgacaaacatgttaggtcagttgcagcgcattggttcgctgcataagcgtcgccctgaacacgccagcctcggcgtgttgcgttccccggatatcccctcggtgctggttgaaacgggctttatcagcaacagcggcgaagagcgtttgctggcaagcgatgcttatcagcagcagctggcagaggcgatttaccaagggttgcgtaactacttccaggcgcatccggtgcaatccgggccgcagagcgctccggcgcaaacggccagcgcggtgtcgccgggcgagtcgttgattaactaa

SEQ ID NO: 75004 - DNA, 1860 bp, Citrobacter koseri
atgccgattcaggttctaccgccgcaactggcgaaccaaattgccgcaggtgaggtggtagagcgacctgcgtcggttgtaaaagagctggtggaaaacagccttgatgcaggggcgacgcggatcgatattgatatcgaacgcggcggcgcaaagcttattcgtattcgcgataatggctgtggaattaaaaaagacgagctggcgctggcgctggctcgccatgccaccagtaaaatcgcctcgcttgacgatctcgaagcgattatcagcctcggatttcgcggcgaagcgctggcaagtatcagctcggtttcgcgtttaaccctcacgtcacgtaccgcggaacaggcggaagcctggcaggcctatgccgaagggcgtgatatggacgtgacggtaaaaccggcggcgcatccggtcggcaccacgctggaggtgttggacttgttctacaacacgccggcacggcgcaagtttatgcgcaccgagaaaaccgagttcaatcacattgacgaaattatccgccgcattgcgctggcgcgcttcgacgtcacccttaatttgtcgcacaacggtaaaatggtgcgccagtaccgcgcggttgcgcaggacgggcagaaggaacgtcgattaggcgcgatttgcggcgcaccgtttctggaacaggcgctggcgattgaatggcagcacggcgatctgacgctgcgcggctgggtggccgatcctcaccataccacggcggcgctggcggaaatccagtactgctacgtgaacggccgcatgatgcgcgaccggttaatcaatcatgcgattcgtcaggcctgtgaagacaaactgggtggcgatcggcaaccggcatttgtgctgtatctggagattgacccgcatcaggtggatgtgaacgtgcatccggcgaaacatgaggtgcgtttccaccagtcgcggctggtgcatgatttcatctatcagggcgtattgagcgtgctacagcagcagcttgatgcgccgctgccgctggcggaagaagcgcctgcgccgcgtcatatcccggaaaaccgcgtggcggccgggcgtaatcatttctctgaaccggcctctgcgcgggaacccgccgcgccgcgctattccacgtcgtcaggggcaaccggcgaacgtcagcctgctgccagttggccgcatgcccagccgggctaccagaaacagcagggcgaagtgtaccgccagctgttgcagacgcccgctccgcgacaaccggcgcttgcaccggaagcagaaacggcagcgccgtcgctggcagggcatagccagagtttcggtcgcgtgctgaccattgtcggcgcggattgcgcattgcttgagcgtgacggcaatattcacctgctggcgctgcccgtggcggaacgctggctgcgtcaggcacaactgacgccggggcagacgccggtctgcgcccagccgttgttgattccgctgcgcttaaaagtgtcggcggaggagaaatccgcgctggaaaaagcgcaaacaccactgacggatctggggattgaattccagtcagatgcgcagcatgtgaccattcgtgcagtgcctttacccttacgccaacaaaatttacaaatcttgattcctgaactgataggctacctcgcgcagcagtcagcgtttgacgcgggcaatattgcacagtggattgcgcggaatttgatgagtgaacatccgcagtggacgatggcgcaggccattacgctgttggctgatgtagagcggctatgtccgcagctcgtgaaggcgccgccgggtggtctgttacaacctgttgatttacattcggtgatgaacgccctgaaacatgagtga

SEQ ID NO: 75005 - DNA, 951 bp, Citrobacter koseri
atgagtgatgtaagtaaggcgagcctgccaaaggcgatttttttgatggggccgacggcctccggtaagacagcgttagcaattgaattgcgtaaagttttgccagtagagttgataagcgttgattccgcccttatttatcgggggatggacatcggtacggcgaagccgacggcttcagagttaaaggccgctccgcaccgattgctggatattctcgatccggcgcaagcgtactcagcagcggattttcgccgcgatgcgttagcggaaatggcggagattactgcggcggggcgtattccgctgttagtgggcggcaccatgttgtatttcaaggcgttgctggaaggactttcgcccttaccgtcggcggaacccgaggtcagagcccgaattgagcaacaggcggcagagcagggatgggatgcgttgcaccgacagcttcaggatattgatccggtcgctgccgcacggattcatccaaatgatccgcaaagactttcccgggcactggaagtttttttcatttcgggtaaaactttaacggaactgacgcaaacgtcaggagacgctctaccgtatcaggtgcatcagttcgccatcgccccggcgagccgtgaactgctccatcagcgaattgagcagcgttttcatcagatgttggcttcaggttttgaagcagaagttcgggcgctttttgcccgtggagatttgcatacggatttgccttccattcgttgtgtgggataccgccagatgtggtcatacattgaaggcgaaatttcatatgatgaaatggtttatagaggtgtttgcgccacgaggcagttggcgaagcgtcaggtaacctggttgcgtggttgggaaggagtacgctggcttgacagtgaaaagcctgaccaggcgcgaaacgaagtattgcaggttgttggtgctatcgcgaactga

SEQ ID NO: 75006 - DNA, 309 bp, Citrobacter koseri
atggctaaggggcaatctttacaagatccgttcctgaacgcactgcgtcgggaacgtgttccagtttctatttatttggtgaatggtattaagctgcaaggtcaaatcgagtcttttgatcaattcgtgatcctgttgaaaaacacggtcagccagatggtttacaagcacgcgatttctactgttgtcccgtctcgcccggtttctcatcacagtaacaatgccggtggcggcaccagcagtaactaccatcacggtagcagcgcgcagggtacttctgcgcaacaggacagcgaagaaaccgaataa

SEQ ID NO: 75007 - DNA, 1281 bp, Citrobacter koseri
ttgtttgaccgttatgatgccggtgagcaggcggtactggtacacatctatttttcgcaagacaaagatatggaagacctccaggagtttgagtctctggtctcttccgccggtgtcgaagcaatgcaggtgattaccggtagccgtaaagcaccgcacccgaagtactttgtaggtgaaggtaaggcagttgaaattgcggaagccgtgaaagcgtctaacgctgcggtcgtgcttttcgatcatgctttaagcccggcccaggagcgtaacctggaacgtttgtgtgaatgtcgcgtgatcgacagaaccggtcttattttagatatttttgctcagcgtgcacgtacccacgaaggtaagttgcaggttgaattggcgcagttgcgtcatctggccacgcgtctggttcgtggctggacccaccttgaaaggcagaaaggcgggattggtttgcgcggtccgggtgaaacccagctcgaaaccgaccgtcgtttgctgcgtaatcgtattgtacagatacagtcgcgcctggaaaaagttgagaagcaacgtgagcaggggcggcagtcgcgtataaaagcggatgtcccgacggtctcgctggtgggatataccaacgccggtaaatccacccttttcaatcagattactgaagccagggtgtatgccgcagaccaactgtttgcgaccctggacccgacgctgcgccgtatcgatgtcgcagatgtgggggaaaccgtactggcggataccgtagggtttatccgtcatttaccgcacgatctggtggcggcgtttaaagcgaccttgcaggaaacccggcaggccacgctcttgttacacgttgttgatgccgctgacgtgcgcgtacaggaaaacatcgacgcagtggatacggttctcgaagagatcgatgctcacgagatcccaaccctgatggtgatgaacaagatcgatatgctggacgattttgaaccgcgtatcgacagggatgaagagaacaaaccaatccgtgtctggctttccgcgcaaacagggattgggataccacagctttttcaggctttgacggagcggctttccggcgaggtagcgcagcatacgttgcgtttgccgccgcaggaagggcgtctgagaagccggttttaccaacttcaggcaatagaaaaagagtggatggaggaggacggcagcgtaagtttgcaggttcgcatgccgattgtcgactggcgtcgcctctgtaaacaagaaccggcgttgatcgactatgtgatctaa

SEQ ID NO: 75008 - DNA, 1257 bp, Citrobacter koseri
atggcgtggaatcagcccggtaataacggacaagaccgcgacccgtggggaagcagcaaacctggcggcaactctgagggaaatggaaacaaaggtggtcgcgatcaggggccacctgatcttgatgatatcttccgcaaactgagtaaaaagctcggtggtctgggtggcggtaaaggtacaggctctggcggtggtagttcatcgcaggggccgcgcccgcatatcggaggtcgtgtcgttaccatcgcagcggcagcgatcgtcattatctgggctgccagcggtttctacaccatcaaagaagcggaacgcggcgtggtgacacgcttcggtaaattcagtcacctggttgagccgggtctgaactggaagccgacgtttatcgatgaagttaccccggtgaacgtggaagcggttcgcgaactggcggcgtccggtgtgatgctgacttctgatgaaaacgttgtgcgcgttgagatgaacgtgcagtaccgtgtgaccgatccgcagcgttatctgttcagcgtgaccagcgcggatgacagtctgcgtcaggcgaccgacagcgccctgcgtggggttatcggtaaatacacgatggaccgcattctgacggaaggtcgtaccgttattcgtagcgatacccagcgtgaactggaagagaccattcgtccgtacaacatgggtattactctgctggacgtcaacttccaggcagcgcgtccgccggaagaggtaaaagcggcgtttgacgatgctatcgcggcgcgtgagaacgaacagcaatacatccgtgaagcggaagcgtacaccaacgaagttcagccgcgtgcgaacggtcaggcgcagcgtattcttgaagaagcgcgtgcatacagaacccaaaccatcctggaagcgcagggtgaagtggctcgcttcgctaaaattctgccggaatataaagccgcaccagagattactcgcgagcgtctgtatatcgagacgatggaaaaagtgttgagccatacgcgtaaagttctggtcaacgacaaaggcggcaatctgatggttctgccattggatcagatgctgaaaggcgctaacgcgcctgcggcaaaagacagcacggctaacaatctgctgcgtctgccgccggcttcatcgtccagcacgagcggagcaagcaatacctcgtccaccagtcagggcgatattatggaccaacgccgcgctaacgcgcagcgtaacgactaccagcgtcagggggaataa

SEQ ID NO: 75009 - DNA, 1005 bp, Citrobacter koseri
atgcgtaagtcagttattgcgattatcatcatcgtgctggtagtgctgtacatgtctgtctttgttgtcaaagaaggcgagcgcggaattacgctgcgtttcggtaaagttctgcgtgacgatgaaaacaaaccgctggtttatgagccgggcctgcactttaagatcccgttcattgagtcggtgaaaacgcttgatgcgcgtatccagacgatggacaaccaggccgatcgctttgtaaccaaagagaaaaaagacctgatcgttgactcctacatcaaatggcgcatcagcgatttcagccgttactacctggcgacaggcggcggcgatgtttctcaggccgaagtgctgctgaaacgtaagttctctgaccgtttgcgctctgagattggtcgtctggatgtgaaagacatcgtgaccgattcccgtggccgtttaacgctggaagtgcgtgacgcgctgaactccggttctgcgggaacggaagatgaagtggcgactccggcggcggatagcgcgattgccgaagcggctgaacgcgttgcggcagaaaccaatggcaaagtgccggtgatcaacccgaacagtatggcggcgttaggtatcgaagtggtggatgtgcgtatcaagcagatcaacctgccgaccgaggtatccgaggcgatttacaaccgtatgcgcgctgagcgtgaagcggtagcccgtcgtcaccgttcacagggtcaggaagaagcggagaaactgcgcgcgaccgccgactatgaagtgaccagaacgctggcggaagccgagcgtcagggccgcatttcgcgtggtgaaggtgatgccgaagccgcgaaactgtttgccgatgccttcagtcaggacccggacttctacgccttcatccgtagcctgcgtgcttacgagaagagcttcgaaggcaatcaggacgtgatgatcatgagcccggacagcgatttcttccgttacatgaagacaccgaatacggcaacacgttaa

SEQ ID NO: 75010 - DNA, 198 bp, Citrobacter koseri
atgaattcaactatctggctggcgcttgccctcgttttggtgctggaaggtttaggcccgatgctgtatccccgcgcctggaagaaaatgatctctgccatgacgcaactgccggaaaatgttttacgtcgttttggcggcggtcttgtggttgccggagttgttgtctactacatgttgaggaaaacgattggctga

SEQ ID NO: 75011 - DNA, 1299 bp, Citrobacter koseri
atgggtaacaacgtcgtcgtactgggcacccaatggggtgacgaaggtaaaggaaagatcgtcgatcttctgactgaacgggctaaatatgttgtacgctaccagggcggtcacaacgcaggccatactctcgtaatcaacggtgaaaaaaccgtcctccatcttattccatcaggtattcttcgtgagaatgttaccagcatcatcggtaacggcgttgtgctgtctccggctgcgctgatgaaagagatgaaaggactggaagaccgtggtatccctgtccgtgagcgcctgctgctgtctgaagcctgtccgctgatccttgattatcacgttgcgctggataacgcgcgtgagaaagcgcgtggcgcgaaagcgatcggcaccaccggtcgtggtattggcccggcttatgaagacaaagtggctcgtcgcggtctgcgcgttggcgatctgttcgataaagctaccttcgctgtaaaactgaaagaagtgatggaatatcacaacttccagctggtgaatttctacaaagtggaagccgttgactaccagaaagtgctggatgatgtgatggcaatcgccgacatcctgacctctatggttgttgatgtttccgatctgctggaccaggcgcgtaagcgtggcgatttcgtcatgttcgaaggcgcgcagggtacgctgctggatatcgaccacggtacttatccgtacgttacctcctctaacaccactgcgggtggcgtagcgaccggttctggcctggggccgcgttatgtggactacgttctgggtatcatcaaagcttactccactcgcgtgggcgcgggtccgttcccgactgagctgtttgatgacaccggcgagttcctgtgcaagcagggtaacgaatacggcgccaccaccggtcgtcgtcgtcgtaccggctggctggactccgttgctgtgcgccgtgcggtgcagatcaactccctgtctggcttctgcctgaccaaactggacgtgctggacggcctggaagaggtgaaaatctgcgtggcttaccgtatgccggatggccgtgaagtaaccaccacaccgctggcagcggatgactgggaaggcatcgagccgatctacgaaaccatgccgggttggtctgagtccacctttggcgtgaaggatcgcagcggcctgccgcaggcggcgctgaactacatcaaacgtatcgaagaactgaccggcgtgccgattgatattatttctaccggcccggatcgtactgaaacgatgattctgcgtgacccgtttgacgcataa

SEQ ID NO: 75012 - DNA, 426 bp, Citrobacter koseri
gtgcagttaacgagtttcaccgattacggattacgtgcgctaatctatatggcgtcgctacccgaaggacgtatgaccagtatttctgaggtgacagaagtctacggcgtgtcccgtaatcatatggtcaaaataatcaatcaacttagccgggcgggcttcgttactgctattcgaggaaaaaatggcggtatccgcctgggtaaaccggctaatgttattgttatcggtgatgtggttcgtgagctggaacctttatctctggtaaattgcagcagcgaattttgccacattactcctgcctgccgactcaagcaggcactttcgaaggccgtgcaaagttttctcaaggaactggataactacacgcttgccgatttggttgaagagaatcaaccgctttataaattattgctggtggagtga

SEQ ID NO: 75013 - DNA, 2433 bp, Citrobacter koseri
atgtcacaagatcctttcctggaacgtgaagctgaaaaatacgcgaaccctatcccgagccgggaatttatcctcgaacatttaacaaaacgtgaaaaaccagccaaccgtgatgagttggctgtggaactgaatattgaaggtgaagagcagcaggaagccctgcgccgccgtctgcgcgcgatggaacgcgacggacaactggtcttcacccgccgccagtgctatgcgctgccggaacgcctcgacctgctgaaaggtaccgttatcggccaccgtgatggctacggctttttgcgtgtcgaaggacgtaaagatgacctgtatctctccagtgagcagatgaaaacctgcattcatggcgatcaggtactggcgcagccgctgggggccgatcgtaaaggccgccgcgaagcgcgtatcgtgcgcgttctggtgcctaaaaccagccagattgtcggtcgttactttaccgatgcgggcgtgggctttgtggtgccggacgatagtcgtctgagcttcgacatcctgatcccgcctgaagaggtgatgggtgcgcgcatgggctttgtggtggtggtggaactcacccagcgcccgacccgccgcactaaagcggtcggtaaaatcgttgaggttctcggcgataacatgggcactggcatggctgtcgatatggcgctgcgcacccatgaaattccttatatctggccgcaggcggtagaacagcagatcgccggcctgaaagaagaagtgccggaagaggcgaaagcaggccgcgtggatctgcgcgacttaccgctggtgacgattgatggcgaagacgcccgtgactttgacgatgcggtttactgcgagaagaaacgcggtggcggctggcgcctgtgggtggctatcgctgacgtaagttattacgtgcgtccgccaacgccgctggatcgcgaagcgcgcaaccgtgggacgtcggtctattttccgtcgcaggttgtgccgatgctgccggaagtgctctccaatggcctgtgctcgctgaacccgcaggttgaccgcctgtgtatggtctgcgaaatgaccgtttcatcaaaagggcgtttaaccggctataaattctacgaagcggtgatgagttctcatgcgcgcctgacgtataccaaagtctggcatatgctacagggcgaccaggacctgcgcgagcagtatgcgccgctggtcaggcacatcgaagagctgcataacctctacaaagtgctggataacgcccgcgaagagcgtggcggcatctcatttgaaagcgaagaagcgaagtttatcttcaatgctgaacgtcgcattgaacgtatcgagcagacgcagcgtaatgacgcacacaagctgatcgaagaatgcatgattctggcgaatatctcggcggcgcgattcgttgagaaagccaaagagcctgcgctgttccgtattcacgacaagccgagcaccgaggcgattacctccttccgttccgttctggcggagctggggctggaattgccgggcggcaataagccggaaccgcgtgattatgcggagctgctggagtcgattgccgacaggcctgacgcggaaatgctgcaaactatgctgctgcgctcaatgaaacaggcaatttacgatccagaaaaccgtggccactttggtctggcattgcagtcttacgcgcactttacctcgccgatccgccgttatcctgacctgtcgctgcaccgcgccattaagtatctgctggcgcatgagcaagggcataagggcaacacgacggaaacgggcggctaccactattcgatggaagagatgctgcaactgggccagcactgttctatgaccgagcgccgtgctgacgaagccacgcgtgacgtctctgactggctgaagtgtgacttcatgctggatcaggtggggaacgtctttaaaggggtgatttccagcgtaaccgggttcggcttctttgttcgtctggatgagctgtttattgatggtctggtacacgtctcttcgctggacaacgattactaccgtttcgatcaggtagggcagcgtctgatgggggaatccagcggccagacctaccgtctgggcgaccgcgtggaagtccgcgtcgaagcggtcaatatggatgagcgtaaaattgactttagcctgatctccagcgaacgcgccccgcgcaacgtcggtaaaaccgcgcgtgagaaagcgaaaagaggcgaaacggctaaaaatgccggtaagcgtcgtcaggtgggcaaaaaggtgaatttcgaaccggatagcgccttccgcggcgagaaagcgaaaggtaaggcgaagaaagagaagaaagccaaaaatccatcggcaaagacgcagaaaatcgctgccgcgacaaaagcgaagcgcgcggcgaagaaaaagtcagctgagtaa

SEQ ID NO: 75014 - DNA, 732 bp, Citrobacter koseri
atgagtgaaatgatttacggcatccacgcggtgcaggctctgctggaacgtgcgccagagcgctttcaggacgtctttattctgaaagggcgggaagataaacgcctgctgccgctgatccatgcgctggaagcgcagggcgtggtgatccaactggcgaaccgccagtatcttgatgaaaaaagcgagggtgcggtacatcaggggatcattgcgcgcgtgaagccgggacgccagtatcaggaaaacgatcttcctgatctgatcgcgaagttcgacaatcccttcctgctgatcctcgacggcgtgaccgatccgcataacctcggcgcctgtctgcgtagcgcagacgccgctggcgtacatgcggtcattgtgccgaaagatcgttctgcacagcttaatgcaacggcgaaaaaggtggcctgcggcgcagccgaaagcgtgccgctgatccgtgtgaccaacctggcgcgtaccatgcgtctgttgcaggaagagaatatctggattgtcggtacggcgggcgaagctgaccatacgctgttccagagcaaaatgaccggccggatggcgctggtgatgggcgctgaaggcgaagggatgcgtcgtctgacccgcgagcactgtgatgagctgatcagcattccgatggcgggcagcgtgtcgtcgctgaacgtctccgtcgcgaccgggatctgcttgtttgaagcggtgcgacagcgcagctaa

SEQ ID NO: 75015 - DNA, 1623 bp, Citrobacter koseri
atgcactggcaaacgcataccgtttttaaccaaccggcaccgctcaacaacagcaatttattcctgtctgatggcgcgctttgcgaggcggtcgcccgtgaaggcgcgggctgggacagcgatcttctcgccagcatcggtcaacaattgggcactgcggagtcgctggagctggggcggctggcgaacgcctttccacctgaactgctacgttacgatccacaagggcagcggctggacgatgttcgttttcatcccgcctggcatctgctgatgcagggcctgtgcgctaaccgtgtgcataatttggcctgggaagagaacgccagacagggggcatttgtcgcgcgggctgcgcgttttatgctgcatgcgcaggtggaagcgggtacgttgtgtccagtcacgatgacttttgccgccacgccgctgctgctacagatgctgccatcccccttccacgactggttaacgccgttacgcagcgatcgctatgattcacacctcctgcccggagggcaaaaacgcggcctgctgattggcatgggcatgacggaaaagcagggcggctccgatgtgctgagtaacaccacccgggcagagcgactggacgatggcgcctggcgcctggtggggcacaaatggtttttctccgtgccgcaaagcgacgcgcacctggtgctggcgcagacgaaaggcggattatcctgcttttttgtcccgcgttttttgcctgacgggcagcgaaacggcgttcgccttgagcggttgaaagacaaactgggcaaccgctctaatgccagttgcgaggttgagtttcaggatgcggtaggctggctactgggtgaggaaggcgaggggattcgtcacatactgaagatgggagggatgacccgctttgattgcgcgttgggcagtcatagtatgatgcgccgggcgttttccgtggcgatttaccacgcgcatcagcggcaggtgttcggcaagtctttgattgatcagcccatgatgcggcaggttttaagtcgtatggcgctccagcttgaaggccagacggcgctgctgtttcgtctggctcgggcgtgggatcgtcgtggcgacccgaaagaagcgctccgggcgcgtttgtttacgccagccgcgaagtttgctatttgcaaaagtggcatcccctttgttgccgaggcgatggaagtgctcggtggcgttggctattgcgaggagagcgagctaccgcgcctgtatcgtgagatgccggtcaacagcatctgggaagggtcgggaaacgtcatgtgtctggacgtgctgcgggtgctgagtaaacagaccggcgtctatgagctgctcaacgaggcttttgcggaggtcaaagggcaggatcggcattatgatcgggcggtacgtcagctgcaacagcgcttgcgcaaacccgatgaagcgcagggacgggagataacgcagcagctgttcctgctcggttgcggggcgcaaatgctgcgctatgcttctccgccgttggcacaggcctggtgccaaatgatgctggacacgcgcggcgtgttacgcctgtctgaacaggtgcaaaatgatctgttgctgcgggcaacggggggattgcgataa

SEQ ID NO: 75016 - DNA, 276 bp, Citrobacter koseri
atgaaacgatctcttgccttatcctcactgctgctttctgccggtctggtgagtacgacggcgcagtctgccgaattcgccagcgcggactgcgtaacgggcctgaatgaaattggtctgatatccgtgagtaatatttcgggaaatcagcaggatgtggaacgtatcattgcgttaaaagccgatgagcagggcgcttcgtggtatcggattatccagatgtacgaagaacagcagcccgataactggcgcgtacaagccatactttatgcgtaa

SEQ ID NO: 75017 - DNA, 303 bp, Citrobacter koseri
atgcgacggttcgccccattgatgctggtactgtttttaagcgcctgtagcgtattgcaagggacgccgcaaccagcaccgccagtcgctgaccatcctcaggaaattcgccgtgaccagacacaagggttgcagcgcctgggaacggtaagctcaatggttcggggttctcctgacgatgctgtggcagagatcagagcgaaagccgccgccgctaaagcagattattacgttattttgttggttgatgaaaccatcgtaacaggccaatggtattcgcaagccatcctgtatcgtaaatag

SEQ ID NO: 75018 - DNA, 750 bp, Citrobacter koseri
atgataaaaatagaaacacggtacctggcaggacattccatactccacgcgtttcctgacggtaaacgtgacacgccccttccatgtattattttttaccacggttttacctcttccagcctggtctatagctactttgcggttgctctggcgcaggccgggttccgggttatcatgccggatgcgcccgagcatggcgcgcggtttagcggtgatgcgcaggggcgaatgacccaattctggcagattctgcggcaaaacatgcaggaattcgctgcgttacgtgcggcagttcaacaggaaaactgggtgctggaagaacgtctggccgtggggggcgcatcaatgggcggtatgacagcgctggggatcatggcccgccacccggaggtaaaatgcgtcgccagcctgatgggggcgggttatttcacccgactggcgcatacgctttttccgccattaattcctgagacgcctgagcaacagcgagaatttgacgacatcattgctcccctggctgagtgggaggtggcgcatcagttgccaaaactggccgaccggccgctgctgctatggcatggacaggaagatgacgtcgtccctgcggtggaaacgttccgcttacaacaggcgctgattcaggcgaacagggatcagaacctgacctgtctgtgggaagcaggcgtacgccaccgtattacgccagaggcgctggcggcaacggtgtcgtttttccgccagcatctttaa

SEQ ID NO: 75019 - DNA, 756 bp, Citrobacter koseri
atgactgaagcacaaagacatcaaatattgctggatatgctggcgcaattgggctttgttaccgtcgagaatgtgatcgaacgtctggggatctccccggccacggcgcgtcgggatatcaacaagctcgatgagagcggaaagctcaaaaaagtgcgtaatggcgccgaagcgatcgctcagcaacgtccgcgctggacgccaatgaatctgcatcaggcgcagaaccacgatgaaaaagtgcgcattgctaaagcggcagcgcaactggtgaatcccggggaaagcgtggtgatcaactgtggatcgaccgcctttctgctgggcagagaaatatgcggtaagccggtgcagatcatcaccaactatctcccgctggcgaactatctgatcgatcaggaacatgaaagcgtgatcatcatgggaggtcagtacaacaagagccagtccatcacgcttagcccccagggcagcgaaaacagcctgtatgccgggcactggatgtttaccagcggcaaaggcctgaccgcagacggtctgtataaaaccgatatgctcaccgctatggccgagcagaaaatgctcagcgtggtcgggaagctggtggtgctggtggatagcagcaagatcggcgagcgcgcaggcatgttgttcagccgcgccgatcaaatcgacacgctgattacgggcaaaaatgctaaccctgacattctgcaacagcttgaagcgcaaggcgttagcattctgcgcgtttaa

SEQ ID NO: 75020 - DNA, 1065 bp, Citrobacter koseri
atgagtaaagtgaaaagtatcacgcgtgaatcatggatcctgagcacctttcctgagtggggaagctggctgaatgaagagatcgaacaggaacaggtcgcgcccggcacatttgctatgtggtggctcggttgcaccggcatctggctgaaatcagaaggcggcaccaacgtatgcgttgatttctggtgcggcaccggcaaacaaagccacggcaatccgttgatgaaaacgggccatcagatgcagcgcatggcaggggtgaagaaattgcagccgaacctgcgcaccacgccgtttgttctcgatcctttcgcgattcgccagatcgatgccgtgctggccactcacgatcataacgatcatatcgacgtcaacgtcgccgcagcggtgatgcaaaactgcgctgacgatgtgcctttcatcggaccgcaaacctgcgttgacctgtggattggctggggcgtgccgaaagagcgctgcatcgtggtcaaaccaggcgatgttgtaaaagtgaaagacatcgaaattcatgcgcttgatgcgtttgatcgtactgcgctcatcacgcttccggccgatcaaaaggcggcgggcgtactgccggacggcatggatgcgcgcgcggtgaactacctgttcaaaacgccgggcggtacgctgtatcacagcggcgactcccactactccaactactatgcgaagcacggcaatgagcatcagatcgacgtggcgctcggctcctatggcgagaacccgcgtggcatcaccgacaagatgaccagcgccgacatgctgcgtatggcggaagcgctgaacacgaaagttgtgattccgttccaccatgatatctggtcgaacttccaggccgatccgcaggaaatccgcgttctgtgggaaatgaaaaaagatcgcctgaagtatggcttcaagccgtttatctggcaggttggcggtaagttcacctggccactggataaagacaactttgaatatcactacccgcgtggttttgatgactgcttcacgatggaaccggatttaccgttcaaatccttcctgtaa

SEQ ID NO: 75021 - DNA, 1398 bp, Citrobacter koseri
atggagatcctctacaacatctttaccgttttctttaaccaggttatgaccaatgctccgctgctactgggtattgtcacctgtctgggctatatcctcctacgcaaaagtgtcagcgttattatcaaaggtacgataaaaaccattattggtttcatgttattacaggcagggtccggcatcctgaccagtacctttaagcccgtcgtggcgaagatgtctgaggtgtatggcatcaacggcgcgatttctgatacttacgcctccatgatggcgacgatcgagcgcatgggcgacgcctacagttgggtcgggtatgccgtgctgttagcgctggcattgaatatcggctacgtgctgctgcgccggattaccgggattcgcaccatcatgcttaccgggcatatcatgttccagcaggcggggctgatcgcggtgttcttctacatcttcggttatccgatgtggaccaccattatctgcacggcggttctggtgtccctgtattgggggatcacctccaatatgatgtataagccgacgcaggaagttacagacggctgtggtttctccattggtcaccagcaacagtttgccgcatggctggcgtataaagtcgcgccatatctcggtaaaaaagaagagagtgttgaagatctcaaactgcccggctggctgaatatcttccacgacaatatcgtctccacggcaattgtcatgaccatcttcttcggcgcgatcctgctctcttttggcctggatgtggttcaggcgatggcgggtaaaacgcactggtctatctatatcctgcaaaccggcttccagttcgccgtcgctattttcatcatcacgcagggcgtgcgcatgtttgtcgccgaactgtccgaagcatttaacggtatctctcagcgtctgatccccggtgctgtgctggcgattgactgtgcggcgatttatagcttcgcgccgaacgcggtggtctggggctttatgtggggcacgattggtcagctgatcgccgttggtattctggtaggttgcggctcctccattctgatcatccctggctttatcccaatgttcttctctaacgccacgattggcgtgttcgctaaccactttggcggctggcgcgcggcgctcaagatttgcctggttatgggcatgatcgaaatctttggctgcgtctgggcggtgaaactgaccggtatgagcgcctggatgggaatggcggactggtcgattctggcgcctccgatgatgcaaggcttcgtcagcgtcgggctgatgtttatgagcgtcatgatactgatttcactggcttatatgttcttcgcagggcgcacattgcgcgctgaagaagatgcagaaaaacaactggcagaacactctgcttaa

SEQ ID NO: 75022 - DNA, 306 bp, Citrobacter koseri
atgaccgtacgtattctggctgtttgtggttgtgggcaaggcagttcaatgatcatgaaaatgaaagttgaccagtttctgacgcagcagggcgttgcgcacacggtaaatagttgcgcggtgggtgagtacaaaagtgagctgaacggtgcggacatcattattgcctcgacgcacgtcgccagcgaaatcaccgtttccggtaataaatatgtggtgggtgtgcgcaatatgctttccgccgctgattttggtccgaaactgatggaagtgatcaaagagcactttccgaacgacctgaaataa

SEQ ID NO: 75023 - DNA, 468 bp, Citrobacter koseri
atgaaattacgtgattcgctggcggagaataagtccattcgcctgaatgcagaagcgagcacctggcaggaggcggtgaaaatcggcgtagacctgctggtggaagcagatgttgtggagccgcgttactaccaggccattcttgatggcgtagagcgttttggtccgtattttgtgattgcgccaggcctggcgatgccgcatggccgcccggaagagggcgtcaaaaaaaccggcttcgcgctggtgacgctgaaaacgccgatggtcttcaaccacgaagataatgacccggtcgatatcctcatcacgctggcggcagtggatgcccgcgcgcatcaggaagacggcattatgcaaatcgtcaacctgtttgaagatgaagccaactttgaccgtttacgcgcctgccgtaccgagcaggatgtgctggatttaattgataacgccactgcggcggcagtttaa

SEQ ID NO: 75024 - DNA, 651 bp, Citrobacter koseri
atgtcattacctatgttgcaagttgcgctggataaccagacgctgtcccacgcttacgaaacgacccgcctgatcgcggaagaagtcgatattatcgaagttggcaccatcctgtgcgtgggtgaaggcgtacgtgcggtacgcgatctgaaagcgctctatccgcataagatcgtgctggctgacgccaaaattgcggacgcggggaaaattctttctcgtatgtgctttgaagccaacgcggattgggtgacggttatctgctgcgcggatatcaacaccgccaaaggcgcgctggaagtggcgcaagagtttaacggcgatgtgcagattgaactgaccggctactggacctgggagcaggcgcaggagtggcgtgatgcggggattcagcaggtggtttatcaccgtagccgtgatgcacaggccgctggcgtggcctggggcgaagcggatatcagcgcgatcaaacgtctctctgatatgggctttaaagtgactgtgaccggcggcctggcgctggaagacctgccgctgtttaagggcattccaatccatgtctttattgccggtcgcagcattcgcgacgccgcctctccggttgaagccgcgcgtcagttcaaacgttctatcgcccagttgtggggataa

SEQ ID NO: 75025 - DNA, 855 bp, Citrobacter koseri
atgttgtctaaacagactccgcttggcatctacgaaaaagcgctccccgccggggagtgctggttggatcgcctgcggctggcgaaagaactgggcttcgatttcgttgaaatgtctgtcgatgaaaccgatgcccgcctggcgcgcctcgactggaaccgtgagcagcgcctggcgctggtgagcgctatcgcggagaccggcgtgcgggtgccgtccatgtgtctgagcgcgcatcgtcgctttccgttgggctgcgaagatgatgctgtacgtgcgcaagggctggagatcatgcgtaaagccattcagtttgcgcaggatatcggtattcgcgtcatccagcttgcgggttacgacgtgtactatcaggaggccaacaatgaaacgcgccgtcgttttcgtgatgggctgaaagagagcgtcgagatggcaagccgtgctcaggtcacgctggcgatggagatcatggattaccctctgatgaactccatcagcaaagcgctgggttatgcgcactatcttaataacccgtggttccagctttatcctgatatcggcaacctgtcagcctgggataacgatgtgcagatggagttgcaggctggaatggggcatatcgtcgcggttcatgtcaaagatacgaagccaggcgtgttcaagaacgtgccgtttggtgaaggtgtcgttgattttgaacgctgtttcgccacgctcaagcagagtgggtattgcgggccatacctgattgagatgtggagtgaaacgtcggacaatccggcgcgtgaggtggcgaaagcgcgtgattgggtgaaagcgcgtatggccagcgccggtctggtggagacagcataa

SEQ ID NO: 75026 - DNA, 687 bp, Citrobacter koseri
atgcaaaaactcaggcagcacgtttttgaagccaatatggatttgccgcgttatggcctggtgactttcacctggggcaacgtcagcgcgatcgacagggagcgcgggctggtggtcattaagcctagcggggtggcttatgaaaccatgaaagcggacgatatggtggtggtggatctccagggcaatgtggtggaagggcagtggcggccttcttccgataccgccacgcatctggcgctgtaccgtcgttacccttcgctgggcggcatcgtgcacacgcactctacgcatgccacggcgtgggcgcaggcagggctggcgatcccggcgctgggcacgacccatgcggactacttctttggcgatatcccctgtaccagggcgttaaccgaagaagaagtgcagggtgaatatgagctgaacaccggtcatgtgattatcgaaacgctgggtgacggtcagccgctgcatacgcctggcgtcgtggtgtatcagcacgggccgtttgcctggggcaaagatgcgcatgacgccgtgcataatgcggtggtgatggaagaagtcgcgcggatggcatggattgctcgtggtatcaatccggcgctcagcccgatcgacgattatttaatgaataaacattttatgcgtaagcatgggcctgacgcctattacggacaaaagtaa

SEQ ID NO: 75027 - DNA, 276 bp, Citrobacter koseri
atgcgagcgcgtgttatgacccttctggctgcgcttttgctcagtgcaaacgcgatggcagccatcaaaatcgataatcaccaggcacgaaatatggatgatgtgcagagcttaggcgtgatttatataaaccataacttcgccactgaaagtgaagcagatcaggcattgaatgaagagacagatgcgcgaggcgcaacgtactaccacgcaattctgacccgggagccgggaagtaacggcaacatgcgcgccagcgcggatatttatcgctag

SEQ ID NO: 75028 - DNA, 396 bp, Citrobacter koseri
atgcgtcattacgaaatcgtttttatggtccatcctgaccagagcgaacaggttccgggcatgatcgagcgctacactggtgcaatcactggtgcagaaggcaagatccaccgtctggaagactggggccgccgtcagctggcttacccgatcaacaaactgcacaaagctcactacgttctgctgaacgttgaagcgccgcaggaagtgatcgatgagctggaaactaacttccgcttcaacgatgccgttatccgtagcatggtaatgcgtactaagcacgctgttaccgaagcatctccgatggttaaagcgaaagacgagcgccgtgagcgtcgcgatgatttcgcaaacgaaaccgcagatgatgcagatgctggggattctgaagagtaa

SEQ ID NO: 75029 - DNA, 315 bp, Citrobacter koseri
atgaccaaccgtctggcgttgtccggcaccgtgtgcaggatgccccttcgaaaggtcagtccatcaggaattccgcactgccagttcgtgcttgagcatcgttctgtgcaggaggaagccgggtttcaccggcaggcgtggtgtcaaatgcccgttattgttagcggacacgaaaaccaggccattactcacagtataacggtcggcagccgcataaccgttcaggggttcatctcttgccacaaggcaaagaacggcctgagcaaaatggttctgcatgccgagcagattgaattgatagattctggagactag

SEQ ID NO: 75030 - DNA, 228 bp, Citrobacter koseri
atggcacgttatttccgtcgtcgcaagttctgccgtttcaccgcggaaggcgttcaagagatcgactataaagatatcgctacgctgaaaaactacatcaccgaaagcggtaagattgtcccaagccgtatcaccggtacccgtgcaaaataccagcgtcagctggctcgcgctatcaaacgcgctcgctacctgtccctgctgccgtacactgatcgtcatcagtaa

SEQ ID NO: 75031 - DNA, 450 bp, Citrobacter koseri
atgcaagttattctgcttgataaagtagcaaacctgggtagcctgggtgatcaggttaacgttaaagcgggctacgctcgtaacttcctggtaccacagggtaaagctgttcctgctaccaagaaaaacgttgagttcttcgaagcacgtcgcgctgaactggaagctaaactggctgacgttctggctgctgcaaatgcacgcgcagagaaaatcaacgccctggaaaccgtaaccatcgcgtccaaagctggcgacgaaggtaaactgttcggttccatcggtactcgcgacatcgctgacgctgtaacagcagcaggcgttgaagtggctaagagcgaagttcgtctgccgaacggcgttctgcgtaccactggtgagcacgaagtgaacttccaggttcacagcgaagtattcgctaaactgactgtaaacgtagtagctgaataa

SEQ ID NO: 75032 - DNA, 930 bp, Citrobacter koseri
atggagataacccaccagcagcccctgttcgcgcgtaaaaacgttgtctatctgggggcggcattttgttgtctgttatggggaagcgcctacccggcgataaaaagcgggtacgagatctttcagattgcgacagatgatatcccgtcaaaaattgtctttgccggataccgtttcttgttcgcggggttattgctgctgttgctggcgatggcgcagcgtaaaccgatcggccgcttaagcccgcgccagtttggtcaactgaccctgctggggctgacgcaaacctcgctgcaatatatctttttctatatcggtctggcgttcaccacgggcgtgaaaggatcgatcatgaatgccacaggcactttttttagcgtgctgctggcgcacttcatctaccagaacgacaaactgagctacaacaaaaccctcggctgtattcttggctttgccggggtgatggtggtgaacttcaacagcgggctgatggatttcagctttagcctgttgggtgatggctccgtggtgctggctgcttttattctttctgccgcgaccctttacggtaaacgtatttcgcagacggttgacccaacggtgatgacgggctatcagcttggcatcggcggcctggcgctggtgattggcggctatgccttcggcggctcgctctccgtgcacggcctcgcttctgtggcgattctgggctatctgacgctgctctcgtctgttgcttttgcgctgtggagtattttgctcaagtacaaccgcgtcgggatgattgcgccgtttaacttcctgattccggtttccggtgcggtgctgtcggcgattttcctcggcgaaaacatttttgaattgaaatatgcggttgcgctggtgctggtgtgttcggggatctggtgggtgaacaaggtgaagcggtaa

SEQ ID NO: 75033 - DNA, 651 bp, Citrobacter koseri
atgcccgggcgctttgaactaaaaccaaccctggcgaaaatctggcatgcaccggacaattttcgcatcatggacccgctgccgcctatgcatcgccgtggcattattattgccgctatcgtgctggtggtcggttttctgcttccctcgaatgatacccgcgatacgcccgtcgtcacgcgtaatgtccagacagatatccagtcacagtcgcaaccgccgacggaagccgaacttcaggcgcaactggtcgccccgcaaaacgatccgggacaggtcgcccccgtagcgccggaacccatccaggaaggtcaaccggaagagccgccgcagacgcagcaatcccagccgcaaacacagcctttccagcagaacgggggaattgaccagcagtggcgctcctatcgcgtggagtcaggtaaaacgctggcgcagttgttccgtgaccacggcctgccgccaacggacgtttacgcgatggcgcaggttgaaggcgcaggcaagccgctgagcaatctgaaagatggccagatggtgcagatccgccagaatgcgaatggcgtggtgacaggattgaccatcgataccggtaatgaccaacaggttctgtttacccgtcagccaaacggcagctttattcgcgcccgttaa

SEQ ID NO: 75034 - DNA, 621 bp, Citrobacter koseri
atggcaaccccgacttttgacactatcgaagcgcaagcaagctacggcattggtttacaggtagggcagcagctgagcgaatccggtctggaaggtctgttgcctgaagcgctggtggcaggtatcgctgatgcgctggaaggcaaacacccggcagtgcctgttgatgtggtgcatcgcgcgctgcgtgaaattcacgaacgtgcggatgccgtacgtcgcgaacgtttccaggcaatggcggcagatggcgtcaaatatctggaagaaaaccgtgagaaagagggtgtgaacagcaccgaatccggtctgcaattccgcgtgatcacccagggtgaaggcgcgattccggcgcgtactgaccgtgtacgcgtacactacaccggcaaactgatcgacggcaccgtctttgacagctccgttgcgcgcggtgaaccggctgaattcccggtgaacggcgtgatcccaggctggattgaagcgctgaccctgatgccggttggttccaaatgggaactgactatccctcaggaactggcctacggcgagcgtggcgcgggcgcgtccattcctccgttcagcactctggtgtttgacgtagaactgctggaaatcctgtaa

SEQ ID NO: 75035 - DNA, 1410 bp, Citrobacter koseri
atggtagatcaggtaaaagtcgttgccgacgaacaggcaccggctgaacagtcgctacggcgcaatctcacaaaccgtcatattcagcttattgcgattggcggcgccatcggcaccggcttatttatgggttccggtaaaacgatcagcctcgccgggccgtcgatcattttcgtttatatgatcatcggttttatgctctttttcgtcatgcgggcaatgggtgaattgctgctctcgaatctggaatataaatccttcagtgatttcgcttccgacctgctcgggccgtgggcgggatatttcaccggctggacttactggttctgctgggtggtcaccgggatggcggacgtcgttgcgattaccgcctatgcgcagttttggttccccggcctttccgactgggtcgcctcgctggcggtcgttgttctgctgctgagccttaaccttgcgaccgtgaaaatgttcggcgagatggagttctggtttgcgatgatcaagattgtcgccatcgtggcgctgatcgtcgtcggtctggtgatggttatgatgcacttcaaatcaccgaccggggttgaagcgtcgtttactcatctgtggaatgatggcggctggttcccgaaagggatcagcggcttctttgcgggcttccagatagcggtattcgcgttcgtggggattgagctggtgggcaccaccgccgcagagaccaaagacccggagaaatccctgccgcgcgcgattaactcaattccgattcgtatcatcatgttctacgtttttgcgctgatcatcattatgtcggtcacgccgtggagctcggtagtaccaaccaaaagcccgtttgttgagctgtttgtactggtaggactgccggccgccgccagcctgattaacttcgtggtgctgacgtctgcggcctcttccgccaacagcggcgtgttttctaccagccgtatgctgtttggtctggcgcaagagggcgtggcgccgaaagcgttcgctaaattgtctaagcgcgcggtgccggcgaaagggctgaccttctcctgtatctgtctgctgggcggcgtggtgatgctgtacatcaatccgagcgtgattggcgcgttcaccatgatcacgacggtgtcggctattctgttcatgtttgtctggaccatcattctctgctcgtacctggtgtaccgtaagcagcgtccgcacctgcatgagaagtccatctataagatgccgcttggtaagctgatgtgctgggtgtgtatggcgttcttcgtctttgtgctggtgctgctgacgctggaagatgatacccgtcaggcgctgatcgtcacgccgctgtggtttattgcgctggggctgggctggctgtttatcggtaagaaacgtatggcgggagtgcgttaa

SEQ ID NO: 75036 - DNA, 663 bp, Citrobacter koseri
atgtcttttcgcgatcaacctttaggtgaactggcgctctctattcctcgcgcctcggcgctgtttcgtaagtacgatatggattactgctgcggtggtaagcagacgctcgcgcgcgctgctgcacgtaaagagctggatgtagaagccattgaagcagaactggcacagttggctgaacaaccgattgagaaggactggcgtaccgcgccgttggccgaaattatcgaccacattatcgtgcgctaccacgacagacaccgtgagcagctgccggagctgatcctgcaagccaccaaagtggaacgcgttcacgcagacaaacccagcgtaccgaaaggtctggcgaaatacctgactatgctgcatcaggaactttccagccacatgatgaaagaggagcagatcctgttcccgatgatcaaacaaggcatgggaagccaggcaatgggcccgattagcgtcatggaaagcgaacacgatgacgctggcgaattgctggaagtgatcaaacacaccaccaacaacgtcacgccgccgccagaagcctgcaccacctggaaagcgatgtacaacggcattaatgaaatgattgacgatctgatggaacacatcagtctggaaaacaacgtcttgttcccgcgcgcactggccggggaatga

SEQ ID NO: 75037 - DNA, 1554 bp, Citrobacter koseri
atgttcaaacgaatcaaagttataaccttactgattatcgtgttactcgccctcggcgcgatgcagcttatttcggcgggcgtttttatcagcgcgctcaataacgataagcaaaattttactgtatcgcagcgttccagccagaacgtcgcggagtttaccgatgcctggatcagcctgaaccaggcgcgcgtcacgcttaaccgcggcatgttgcgcctgcaaagcagcatggccaatgagatcaacggcggtcagctaaatgaactggtgaagacggcgaatgccctgctggctgatgcgcagcgtcattacgataaatattacgcgctgccagaaacgccggggctggatgaacacctggccgaccgtctggaagagcagtacggcatctactccgcgacgctggcgaaaatgaataccttccttgccgcaggacaactggaagagatgttcaaacagaatgcggaacaaaaacagacggcgatgcaggacgtgtacctggaatggcgtgccgcgcaggccgaactgacgaacgcgggcattcaacaaaatgaacaggactaccagcgcattctgtggattctggcggccgttatgctggcggttgtcgcggtgatcgtgattagctggctggcaatgcagcgtgtcttacttaaaccgttgcatgatgttatggaacatatccgccatattgcggcaggcgacctgacgcgcaatatccataccgaaggcagtaatgaaatggcgctactggcgcataacgtacatgagatgcagcaggcgctggcgaacacggtcagcgtggtacgtgaaggcgctgacacgatctataccggtgcgggtgaaattgcgacaggcagtagcgatctctcttcgcgtactgaacagcaggccgcatcgctggaagagactgccgccagtatggaacaactcaccgcaaccgtgagacagaacgccgacaacgcacgtcaggcgtccagcctggcaaaaaatgcctctgagacggcgcagaaaggcggcaacgtagtggacggcgttgtgcgcacgatggatgaaattgccaccagctccagcaaaatcgcgcagattaccagcgttatcgacggtatcgcattccagaccaatatcctggcgctgaacgcggcggtggaagccgctcgcgcgggcgaacagggccgtggctttgcggtggtcgctggcgaggtgcgcacgctggcgcagcgtagcgcgcaggcggcgaaagagatcaaaacgctgattgatgactccggtaatcgggtcagcgcgggttccgcgctggtgcatgaagcgggggaaacgatggcggaaattgtcagtgcggtaacgcgtgtgaccgacatcatgggggagattgcctctgcatctgatgaacaaagtcgcggcattgaccaggttggcctggcggtggcggagatggatcgcgtgacgcagcagaacgccgcgctggtggaagagtcggcgactgccgccgtagcgcttgaagagcaggcggcacgtctgacccagacggtagcggtgtttaaagtttaa

SEQ ID NO: 75038 - DNA, 966 bp, Citrobacter koseri
atgattagcggcgtgttgtatgccctgctggcagggttaatgtggggactgatttttgtcggaccgttgatcgtaccggagtatccggcggtattgcagtcgatggggcgctatctggcgctggggttaattgctgtacccctggcgtggctggggcgtgcgcgcctgcgccagttgacgcgcaaagactggataaccgcactcgcgctgacgatgatgggcaatctgatctattacgtctgcctggcgagcgctatccagcgcacgggagcccccgtttccaccatgatcatcggcacgttgccggtggtgatcccggtgtttgccaacctgctctacagccagcgagatggtaagttatcctggcggcgtctggcgcctgcgctggcgctcatcggcgttggcctgctgtgcgtcaatattgcggagctgaatcaggggctgccggagtttagcggctggcgctacggttcaggtatcgcgctggcgctggtttccgttgtgtgctgggcatggtacgcgttgcgtaatgcccgctggctgcgggaaaacccggataaacatccgatgatgtgggcaacagcacaggcgctagtgacgcttcccgtttcgctgctgggttatgttgcggcctgtatctggttgggtaagcagatgcccggctttcctctcccctttggcccccggcccgatgtctttgtcgccctgatggtcgccattgccgtgctctgttcatgggtgggggcgctatgctggaacgtcgccagtcaaaagctgccgacggtgattctggggcccttgatcgtgttcgaaacgctggctggcctgttgtacacctttatactgcgccaggaatttccaccgctgctgacggtaagcggcattgcgctgctgattgttggggtggtgatagccgttagagccaggccgcagaaacccggcgtcgtcgtggtttcacaatcataa

SEQ ID NO: 75039 - DNA, 825 bp, Citrobacter koseri
gtgcaaggcgtacccgaacagtttagcgatgagaaagacagcgcccgctttcgccatctggcgcaggtgccgggggttgagctgtatcatgcgcatatctcgcgttacgctttcgagcctcatacccacgaagccttcggtatcggcgcgattgaagccggcgccgaacgctttcgctatcgcggtacgcagtacgttgcccccgttcactccgttgtcaccatgaatcccgatgagctgcataccggcgaagcggaaaccgccgacggctggcgctatcggatgatttatctcgatcccgatctgctggaagaagtgaccggggttcgtcactggtggtttcatgaggtcacgcgccacgatccgctgcgctcacgccagatctgcacgctgatccacggcctgtggcataccgacgatccgctggcgcaaaaagggctgctgctcgatctgatcgacaccttccagccgctggcgcgccatgcgccggaagtgcgggaaggcggacatcgctttgagcgcgtgcgggactatctgcacgacaactacatgcatccggtcacgcttgacgaactggcgcgggtcgcctcattaagcccctggcattttcagcgtcagttcaaggctcatttccacgttacgccgcaccaaatgctgatggcgatccgtctgtggcgggcaaaggcgtttctcacgctcgggatgcccgcagcggatgtggcggccgccaccgggctaaccgatcaatctcatctcacgcgcgcctttacccatcgctacggcattacgccagtgcgctatcaaaaacaggtttatccgcgctaa

SEQ ID NO: 75040 - DNA, 849 bp, Citrobacter koseri
atgattgcaattaccggcgcaaccggccaactgggccaacacgttatcgataccttactgaaaaccgttcctgccagccagattgcggcgattgtccgtaaccccgcgaaagctgacgcgctaacccgactgggcgttaccgtacgccaggcagactacagcgacgaagccgcgttcacggcagcgttgcagggcatcgacagattgctgctgatctcatcaagcgaagtcgggcaacgtgccgctcagcaccgcaacgtgattaacgcggcaatagctgcaaacgtgaaattcattgcctataccagcctgctgcacgcggaccgttccccgctgggcctgcatgttgaacatgtggaaaccgaaaaaatgctggcggattcaggcattccttacgccctgctgcgcaacggctggtacaccgaaaattacctggcgagcgcgccagcggccctggagcacggcgtctttatcggcgcggccggagaaggcaaaatcgcctccgcaacccgtgccgattacgctgccgcagccgctcgcgtcatcagcgaagaaggccatgccggtaaagtgtatgaactggcaggcgacgaaggctggacgctgagccagttagccgccgaactggcaaaacagagcgggaaaaaggtcgtctatcagaacctgaatgaagccgatttcgccgccgcgctgaaaggcgtgggcctgccagcgggtctggcggatatgctggctgattctgacgcgggcgccgcaaaaggcggcctgtttgacgacagccatactctgagcgcactgatcggtcgcccgacaacctcactggcggaaagcgtcaaaagcatcctgtaa

SEQ ID NO: 75041 - DNA, 381 bp, Citrobacter koseri
atgacgaacccgacgctttctcagcagcttcgcgatggcaatttgtttgccgagcagtgtccttctcgcgaggtgttaaagcatgtcaccagccgctggggcgtattaattcttgtggcgctgcgtgatggaacgcaccgcttcagcgatttacgccgcaagatgggcggcgtgagtgaaaaaatgctggcgcagtcattacaggcgctggagcaggatggatttattcatcgggtgtcgtacccggtggtgccgccgcatgtggagtacagtctgacgacgctgggtgaacaggtgagtgagaaggtcgccgcgctggcagactggatcgaactcaatttgccgcaggtgctggcacagcggaaagagcgagcggtataa

SEQ ID NO: 75042 - DNA, 1944 bp, Citrobacter koseri
atgattaagtttagcgcaacgctcctggccacgctgatcgccgccagcgtgaatgcggcgaccgtcgatcttcggattatggaaaccactgatttgcatagcaacatgatggatttcgattattacaaagatacagcgaccgaaaaattcggactggtacgcacagcaagtttaattaacgccgccagaaatgaagtcaaaaatagcgtgctggtcgataacggcgatcttattcaggggagtccactgggcgattacatggcggcaaaggggctgaaagccggtgatattcaccctgtctacaaggcgttgaatacgctggattatgcggtcggcaacctcggtaaccatgaatttaactacggtctggactatctgcataaggcgctggcgggcgcgaagttcccttacgtgaatgccaatatcatcgacgttaagaccaaaaagccgctgtttacgccttatctgatcaaagagactgacgtggtcgataaagagggcaacacgcagacgctgaaaattggctatatcggttttgtccctccgcagattatgacctgggataaagccaacctgagcggcaaagtcaccgtcaacgacattaccgaaactgcccgtcagtatgtgccggagatgcgcgccaacggcgctgatgttgtggtggtgattgcccactccgggctttctgccgatccgtaccagacgatggcggaaaactccgtgtattacctgagcgaagtccccggcgttgacgccatcatgttcggccatgcgcacgcggtcttcccttccaaagattttgccgatatcaacggcgcggatatcgcaaaaggtacgcttaacggggtaccggcggtcatgccgggtatgtggggcgatcatctgggcgtggtggatctggtgctcaacaacgacagcggcaaatggcaggtgaccggtgcgaaagccgaagcgcggcccatttacgatgccgccgcgaaaaaatcgctggccgcagaagataaaaaactggtgggtatcctgaaagccgaccacgatgccacccgcgagttcgttagcaaaccgatcggtaagtccgccgataacatgtacagctacctggcgctggtgcaggacgatcctaccgtgcaggtggtgaacaacgcgcagaaagcgtatgtcgaacactttattcagggcgacccggatctggcgaaactgccggtgctctctgccgctgcgccgtttaaagtcggtggacgtaaaaacgatcctgccagctttgttgaagtggaaaaaggtcagcttaccttccgcaacgccgccgatctttacctctatccgaatacgctggtcgtcgtaaaagccagcggcaaagaggtaaaagagtggctggaatgttccgccgggcagttcaatcagattgatgtccacagcagtaaaccgcagtcattgatcaactgggacggttttcgcacctataactttgatgtgattgacggcgtggagtatcagattgatgtgtcgcagcctgcacgctacgacggcgaatgccagacggtgaatccgcaagcggaacgtattaaaaatctgaccttcaacggcaagcctgtcgatccgaacgctatgttcctggtcgcgaccaataactatcgcgcctacggcggcaaatttgccggtacgggcgacagtcacatcgcctttgcatcaccggatgagaaccgctccgtgctggcggcgtggattggcgcggagtcgaagcgtgcgggggaaatccatccggcggcggacaacaactggcgtctggcgccagttcacagcgacacgaaactggatatccgcttcgaaacctcgccgtccgataaggctgccgcgtttatcaaagagaagggacaatatccaatgaataaagtcgctaccgatgacatcggttttgcgatttatcagctggatttgagtaagtaa

SEQ ID NO: 75043 - DNA, 741 bp, Citrobacter koseri
atgctagaacatgtatgccagcttgcacggaatgcgggcgatgccattatgcaggtctacgatggaatcaaaccgattgaaatcaccaacaagcaggatgattctccggttactgcggcggatattgccgcccacgcggtgatactggaagggttacaggcgctgacgccggatatcccggttttgtcggaagaagatccgccctcctgggatgtgcgccagcactggcagcgctactggctggttgacccgttagacggcaccaaagagttcatcaaacgtaacggcgagtttaccgtcaatattgcgctgattgataaaggtaaaccggttctgggcgtggtctacgcgcccgtcatgaaagtgatgtacagcgctgcggaaggaaaagcctggaaagaagagtgcggcgtacgtaaacagattcaggtgcgcgacgcgcgaccgccgctggtggtgattagccgctcccatgccgacaacgagttgcaagagtacctgcaacagctgggcgaacatcagacgacctccatcggctcatcgctgaagttttgtctggtggcggaagggcaggcgcagttatatccgcgctttgggccgacctgcgtctgggacactgccgcaggccatgccgttgccgctgcggccggggcgcacgttcacaactggcaggggaaacccctggactataccccgcgtgaatcgttccttaaccccggcttccgggtctctatctattaa

SEQ ID NO: 75044 - DNA, 558 bp, Citrobacter koseri
atgaccttacgtaaactgctggcgctgtcgtgcctgttactgccgatgatggcctccgcgcataactttgaaacccatcagcgcgtatcaccgattgggatcgccgatcgcggcgaactgattcttgataacaacaagtttagctacaaaagctggaatagcgcgcagctccccgggaaagttcgggtgttgcagcacatcgccgggcgaacgtcagcgaaagagaaaaacgccgcgctgatagaagcgattaaatctgcgaatctcccgcatgaccgctaccagacgaccactatcgtcaataccgacgacgcgattccgggcaccagcatgtttgtgcgcagcagcatcgagagcaataaaaaactctatccttggtcacaatttattgtcgacagcaatggcgtggcgcgtaaggcatggcagcttgaagaagagagctccgccattgtggtgctcgataaagacgggcgtattcagtatgccaaagacggcgggttaagcccggcagaggtgcagcaggtgatcgccctgctgcataagttgctgaataattaa

SEQ ID NO: 75045 - DNA, 207 bp, Citrobacter koseri
atgaaaattttccaacggtacaacccgctacaggtggcgaagtacgtgaagatcctgttccgtggacggttatatatcaaggacgttggcgcttttgagtttgataagggcaagattcttatcccaaaagtgaaggataagcagcatttgtctgtgatgtccgaagttaaccgtcaggttctgcgtctgcaaactgagatggcttaa

SEQ ID NO: 75046 - DNA, 1344 bp, Citrobacter koseri
atgttaaacagtattttaattatactctgcctgatcgctgtgagtgcgttcttctcgatatccgagatctcgcttgccgcttcacgaaagataaaactcaagttgctggctgatgaaggcaacatcaatgcgcaacgcatcctgaaaatgcaggaaaaccccgggacgttttttaccgtggtgcaaattggccttaacgctgtcgccattctgggcggtatcgtcggcgatgccgcattctctccggcctttcattcgttgttctcgaactatatgtcgccagaactctccgagcagttaagcttcgtgctctccttctcgttagttaccggtatgttcatcctgttcgccgatttaaccccgaaacgcatcggtatgattgcgccagaagccgtggctttgcgtatcatcaacccgatgcgcttctgcctgttcgttttccgccccttagtgtggttcttcaacggcctggcaaacagcattttccgcctgtttaaaatcccgatggtgcgtaaagacgatatcacctcggacgatatttacgccgtcgtggaagccggggcgcttgctggcgtgctgcgtaagcaggaacacgagctgattgaaaacgtgtttgagctggaatcacgtaccgtgccgtcttccatgacgtcgcgtgaaaacatcatctggttcgatctgcacgaagatgagcaaagcctgaaaaataaagtcgcggagcatccgcactcaaaattcctggtgtgtaatgaagatatcgatcacatcatcggctacgttgattctaaagatctgctcaaccgcgttctggcaaaccagagtatggcgcttaacagcggcgtgcagatccgcaacacattaatcgtgccggacaccctgaccctctctgaagcgctggaaagctttaagacggcgggggaagacttcgcggtgatcatgaacgaatacgcgctggtggtcgggattatcacgctgaacgacgtgatgaccacgctgatgggcgacctggtcggccagggtctggaagaacaaatcgtggcgcgcgatgaaaactcctggctgatcgacggcggaacgccgattgacgacgtcatgcgcgtgctggatatcgacgagttcccgcagtccggcaactacgagaccatcggcggctttatgatgtttatgctgcgtaaaatcccgaaacgcaccgactcggtgaagttctcgggctataaatttgaggtggtggatatcgacaactaccgtatcgatcagctactggtaacgcgcctcgacaccaaaaccagcatcctggtccctaaactgccggatagcaaagagaaagaagaaggcccggcataa

SEQ ID NO: 75047 - DNA, 639 bp, Citrobacter koseri
atgagtttatttgataaaaagcatcttgtttcacaagcagatgccctacctggacgcaataccccgatgccagtggcaactttacatgcggtaaacggacactcaatgacaaacgtgcccgaagggatggaaattgccctcttcgccatgggttgcttctggggcgtcgagcgtttgttctggcaattacctggcgtttacagcaccgcagcgggatacaccggcggctacacgccaaacccaacctaccgggaagtctgctccgggcaaaccggccacgccgaagcggtacgcgtcgtctacgatccgcaggttatcagctatgaacaattgttgcaggtcttctgggaaaatcacgatccggcgcaaggtatgcagcagggcaacgatcacggaacgcagtaccgctcggcgatttatccgttaacgccagagcagaacgccgccgcacatgccagcctggcgcgtttccagagcgcgatgactgcggcaaacgacgatcgccacatcaccaccgagatcaacaccgccaccccgttttactatgccgaggacgatcaccagcagtatctgcacaagaatccgtatggctattgcggcattggcgggatcggcgtgtgcttaccgccgcaaggttaa

SEQ ID NO: 75048 - DNA, 1734 bp, Citrobacter koseri
gtgccatatatccgtcagttatgctgggttagcttactgtgcttaagcggttctgccgtagccgcaaacgtccgtttacaggtcgaggggttatcgggcgagctggaaaaaaacgttcgtgcgcagttgtctacgattcaaagtgatgaagtgacgccggaccggcgttttcgcgcgcgcgttgatgatgccatccgcgaagggttaaaagcgctgggctactacgagccgaccattgattttgagctgcgcccgccgccggagaaggggcgtcaggtcttgctcgccaaagtgacgccaggcgaaccggttcgcatcggcggaacagaagtgattttacgcggcggcgcgcgtaccgacagggattatctggatttgctgaaaacgcgtccggccatcggaaccgtgctgaatcatggcgactatgacggcttcaaaaagtcattaaccagcgtggcgctacgtaaaggctatttcgacagtgaatttaataaaagccagttaggcgtgtcgctcgatcgtcatcaggcgttctgggatatcgattacaacagcggcgagcgctatcgctttggccaggtcactttcgaaggttcgcagattcgcgacgagtatctgcaaaacctgatcccgttcaaagagggagattactaccagtcgaaagacctggcggaactgaaccgccgtctgtcggccaccggctggtttaactcggtcgtcgtcgcgcctgaatttgataaagcgcgcgaaactaaagtattaccgttgcacggcgtcatgtcgccacgtactgaaaacaccattgaaacgggcgtcggctactctaccgacgtcgggccgcgtgtgaaggcgacgtggaaaaaaccgtggatgaactcctacggccacagcctgaccaccagcgccagtatctccgccccagagcagcaggtcgatttcagctataaaatgccgctcttaaagaacccgctggaacaatactatctggttcagggggggattaagcgcaccgatctcaacgacaccgaagcggactcctccacgcttgccgtttcccgctactgggacctttccagcggctggcagcgcgccatcaatctgcgctggagcctcgatcactttacgcagggtaacgtcaccaacaccaccatgctgctctatccgggcgtgatgatcagccgtacccgatcgcgcggcggactgatgccgacgtggggggattcccagcgttactccattgattactcgaacaccgcctggggttcggacgtggatttctcggtatttcaggcgcaaaacgtctggattcgctcgctgtacgatcgccatcgcttcgtgatgcgcggcaacctgggctggattgagaccggcgatttcgacaaagtgccgccggatttgcgtttcttcgccggtggcgatcgcagtattcgcggttataaatacaaatctatctcgccggaagacagcgacggcaacctgaaaggggcgtcgaagctggtgacgggctcgctggaataccagtacaacgtgaccggaaaatggtggggggcgatgttcgtcgacagcggcgaagccgtcagcgatatccgtaagagcgactttaaaaccggcgccggggttggcgtgcgttggcagtctccggtcgggccgatcaagctcgattttgccgtgccggttggtgacaaagacgaacacggtttacagttttacatcggtctggggcctgaattatga

SEQ ID NO: 75049 - DNA, 3780 bp, Citrobacter koseri
atgagtttatggaagaaaataagcctcggcgtactgatttttattctgctgctgctgggaaccgtggcgttcctggtgggcaccacgacggggctgcatctggtctttaacgcggcgaaccgctgggtgccggggctggagatcggtcaggtaactggcggctggcgtgacctgtcgctgaaaaatattcgttacgatcagcccggcgtggcggtgaatgccggtgaaatccacctggcggtgaaactcggctgcctgtgggacagcagcctgtgtgttaacgatctgtcgttgaaggacatcaacgtcgccatcgacagcaaaaaaatgccgccttccgaaccggtggaggaagaagaggacagcgggccgctgaatctttccacgccgtatcccatcacgctttcgcgcgtggcgctcagcaatatcaatctcaaaattgatgatacgaccgtctcggtgatggatttcacctccggccttaactggcaggagaaaaccctgactctgaagccaacttcgctacagggactgctaatcgcgttgccaaaagtggcggaagtggcgcaggaagaggtggttgaaccgaagattgaccatccccaaccggatgaaaagccgcttggcgagacgctgaaggatctgttctcaaagcccgtgttgccggagatggccgatgtgcatctgccgctcaaccttaatattgaggagtttaagggcgaacagctgcgcgtgacgggcgatactgacctgacggtgcgcaacatgctgctgaaagtcagcagcatcgacggcaatatgaaactggatgcgctggatatcgacgccaaccagggcaccgtcaatgcgaccggaacggcgcagttgaccaactcgtggccggtggatgtcaccctcaacagcacgctgaatatcgatccactgaaaggcgaaaaggtgaagctgaaggtaggcggcgcgctgcgtgaacagctggagatcggcgttaacctctccgggccggtggatatggatctgcgcgcccagacgcgcctcgccgaggctgggttgccgctgaacgttgaagtggcaagccgccaggtttactggccgtttaccggcgacaagcagttccaggccgacgatatcaaactcaaacttaccggcaagatgaccgactacacgttgtcgatgcgcacggcggtgaaggggcaggacattccgcccgccaccattaccctggatgcgaaaggcaacgaacagcagatcaatctcgataagctcaccgtggcggcgctggaagggaaaaccgagctgaaagcgctggtcgactggcagcaggcgatcagctggcgcggcgaactgacgctggacggcatcaacacggcgaaagagatcccggactggccttctacgctcaacggcctgatcaaaacccggggaagcctctatggcggcagctggcagatggatgtgcctgagctgaaactgaccggtaacgtgaagcagaacaaggtcaatgttaaaggctctctgaagggtaacagctacatgcagtgggtcattccgggtctgcatctggagctgggacgcaatagcgccgatgtgaaaggcgaactgggcattaaggatctcaatctcgacgccacgattgatgcgccgaatctggataacgcgctgccggggctgggcggtaccgccaaagggctggtgaaagtccgtggtacggtcgatgcgccgcagctgctggcggatatcaacgcgcgcggattacgctggcaggagctgtcggtggcgcaggtgcgtgtggaaggggacatcaaatccaccgaccagatcgccgggaatcttgacgttcgcgttgagcggattacgcagccggacgtcaatatcaacctcgtcaccctgaatgccaaaggcagcgaaaagcagcatgaactgcaactgcggattcagggcgagccggtctccgggcagcttgcgcttgcgggcagttttgaccgtaaagaagcgcgctggaaaggcacgctcagcaatacgcgcttccagacgccggtggggccgtggtcgctgacgcgcgccattgcgctggattaccgtaaccaggaacagaaaatcagcatcgggccgcactgctggacgaacccgaatgcggagctgtgcgtaccgcaaacaatagatgccggggcagaaggacgggcggtggtgaatctcaaccgtttcgatctggcgatgctgaagccgtttatgccggacgccacgcaggccagcggcgtctttagcgggaaagcggatgtcgcgtgggacaccaccaaagaggggctgccgcaagggcaggtcacgctgtcgggtcgtaacgtgaaggtaacgcaacgggtcaatgacgcgccgttaccggtggctttcgacacgctgaacctgaatgccgatctgcacaataaccgggcgcagttaggctggatgatccgtctgaccaataacggtcagttcgacgggcaggtacagataaccgatccgcaagggcggcgtaatattggcggtaacgtcaatatccgcaacttcaacctggcgatggtcaacccgatcttctcgcgcggcgaaaaagcggcgggcatgttgaacgcaaacctgcgtctggggggcgacgtgcaaagcccacagatgtttggtcagctacagctgagcggcctggatgtggatggcaactttatgccgtttgatatgcagccaagccaactggcgatgaatttcaacggtacgcgctcaactctgcaaggcgtggtgcgcacacagcaggggcaaattaatctgagcggcgacgccgactggagccagatagataactggcgcgcccgcgtggcggcgaaaggcagtcgcgtgcgtatcaccgtgccgccgatggtgcggctggatgtttccccggatgtggtctttgaggcgacgccgagcctgttcacgctggatggacgcgtggatgtgccgtgggcgcgtatcgtggtgcatgaactgccggaaagcgcggtaggcgtctccagcgatgaagtcatgctcaataacgatttacagcctgaaaatccgcagagcgcgtcgattccgatcaacagcaacctgattgtccacgtagggaacaacgtccgcatggatgcgtttggcctgaaagcgcgtctgaccggcgacctgaaagttgcgcaggacaaacagggactggggcttaacgggcagatcaatattcctgacgggcgcttccatgcgtatgggcaggatctgatcgtgcgtaagggggaactgctgttctctggcccgccggatcagccgctgctcaacatcgaggcgattcgtaatcctgaatcgacggagaacgacgttattgccggggtgcgcgtgactggcaccgcagatgagccgaaagcggaaatcttctctgacccggcgatgtcccagcaggaggcgctgtcttacctgctgcgcggccaggggctggagagcgatcagagcgacagtgcggcgatgacctcaatgcttgttggtctgggggttgcacaaagtggtcaggttgtgggtaaaatcggggagacatttggcgtaagcaatctggcgctggacacgcaaggggtgggcgactcatcccaggttgtggtcagcggatatgtgctgccaggtctgcaagtgaaatatggtgtgggtatatttgactctttggcgacgctcacgttacgttatcgcctgatgcctaagctatatctggaagcagtgtctggcgtagatcaggcacttgatttgctctatcagttcgagttttag

SEQ ID NO: 75050 - DNA, 345 bp, Citrobacter koseri
atgcgaatatttgtttacggcagtttacgacgcaaacagggcaacagccactggatgaccaacgcccagttgctgggcgattacagtatcgataactaccagttgtatagcctgggccactatccaggcgcagttccgggaaacggatcggtacacggtgaagtttatcgtattgataacgccacgctggccgaacttgatgccttgcgcaccaggggcggcgaatatgcacgccagttaatccagacaccgtacggaagcgcatggatgtatgtgtaccaacgtccggtcgaagggttaacgctgattgaaagcggtaactggttagacagagaccagtgctga

SEQ ID NO: 75051 - DNA, 531 bp, Citrobacter koseri
atgagcttactcaacgtccctgcgggtaaagatctgccggaagatatctacgttgttattgagatcccggctaacgcagatccgatcaaatacgaagttgacaaagagagcggcgcactgttcgttgaccgcttcatgtccaccgcgatgttctatccgtgcaactacggctacatcaacaacaccctgtctctggatggcgatccggtagacgttctggtcccgacgccgtatccgctgcaaccgggttctgtgatccgttgccgtccggttggcgttctgaaaatgaccgacgaatccggtgaagatgcgaagctggttgccgtaccgcacaccaaactgagcaaagaatacgatcacattaacgacgtgaacgacctgccggaactgctgaaagcgcagatcacgcacttcttcgagcactacaaagacctcgaaaaaggcaaatgggtgaaagttgacggctgggacaacgctgaagcggctaaagctgaaatcgttgcttccttcgagcgcgcagcgaagaaataa

SEQ ID NO: 75052 - DNA, 957 bp, Citrobacter koseri
atgtggaagcgcttacttttagtcacagcagtttcggcagccatgtcgtctatggcaatggccgcccccttaaccgtaggattttcgcaggtcggctctgagtccggctggcgcgccgccgaaaccaacgtggcgaagagcgaggccgaaaaacgcggcatcacgctgaaaattgccgacggtcagcaaaaacaggaaaaccagattaaagccgtacgctcatttgtcgctcagggcgtggacgccatctttattgcgccagtggtcgcgacaggctgggaaccggtcttaaaagaagccaaagatgcggaaattccggtctttctgctcgaccgctccattgatgttaaagacaaatcgctctatatgaccaccgtcaccgccgacaacgtgctggaaggcagattgatcggcgactggctggtaaaagaggtggatggcaagccgtgtaacgttgttgagctgcaaggcaccgttggggccagcgtggcgatcgaccgtaagaaagggtttgccgaagccatcgccaaagcgccaaacatcaaaatcatccgctctcagtctggcgactttacccgtagtaaagggaaagaggtgatggagagctttatcaaagcggaaaacaacggcaaaaacatctgcatggtttacgcccataacgacgacatggtgatcggcgcgatccaggcgattaaagaagcgggtctgaagccgggcaaagatattctgacgggctctatcgacggcgtgccggatatctataaagcgatgattgatggcgaagccaatgccagcgttgaactgacgccgaacatggccgggcccgctttcgatgcgctggagaaatacaaaaaagacggcacgatgcctgagaagctgaccatcaccaaatcgacgctgtacctgcctgacaccgcaaaagaagagttagagaagaagaaaaacatgggctactga

SEQ ID NO: 75053 - DNA, 1503 bp, Citrobacter koseri
atgaccatcgaccaaaatcaggaaatcctccgtaccgagggactcagtaaattctttcccggcgttaaggcgctggataacgtcgattttagcctgcgccggggcgaaatcatggcgctgctcggggaaaacggggcgggaaaatcaacgctgattaaagcattaaccggcgtataccatgccgatcgcggcactatctggctggaaggtcaggcgatttcaccgaagaataccgcgcatgcccagcaactggggatcggaaccgtctaccaggaggttaaccttctgcccaatatgtcggtggcggataacctgtttatcggtcgtgagccccggcgttttggcctgctgcggcgcaaagaaatggagaaacgcgctacagaattgatggcctcttacggcttttcgctggatgtgcgtgagccgctcaaccgcttttccgttgcaatgcagcagattgtcgctatctgccgggccatcgatctctccgcgaaagtcctgatcctcgacgaacccaccgccagcctcgacacccaggaagttgagatgctgtttggcctgatgcgccatctgcgcgatcgcggcgtcagcctgatctttgttacgcactttctcgatcaggtttatcaggtgagcgatcggatcaccgtgttacgcaacggcagctttgtcggctgccgcgaaacccgcgagcttccacagatcgaactggtgaaaatgatgctggggcgcgaactggagacccatgcgctacagcgggcggggcgcaccttgctgagcgataaaccggtggctgcctttaaagattatggcaggaagggcaccatctcgccgttcagcctggaagtccgccccggcgagatcgtcggtctggcagggctgttgggatcggggcgtaccgaaaccgcagaggtgatcttcggcatcaaaccggccgacagcggcagtgcgatgatcaaaggtaagccgcaaaccctgcgatcgccgcatcaggcttcatgccttgggatcggcttttgcccggaagacaggaaaacggacggcattattgccgccgcatcggtacgggaaaatatcattctggcgctacaggcgcagcgaggctggctgcggccgatttcccgcagagaacagcaggagattgccgagcgttttatccgccagttgggtattcgtacccccagtgcggaacagccgattgaatttctctccggcggcaatcagcaaaaagtgttgctgtcgcgctggttgctgaccaaaccgcagttcctgattctggatgaaccgacacgcggcatcgacgttggggcgcatgcggagatcatccgcctgatcgaaacgctgtgtgcggacgggctggcgctgctggtcatctcctctgaactggaggaactggtgggctatgccgatcgggtgatcatcatgcgcgatcgtaaacaggtggcggagatcccgctggcggaactgtccgttccggcgatcatgaacgccattgcggcgtaa

SEQ ID NO: 75054 - DNA, 1023 bp, Citrobacter koseri
atgcctcagtctctcccgcaaaccacaccgccgaagcgacgttttcgctggccgacaggtatgccgcagatcgtggcattgctgctggtgctgttggtggacagcctggtggcgccgcatttctggcaggtgattttgcaggacggccgcctgttcggcagcccgattgacattcttaaccgcgcggctcccgttgcgctgctggcgattgggatgacgctggtgatcgccactggcggtatcgatctctccgtcggggcggtaatggcgattgccggggcgaccactgccgccatgacggtggccgggcacagcttaccggtggtgctgctcgcggcgctgggaacaggcgtactggcgggcttgtggaatggtattctggtggcgatccttaaaattcagccgtttgtcgccacgctcattctgatggtggctggacgtggcgtggcgcaactcatcacctccgggcagatcgtcacctttaactcacccaacttatcgtggttcggcagcggttcgctgctgctgtttccgacgcccgtgattatcgcgctgcttaccctggtggtgttctggctgctgacccgtaaaacggcgctggggatgttcattgaagcggtggggatcaacattcgggcggcgaaaaatgccggggtgaacacccgcattatcgtcatgctcacctatgttctgagcggcctgtgtgcggcgattgcgggcatcatcatcacggcggatattcgcggcgcggacgccaacaacgccggactctggctggagctggacgctattctggccgtggttattggcggcggctcgctgatgggcgggcgctttaacctgctgctgtcggtcgtgggcgcattgattatccaggggatgaataccggcatcctgctgtcaggctttccgccggagatgaaccaggtcgtcaaagccatcgtggtgttatgtgtgctgattgtgcagtcgcagcgctttatcagtctgataaaaggagtgcgtggtcgtgataaaacgtaa

SEQ ID NO: 75055 - DNA, 1002 bp, Citrobacter koseri
gtgataaaacgtaacttaccgttgatgatcaccctcggggtttttgtgctgggctacctctattgcctgacgcagttccccggtttcgcctcaacccgggttatctgcaacatcctgaccgataacgctttcctcgggattatcgcggttggcatgaccttcgtgatcctctccggcggcatcgatctgtccgtgggatcggtgatcgcgtttaccggcgtttttctggcgaaggccattggctactgggggatctcgccgctgctggccttcccgctggtactggcgatgggctgtgcgttcggggcatttatggggctgctgattgatgcgctgaagattccggcgtttatcattacgctggcggggatgttcttcctgcgtggcgtcagttatctggtgtctgaggagtcgatcccgattaaccacccgatttacgatacgctctccagcctggcgtggaaaatccccggcggcgggcgtctgagcgcaatggggctgctgatgctggcggtggtggtgatcggtattttcctcgcccaccgtacgcggtttggtaatcaggtttacgccattggcggaaatgcggcgtcggcgaacctgatggggatttcgacgcgcagcaccaccatccgtatttatatgctctccaccgggcttgcgacgctggcgggtattgttttctccatttatacccaggccggttatgcgctggcgggcgttggcgttgagctggatgccatcgcatcggtggtgattggcggtacgttgctgagcgggggcgtggggacggtgttaggtacgctgttcggcgtggcgatccaggggctgatccagacctatattaacttcgatggcacgctgagttcctggtggacgaagatcgctatcgggattttgttgtttatttttattgccttgcagcgtggtctgacggtgctgtgggagaatcgccagagttctccggttacgcgtgtcaacacagccgcaacaccgaagtaa

SEQ ID NO: 75056 - DNA, 1113 bp, Citrobacter koseri
atgccaaaatccctctctattcgtacaagtttactggttttactgtctttacttaccctgctcctgttgctgacgggcggtatggggctctacgcctccacccgcattatcacttcctgggtctattatggggtgatgacgggggcgacgctggccgccatcggcctcttggcgctggtatggctgatgttgcgtaataagctcctgaaacctcttgataatgttgttgagcaactggagcgtctggcgacaggggatttatcgccgacggtaagccattttgccagctctgaatttaaccgtctgaataccgcccttgaagagatgcgtgcggcgctgagtgaatccgtggtacgcgttcgtgacgccagcacgcaaattgataccggcagccgtgaactgacggcgggcaacctgcacctggcgcaacgtacagagtctacggccacctcgctggaacagacagccgccagcatggaagagctgactgcgacggtgaaactgaacgctgagaatgccgatcaggcgcaccaactggcgaaatcagtctcggacaccgccgatcgcggcagtgagatggtgtgctatgtcattgagaaaatgcgtgatatttccggtagctctgaccgtatcgccgatattctcggcgtaattgacagcatcgctttccagaccaatattctggcgctgaatgcctccgttgaagcggcgcgcgccggcgaacaggggcgcggttttgcggtggttgccggtgaggtgcgtaatctcgccagccgtagcgccgatgccgcgaaagagatccgcgcgctcatcagcgactcgcaaacgcatgtcggagagggcagcgatctggcgatgcaggccggtgaaacgatggatgagattgcgacagaagtgatgcgcatgaccaaactgatgcgtgagattgccagtgcttctcaggaacagagccggggcattgaacaggtgaatatcgcggtcagtcagatggatgaaaccgcacagcagaacgcggcgctggtacagcaatcttccgcagccacccgttcgctggaagagcagtcccatgcgctgctggaggcgatggccgtatttaagctacaggcagcgtaa

SEQ ID NO: 75057 - DNA, 999 bp, Citrobacter koseri
atgaaaacgttaggtgaatttattgtcgaaaagcagcacgagttctctcatgctaccggtgagctcactgctttgttgtcggcaataaagctgggcgccaagatcatccaccgcgatatcaacaaggccggtctggtcgatatcctgggtgccagcggtgctgagaacgtgcagggcgaggttcagcagaaactcgacctgttcgcgaacgaaaaactgaaagctgcactgaaggcgcgcgatattgtggcgggcatcgcttctgaagaagaagatgaaattgtcgtctttgaaggctgcgaacacgcgaaatacgtggtgctgatggacccactggatggctcgtccaacatcgatgttaacgtctctgtcggtactattttctctatctaccgccgcgtaacgcctgtcggcacgccggtgacggaagaagatttcctgcaaccgggcaataagcaggtggctgcgggttatgtggtctacggctcttcaactatgctggtttacaccaccggctgcggcgtacacgccttcacctacgatccgtcgctgggcgttttctgcctgtgccaggagcgtatgcgcttcccggagaagggcaacacctactccattaacgaaggcaactacatcaaattcccgaatggcgtgaagaagtacattaagttctgccaggaagaggacaagtccacgaatcgcccgtacacctcgcgctatattggctccctggtggcggatttccaccgcaacctgctgaaaggcgggatctacctctacccgagcaccgccagccacccggaagggaaactgcgtctgctgtacgaatgcaacccgatggccttcctggctgagcaggcgggcggcaaagcgagcgacggtaaagagcgcattctggatattacgccggaaagcctgcaccagcgccgtccgttcttcgtcggcaccgatcatatggtggaagatgtagaacgcttcatccgcgagttcccggacgcataa

SEQ ID NO: 75058 - DNA, 1374 bp, Citrobacter koseri
atgcgcattcatattttgggaatttgtggcactttcatgggcggtctggcgatgctggcgcgctcgctcggtcatgaagtaacgggttcggacgccaatgtgtatccgccgatgagcaccctgcttgagaagcagggcattgatttaattcagggttacgacgccagccagctcgacccacagccagacctggtgatcatcggcaacgccatgacccgtggaaatccgtgtgttgaagcggtgctggaaaagaacattccgtatatgtccggcccgcagtggctgcatgactttgttctgcgcgatcgctgggtgctggccgtagccggtacgcacggtaaaaccaccacggcaggcatggcgacctggattctggaagcctgcggttatcagccgggcttcgtgattggcggcgttccgggcaatttcgacgtttctgcccgtctgggtgaaagtcacttcttcgtcattgaggcggatgagtacgactgcgcgttcttcgataagcgttccaagtttgtgcattactgcccgcgcacgctgatcctcaacaaccttgagttcgaccatgcggacatctttgacgatctgaaagcgattcagaagcagttccaccacctggtgcgcatcgtgccggggcaagggcgcattattttcccggaacacgacatcaacctgaagcagacgatcgcgatgggctgctggagcgagcaggaactggtgggcgagcaggggcactggcaggcgaagaaactgaacgcggatgcatccgtttgggaagtgtggctggacggtgaaaaagtcggcgaagtgaagtggtcgctggtcggtgaacacaatatgaataacgggctgatggcgattgccgccgctcgtcatgttggcgtgatgcctgcggatgcggctaacgcgttgggatcgttcatcaacgcccgtcgtcgtctggagctgcgcggtgaagccaacggtgtgacggtgtatgacgatttcgctcaccacccgacggcgattctggcgacgcttgcggcgttgcgcagtaaagtgggcggtacggcgcgtattcttgcggtgctggaaccgcgctccaacaccatgaagatgggtctttgcaaagacgatctggctccgtcgttagggcgtgcggatgaagtgttcttgctgcaaccgcagcatattccgtggcaggtggcggaagtcgcggatgcctgtgttcagcctgcgcactggagcggagatgtggacgcgctggccgacatggtggtgaaaaccgcgcagcctggcgatcatattctggtgatgagcaacggcgggttcggcggcatccatcaaaaactgttggatggcctggcgaaaaaggcagaggcgacggagtaa

SEQ ID NO: 75059 - DNA, 552 bp, Citrobacter koseri
atgacaaagcagcccgaagactggctcgacgacgttcccggtgatgacatcgaagacgaagacgatgaaattatctgggtcagcaaaagtgaaattaaacgcgatgccgaggagttaaaacgcctgggcgcggaaattgtggatctggggaaaaacgcgctggataagatcccgcttgatgcggatctgcgcgccgccattgagctggcccagcgtattaagatggaaggccgccgccgtcagttgcagctgatcggtaagatgctgcgtcaacgcgacgttgaacctattcgtcaggcgctggataagctgaaaaaccgccacaaccagcaggtggtgctgttccataagcttgagcaactgcgcgatcgcctgatcgttgaaggtgatgatgcggtggaggaagtgctgagcctgtggccgaatgccgaccgtcaacagcttcgctcgctgatccgcaacgcgaagaaagagaaagaaggcaacaagccgccgaagtcggcgcggcagatcttccagtatctgcgtgagctggcggaaaacgaagagtaa

SEQ ID NO: 75060 - DNA, 1353 bp, Citrobacter koseri
atggcatttgcgatgaaagtaatctcacaagttgaagcgcagcgtaagattctggaagaagcggtctcgacagccctggagctcgcctcaggcaaatcagacggcgcggaagtctctgtcagcaagaccaccggcatcagcgtcagcacccgttatggtgaagtggagaacgtagaatttaatagtgacggcgcgctggggatcaccgtttatcaccagaaccgtaaaggcagcgcgtcatccaccgatttaagctcgcaggcgattgcccgtaccgtacaggcggcgctggatatcgctcgctatacttcgccggatccgtgcgcgggcgtggcagataaagatctgctggcctttgaggcgccggatctcgacctgttccacccggcggaagtgaccccggatgaagccattgatctggctgctcgcgcggagcaggcgtcgttacaggcggataaacgtattaccaacaccgaaggcggcagctttaacagccattacggcatcaaagtgttcggcaacagccacggcatgttgcaggggtactgctccacgcgccattcgctctcaagctgtgtcatcgccgaagaaaagggcgacatggagcgtgattacgcctacaccattggccgtgcgttaggcgatctgcaaacgccggaatgggtgggcgccgagtgcgcgcgccgtacgttatctcgcctggcgccgcgcaaactctcgaccatgaaagcgccggtgattttcgcgaatgaagtggcgaccgggttgtttggccatctggtcggcgcgattgcgggcggctcggtataccgtaaatcgaccttcctgctcgactcgctgggcaaacaaattctgccggaatggctgaccatcgaagaacacccgcatctgctgaaagggctggcctcttcgccattcgacagcgaaggtgtgcgcacagagcgtcgcgacattgtgaaagacggcgtgctgacccagtggctgctgaccaactattccgcgcgcaaactggggctgaaaagcaccgggcacgcgggcggcatccataactggcgcattgccgggcaggggctgagctttgaacaactgctcaaagagatgggcaccggtctggtcgtcaccgaactcatgggccagggggtgagcggcattactggcgactactcccgtggcgcggccggtttctgggttgagaacggcgagatccagtatccggtcagcgagatcaccatcgccgggaatttaaaagagatgtggcgcaatatcgtcaccgtgggtaacgatattgaaacgcgtagcaatatacagtgtggttccgtgctgttaccggagatgaaaatcgccgggcagtag

SEQ ID NO: 75061 - DNA, 387 bp, Citrobacter koseri
atgcgtaaaaacctgttagctgttcttgccatatcatccctggcgttcagttcggcggtgttttctgccgatcttgaagacaatatggacacgcttaacgacaatctgaaggtggtggaaaaaacggataacgcgaccgaactgaaagacgcgttaagcaaaatgcgcgccgctgcgctggatgcgcaaaaaggcacgccgcccaagctggaagataaagccccggatagcccggagatgaaggattttcgccacggtttagatacgctggtcggtcagattgacggcgcattaaaactggcgaatgaaggaaaaatcaaagaggcgcaagcggcggcggaagcgtttaaaaccacccgcaacgcgtaccataagaagtatcgttaa

SEQ ID NO: 75062 - DNA, 321 bp, Citrobacter koseri
atgaacgacatgggggagcaggtgacggagatcggtgaactggccgatcgcatgctggcgcaggtgtatgccttactcagcgaacatcacatcattcccaacgccgtacaggaacaaatgctgacgtctcatgttcgcgccatggcgcaccggtcagtgaccggcgagcctttgccggaagtggatgccagtttatttgatgaaatttcagccgaatcaatggcgcttgcccgcgacatcgtggcggcgtttggcaaccttccagaggaagaagcctggctgctgtcagtacatttcgaagtcgcgaaagacaacctttaa

SEQ ID NO: 75063 - DNA, 363 bp, Citrobacter koseri
atggaacagattacagtcgtaattggcgatcgtctaggtaagggccagaaagtggcggcaggtgtggaaaaagccggtggtcgtgcggtggtggtgccgggcgtggcggcggatatgaagctgggcgacgtgatgaaagcggaaaacgccacctttggcatctctttttgcggtagcggcggcgcgggcgccatcacggcgcaaaacaagtatggctacaaagccaaatacgggatgcgctctgtggatgaaggcgtcacggctatcaacgaaggctgcaacgtgctgggattcggctttatggataaagaagaacttggcgagcgtctggttcaggcgtggcagaagaaatacggcgcttaa

SEQ ID NO: 75064 - DNA, 300 bp, Citrobacter koseri
atgaaagaacaattcaccactacggtgagagtcaccggtaaaggcgaagccaaagcgcgcgcctttgccgatgccctgaaccacgttcagggcgcggtgatgaaagcatcgccgcatattttattgcgtattgagccacaggatgtgcaggttgttcaagcgcgtgaaacggtgcgcaaagaagcgtttttatttgtctttttgcgccgggaaagacgcacctacagcgtggagctggaagtgaccgtcaacgtgactgccatcaatctcgacaaggtggacttcgtcgcgcaacgctga

SEQ ID NO: 75065 - DNA, 777 bp, Citrobacter koseri
atgttcctgataatattaataaaatcgctcatcattggtggcctggtcggcgtcggtgtgggcgccggggctgcacgcatgtttcatgcgccgactacacagggtatgggcgcgtttcgtacattgggggaactgaactcctgtgaaggggacccggcttctcacttctccttcggtctgggcttcttcttcaacgcctgggcctcatccgttgcggcgggttcattcacgcaggatgtcgatcaccgcatcatcccgaactggggcgcggcagcgctgatgatcaaaaaccgcaatgtcggcgagacgctgcacgatccgaagaaaatggcgattgcctgcggcatcatcggcatgatcgtcgtgaccttcctcaaccttaccgcctcttccgtaccggaagcgttgcaggtcaccgccgttaaggtattggtgcctgcggctaacctgctggtgaataccgtgatgccggttatcttctggctggcggcgatcgacgccgggaaaaaatcaggcttctgggccaccgtgtttggcggcgcggcgcagctgatcatgggtaacgccgttccgggtctggtgctgggtattctgatcggcaaaggcgttgaagagagcggctggaaccacgtcaccaaagtgatgatggtcgccattgtggcgctgtttgtcctgagcggcttcttccgcggcttcgacatgaagatgatcgaatccttcaatatgaccgtgccgaactggctcgaactgatccacggctcgctcagcggcaaataa

SEQ ID NO: 75066 - DNA, 645 bp, Citrobacter koseri
atggaacagaataaaggtttttggtatgccgactggtcgttcccgatctttgtaggcttgctctcatccggcgtttttgccgggacgcatatgtactacctgtacggtatcggcgcgtttaacgaagtggcctttgtggcaatgctgaaagcggggatggacaccggcgtttacggcgcggtggccgcgtttggcgcaagcttcttgtttgcccgcattatcgaagggtcgctggtggggattctggacatcggtggggcgatccagaccggcgtcggtcttggggttccggcgctgctgctgggcgcagggatcgttttcccggtcgctaactttgtcgcctcgttaatcaccggtctggtgattggtctggcaattggctacgtcatcattctggcgcgtaagttcaccatcaatcagagcgactccacctacggggcggacgtgatgatgggggcgggtaatgcgtcaggccgcttcctggggccgctgatcatcctcagcgcgatgaccgcctcgattccaatcggcgtgggttctttgctgggggcgttgctgttctatctctggcagaagccgatcaccggcggcgcgatcctcggcgccatgattttaggttcgatcttcccgattgccattagctaa

SEQ ID NO: 75067 - DNA, 1134 bp, Citrobacter koseri
atgtatgatttactcctgcgccgtgcgcgtctggttgacgatacggtgagcgatatcgccctgaaggacggcaaaattgccgcgttgggcaatatccagcaaccggcggcgaaaaccgtcgatctgcgcggcgagtattacgttagcgcagggtggattgattcccacgtccactgctatccgaaatccccgatttatcacgatgagccggacagcgtcggtattgcgacaggcgtcaccaccgttgttgatgcgggcagtaccggcgcagacgacattgatgatttctacacgctgacccgtgaagcggccactgaagtttatgcgttgctgaatatctcccgcgtagggctgatcgcacaaaacgaactggcgaatatggccaatgtcgatgcgaacgccgtgaaacaggcggtgaaacgccatccgaatttcattgtgggcctgaaggcgcgaatgagcagcagcgtggtgggtgaaaacggcattacgccgctggaatgcgccaaagcgatgcagaaagagaacggcgatctgccgttgatggtacacatcggcaacaacccgccggatctggatgagatcgctgagcgtctgacggcgggcgatatcatcactcactgctataacggcaaacctaatcgcattctgacgccggacggtgagctgcgcgcgtcaatcacccgggcgctacagcgcggcgtgcgcctggacgttggtcacggcactgccagcctgagctttgcggtcgcgcagcgcgcgattagcttaggcattttgccgcacaccatcagctcggatatctactgtcgtaaccgcatcaatggcccggtttattcgcttgccaacgtgatgtcgaaattcctcgccatcggcatgacgctgccgcaggtcatcgactgtgtgacggcaaatgctgctgatggcctgaacctgaaaagcaaaggccgccttgagccaggtctggacgccgacttgaccctctttacgctcaggcgccagccaaccgtgctggtggacgctgaaaacgacagcttacaggctgaaaaattgctggtgccgcttgccgccatccgtgcgggtaagggctatgtaaccgaacaggggagtgctgaacgtgacttcgatttatga

SEQ ID NO: 75068 - DNA, 1119 bp, Citrobacter koseri
gtgacttcgatttatgaaaaatacaatctgaaacaagtgattaatacatcagggcgcatgaccgcgctcggtgtttccaccccgcgcccggaagtggtgcaggcggcaatggatggcatgaaccagtactttgagatgaaagatctggtcaataaaaccggggagtacattgcaaaactgctggatgtggaaggggcgacggtcgtctcctgcgcctcggcggggattgcccagtcggtagcggcggtactggttcaggacagcgactggctgctggaaaacctgcatgttaccccgatcgagaataacgaaattgtattgccgaaagggcacaacgttaactttggcgcgccggttggcacgatggtggcgctgggcggcggtaagttggtcgaagccggttatgccaacgaatgttccgcagcgcagcttgcggcggcgatcactccgcgcacggcggcgatcctctatatcaaatctcaccactgcgtgcagaaaagcatgctcagcgtagagcaggcggcggtagtcgcgcgcacgcacaatttaccgttgattgtggatgcggcggcagaagaggatttgcagtgttactaccgcgtcggcgcggatctggtgatctacagcggcgcgaaagcgattgaagggccgaccagcggtctggtgatcggtaaaactcagtacgtcgagtgggtgaaacgccagacggcgggcattggccgcgccatgaaagtcggtaaagagggcatcctcgggctgacctgcgccatcgaactctacctgaacgcgcagaaagagagcggtgcggagatggtcgaaaaaatgacgccgtttattggtgcgctgaatgcgcttaatggcgtgagcgcccgcgtggtgtgggatagcgccggacgcgatatcgcgcgaacggaaattaaattcgatgaggccgtgaccggcattgccaccggcgatctggtggaagccctcaaacagggtgagtacgccatctatttccgtggctacaaagctaacgaaggcattattgaggcggatgtccgcagcgtaaatcaggcgcaactggagattgtggcacgccgtattcgcgacgtgattaatcaggagaaaaaagcatga

SEQ ID NO: 75069 - DNA, 741 bp, Citrobacter koseri
atgaaactgacccctaacttttaccgtgaccgcgtttgtctgaacgttctggcgggttccaaagagaacgcccgtgagatttatgcggcggcggaaggccatgtgctggtcggcgtgctctccaaaaattacccggatgtcgacagcgcggtggcggatatgcgcgaatacgcggcgcttatcgacaatgccctctctgttggcctgggggctggcgatccgaatcagtcggcgatggtgagcgaaatctctcgtcaggtgcagccgcagcacgttaatcaggtctttaccggcgtggcgaccagccgcgcgctgttggggcagagtgaaacggtcgttaacggtctggtctccccgacggggacgccgggcagagtgaaaatttctaccggcccgctgagcggcaaaacgccggacggcattgttcccgttgagacggcgattgccctgctgaaagacatgggcggcagctcgattaaatacttcccgatgggcggcctgaaatgccgtgatgagtacaaagcggtagcggaagcctgcgcccgtcacgacttctggctggagccgactggcggtatcgatctggaaaactttggcgagattttgcagattgcgcttgatgctggcgtcagcaaaatcattcctcacatttatagttcgattattgataaggtgagtggcaacacccgtccagacgatgtgcgccagctgttggccattacccggacgtgcgtaggttaa

SEQ ID NO: 75070 - DNA, 1911 bp, Citrobacter koseri
gtgcgattccccaaccaacgtttggcacagctgtttgatatgttgcaaaacgagacgctgccgcaggatgagctggcgcagcggttgtcggtttccacgcgcaccgtgcgggcggatattactgcgttgaatgcgttgctgacgcagtatggcgcgcagtttgttctgagccggggcaacggttatcagctccgaattgacgatcaggcccgctatcaaaccctgcgggagcagcagccgagtacgctgcgcatcccgcgaaccagccaggaacgggtgcactatctggtggttcgtttcctgacgtccgctttctcgctcaaactggaagatctggcggatgagtggttcgtcagtcgcgcgacgctgcaaaatgatatggcggaagttcgcgagtggctgcgccgctatcatctgacgctggaaacccgcccgcgccacggcatgaaattgttcggcagcgaaatggcgatccgcgcgtgtctgaccgatctcctgtggacgctggcgcagcaggatccggcgaacccgctgattgtggaagaagcgcttaacgcgggcgtaccggaacaattgcagccgattttgcaggaaatatttacccgttttcgtattcgtttgacagatgaaggcgagctgtttttacgcctgtattgcgccgtcgcggtacggcgtattagcgaagggtatccgctgtcagaatttaccacggaagaggtggaggacaacgtctgcttcgcggcgcgggatattgcggcggtgctgcaacacctggcggataaaccgctgtcggcgtctgaagagaactggctgaaggtacacattgccgcacggcaggtgcaggagattgctcccagcgccatcaatgccgatgacgatgaagcgctggttaactatatcctccgttttatcaacacgcagtacaactataacctgttgaatgacaaacagttacacgccgacctgctcacccacatcaaaacgatgatcacgcgggtgcgctatcagataatgatccccaatccgctactggaaaacattaagcagcactaccctatggcgtgggatatgacgctggcggccgtgtcgggttggggaaaatacacgccatataccatcagcgaaaacgagattggttttctggtattgcatatcggcgttgggctggaacgtagttacaacatcggttaccaacggcagcctaaaatcctgctggtatgtgacgcgggaaatgcgatggtacgcatgatcgaagcggtgctggcgcggaaatatccgcagattgagatcgtgagaaccctgactctgcgtgactatgagcagcgggacagcattgccgaagattttgtcatctctaccgcgcgcgtcagcgaaaaagataagccggtggtcatgattgcgccattccctaccgactaccagctggagcagatcggcaagctggtgctggtggacagaacccgcccgtggatgctgaacaaatacttcgacgccgctcactttcgcattatcgacggaacaatggatcagcagacgctgtttaagacattgtgcgatcagctgcaaagcgaggggtttgtggatgcggagtttctcgactcggtggttgagcgtgaggccattgtcagcacgatgttaggcgacagcatcgccctgccgcacgccctgggattgctggcgaagaaaacggtggtctataccgtgctcgcgccgcagggcatcgtctggggagatgagacggcgcacgtcatctttttactcgccatcagtaaaagcgagtacgaagaagcaatggcgatctacgatatttttgtcactttcctgcgtgagcgcgccatgacgcgactctgcgccagccagaattttgccgagttcaaagcggtagcgatggagtgtgtgagccgtttttga

SEQ ID NO: 75071 - DNA, 465 bp, Citrobacter koseri
atgaactttcaccagtactaccccgtcgacatcgtcaacggccccggcacgcgctgtaccctgtttgtttccgggtgcgtgcatgaatgccctgggtgttacaacaaaagcacctggcggctcaattcgggtaaaccgtttacgaaagagatggaagaccagatcattaacgatctgaacgacgcgcggattaaacgccaggggatctcactgtctggcggcgatccgctgcatccccaaaacgtaccggacattctgaaactggtgcaacgcattcgcgaagagtgccccggcaaagacatctgggtatggacgggttataagctggatgaactcaccgccgcgcaaatgcaggttgtggatctgattaacgtgctggtcgacggtaaattcgtacaggatcttaaagacccgatgctgatctggcgcggcagcagtaaccaggtcgtccatcatttacgttga

SEQ ID NO: 75072 - DNA, 2139 bp, Citrobacter koseri
atgacaccgcatgtgatgaaacgagatggctgtaaagtgccgtttaaatcagagcgcatcaaggaagccattctgcgtgcagctaaagcagcgggagtcgatgacgcagattactgcgccaccgtcgcagaagtcgttagtaaccagatgaatgagcgcagccaggttgatatcaacgagatccagacagccgttgagaaccagctgatgtccgggccgtacaaacaactcgctcgcgcttacattgaataccgccatgaccgtgatattcaacgtgaaaaacgtggccgtctgaaccaggaaattcgtggtctggttgagcaaaccaactccgcgctgctgaacgaaaacgccaacaaagacagtaaagtgatcccgacccagcgcgatctgctggccggtatcgtggcgaaacactacgcccgtcagcatctgctgccgcgtgatgtggtgcaggcgcacgagcgcggcgacattcactatcacgatctcgactattctccgttcttcccgatgttcaactgtatgctgatcgatctgaaaggcatgctgacgcagggctttaagatggggaatgcggaaatcgagccgccgaaatccatctccaccgccacggccgtaaccgcgcaaatcattgcacaggttgccagccatatttatggcggcaccaccatcaaccgtattgatgaagtgctggcgccgtttgttaccgccagcttcaataaacaccgtaagaccgccgaagagtggcagatcccggacgctgacggctacgcgcacgcccgtaccgagaaagagtgctacgacgctttccagtctctggaatacgaagtgaacacgctgcacaccgccaacggacagacgccgttcgtcacctttggttttggcctcggcaccagttgggaatcgcgcctgattcagcaatccatcctgcgtaaccgtatcgcaggtctgggtaagaaccgtaaaaccgccgtgttcccgaaactggtgtttgcgattcgcgacggtctgaaccacaagtttggcgatccaaactacgacatcaaacagctggcgctggagtgcgcaagcaaacgcatgtatccagacatcctgaactacgatcaggtggtgaaagtgaccggttcgttcaaaacgcctatgggctgtcgcagcttcctcggcgtctgggaaaatgagaacggcgaacaggttcacgatggccgcaacaacctgggcgtcatcagcctcaacctgccgcgtatcgcgctggaagccggtggcaatgaagcaacgttctggaagctactggacgatcgcctggtgctggcgcgtaaggcgctgatgacccgtatcgcccgtctggaaggcgtgaaagcccgcgttgcgccaatcctttatatggaaggcgcctgtggtgtccgcctgaaagctgacgatgacgtttccgagattttcaaaaatggccgcgcgtcaatttcgctgggctatatcggtattcacgaaaccatcaacgcgctgtttggcgacaaacatctgtacgacagcgaagcgctgcgcgctaaaggtatcgccattgtcgagcgcctgcgtcaggcggtggaccagtggaaagacgaaaccggctatggcttcagcctgtacagcacgccgagcgagaacctgtgcgaccgtttctgccgtctggataccgctgagtttggcgtcgtgccgggcgtgaccgataaaggctactacaccaacagcttccacctcgacgtggagaagaaggtgaacccgtacgataaaatcgatttcgaagcgccgtatccgccgctggcgagcggtggcttcatttgctacggcgaatacccgaacattcagcacaacctgaaagcgctggaagacgtctgggattacagctatcagcatgtgccgtattacggaaccaacacgccaatcgatgagtgttacgagtgcggctttaccggcgagttcgagtgcaccagcaaagggtttacctgcccgaaatgcggtaaccacgacgccgcgcgtgtttcagtcacccgccgcgtatgcggttatttaggcagcccggatgcgcgtccgtttaacgccggtaagcaggaagaagtgaagcgccgcgttaagcatttaggcaatgggcagatcggttaa

SEQ ID NO: 75073 - DNA, 585 bp, Citrobacter koseri
atggagttgtccgcgcttacgcattctgaactgatttttatcgatccgccgcaccgcactcctgaagcggtgatcggggaaatgtccgctgccctgttcaggcagggcctgatcaacgacaaggcgatgtttattgatagcgtcctgcgccgtgaaagcgaagggcccacggcgttgggagagtcgctggctgtcccacatgggaaatgcggctcggttgtccaggccgcatttagcatcgccctgtttcgccagcccgtcatgtggccgggtctggagggggacgaggaggttcaactggtgtttctgctggcgattcccccagaagaagcaggcagtacgcatatgcaattattaacccgactaacctcgtctctggtggacgataaagtgcgtgaatcactcatcaacgcttcctctgccgaagaggtgcttgcgctgctctcgccagatgcgccttcagtttcgccagaccccgctattgcggtgaaaaacacccggcttgtccccctggttttggggatcgtcgctgttgctgcatttatcaatgcgggtattcactggatgaacgcaacagcgcaataa

SEQ ID NO: 75074 - DNA, 1710 bp, Citrobacter koseri
atgagccagaacgcccatcataccttcatcaaaaatacgttagctcagctttatccccatgcggatcggtacgcgctggcggcgaaaatcgagcaactctgtcaacgctggaagctacgggagcaaaccgccgcgcctttggatcagagccgggtgtggatgatagcttacggcgacagtatccatagcggggacgcaaacgctcttgcctgtctgcatcagttttcgacacgctggcttaaaggcgtcatcagcgacattcacctgctgcccatgttcccgtggacatctgatgatggcttcagcgttaaagattatcgccacattgcgccagagttaggccagtggtcagacattgtagcgctggcaggcgattttaatctgatgtttgatttcgtgattaaccatatctctcagcaaagccgctggttccagggctatttacacggcgaaccgcgttatcagcactactttattagcgccgaccctgacgatgactaccatcttgtcacgcgtccacgcgcccttcccctgcttacgccattcaagcgcaaaacgggggaaaccgtacatatctggacgacattcagcgccgatcagatcgatctgaatttccgtgaacctgacgtgttactggaaagtatcgatatcctgctggaatacgcagcgcgcggcgcgcgcgcaatcaggctcgatgcgatcggttttttgtggaaagagcgaaacagcacctgtattcatctgccgcagacgcatctgatcgttaaactctggcgcgccattctggatgcaacctggcctgactgcctgttgattacggaaaccaatgtcccgcatcaggaaaatatcagctacttcggcaacggcgatgaagctcacatggtgtatcagttccccttgccgccgctgactctccatgcttttttacgcggtaatgcacgctggttacgccagtgggcgcaacgtctggaacaggatgcgcttcccgacaagacgaccttttttaatttcctcgccagccacgacggcatcgggctgcgtcccgtggaaaatctcctttgcgcagaagagcggcagtttctgataagcgaggtagaacgcaagcaggggcgtatttcatggaaaaccaaccctgacggcagccagtcgccgtatgaacttaacatcaactttctgagcgcattgagcgagcctggggaaagtcccgacgaccagctcgccagattcaccgccgcgcacgccatcctctttatgctgcggggcgtgcctgcgatctattatcacagcctcttcggcagtgaaaatgacaacgccgggctgctcgaatcgggcataaatcgccgcattaaccgggaaaaactggacgctgccacgctccatgagcagctgctctcgccggaaacgagacaatcccgaatctacgcgtctctggcgaagttagcgcgtatacgtcagcagcattccgcattttctccgttcgcctcgcagcacgttcctgaattgcctgacgcgctctttggcgtcgttcgccagcatcctacagaaggcgaaacgctgtactgcgtcgtgaacgtcacaggaataccacaatcactttcactgcctgtcacaggaacagatctgctgacgggcgcagcattcaacggcgcttgcgagctttccggctggcaaacggtatggattctcgctgatacgcaaccggaggcataa

SEQ ID NO: 75075 - DNA, 2619 bp, Citrobacter koseri
atgagcaacattcacgtcatcgcccatacgcactgggatcaggaatggtatttcaccttgcaggatagcaatattctcgcgtcctggaattttgcggatgtgatccgaaccctggaacagaaccctgcgtatacctgttaccacttcgacggccaaaccgctgtcgtggaagatttcctggccgtcaatcctcaatactgcgaacggctgaaacagctggtcgccgacagacggctttttatcggcccgtggtacacccagacggatacgtataatgttcatggcgaatccatcattcgcaacctgaaatacgggatactttccgcgcgtaaactgggccatgccatgatggtcggctatttacccgatacgttcggccataacagccagctcccgactctgcttcgcgggtgtaaccttgataacatcgttttctggcggggcatcaaccatgatacgcaggttgaaaagagtcagttcatctggcaagcgccgtccggcgcgcaggttatcgcttgcgccatgcccttcggctatggcgcggcaaaaaatattcgtgcaaacgacgcgcatctgcacgacaaaatattcccaatcgttaaccacatccgccaacgctccggcctgaatgatctgctcctgccctgcggcggcgaccaggtcaatattgatccccatctgccggagatactgcgtatcgccagcgcatgttcccctgaaggcgatcgttttcagatctcctctctggaagcgtacattgaccgccttcgacaacaggcatcgggatatgatcgctggcaaggagaattaaaatctccccgctatacccgcattcataaaacaatcggttcagtacgttacgacatcaaaaagaagaattatgatgttgaacagttcctgttaggcaagctcgaacccaccattgcgctggcgcgttatcagggcattgaggtcaacgtgcagtgggttgaccagatatggaaaaaccttctgcgtaatcatgcgcatgactccatcggcgggtgtaacagcgatgccaccaatcgcgatattctccatcgccttgagcaaacggaacaacttagccatagcctgtggaatctggtcgtaaaagaactggcgaccgccagttgtgaagagggcgatcttttcgtcatcaaccccagcgccaccgcctggtcgggcattatcaaagccacattatatagccgtacggccggtattgaactcagccatcatgcgcgtcctctttcgttcagcgttctcgaacgcacgcaggtctccggcgggcgcacggttcaggttactgtacaaggcgaaaaagaggtcgaacttccgccttattaccgctggcaggtcgctattgacgcgccagcgttaccgccgctgggttatacccacattcaggtgcaggaatcgtcacgcaccgcgcctgcaatgcgcaactgcgctgaaagcgccattgaaaacaacgattaccggctggtgctgcatgccggttcgctgtcgcttcatgataagcgcaatgaccgggtaatatccgacctgctgacctttgaagactgtgcggatgcgggcgatagctatgacttttcgccgctggagggcgatgttccgcagcgctgccacacatttacgctcattacctgcgagaaaggcccgcacattgaacggatgacgctaagcgccacgctgatgctgcccccttcactggcggcgcgagcggcgcaggatgttcagccctaccctgtacgccttgtctgcgagcttcgccagcatgacgctcagctttttatcgacgtttctctagaaaacaccgtctgcgatcaccgcctgcgcttactcatcaacagcgacattcgcaccacggaatccatcgcctctcagccctttgccgtcatccggcgtcctgttgccgatgcgcctgccgactggcgtcagcactatcgggaaaagccgatcgatattgaaaccagcgagggcattatcgccatcgaggaaaacaaccgctcgctcatcatcaatagcctgggcatgaaagagtttcagatatgccagaacgggacggcgcagatagcgttgacgttgtttaaatcaacgggagtcctgggacgtgacgatcttgactggcgacccggacgcgcttccggcattaataataccgtcgtcaacacgcccgacgcgcagctgcttaaaccgctgcatttcagcctgacgctggcgctcgccgatcgggccgcccctgtgacgttaaggcatcttgaaacccgcgtgacgcgccagccattcacctggcaaaatcagacgttgaacacgctggacaaccgcctggagcgttttacgctcaattttgtttcgcgctcgctgccggaaacattcagcctgctgacgcttcccgaaccgctgatgctttccgcaatcccccatgcccatacggtagacggaacaatcattcgcgttttcaatgccggagagcacccggtgccgctcccgccttcgctaagaaatattccgcaaatcaattatctggaagaacctgtcgcagattgcgccaccattttgccttgcagtacgtgtgattttctttttactcatcaggagcgtaacgaaaaagtatga

SEQ ID NO: 75076 - DNA, 1398 bp, Citrobacter koseri
atgacaaggcaaaaagtcgtcgcgataacggcatgcccgaccggcatcgctcatacctttatggctgccaacaaaattgcagcgtggggagaagaaaataacgtcatcgtcaaagtggaaacacaaggaagcgatggcgtcaaaaacaagctttcccgacaagatattgccagcgcagatgccgtcattctggcaatcgatgttcccatccaggacgctgaacgattcgataacgttcctcatctcaaaatacgcactcaggaactgatcaaaaacaccgatcgttacctgcgtcaggcgctggcgatggataaaaccgtaacggccgcgtgtgaagaacaggaagaggctcgctccgcctggcagaccttcatcggccatattatggcggcgatcagctatatgctcccggtcgtcgtcctcggcggattactgatggcggtcgccaaaataaccgggcagtttattccaattgccggtacgccgttcgaggtgctggataaactgggctttatggtgatcaagttcatgtacccggtttttgccatgtacctcgcgttctctattgccggtaaacctgcgctgatccccggacttatcggcggcattatgtccgacgaggtctataaacgcttttttgatctcgacggttttatgccctcaggcttcttcggcgccatcgccatcggcttttttgtcggtcatctggtgcagtggctcaacaataccattaacgttcgcgcccaacttaccaccattaaaacgatgcttatcgtgccgctgtgtaccggcattacgctcgtcatcgttatgcagtacctgatcaaccccttctttggcgcaatcaaccaggcgatggtcgagtttttcacctccgctggcgacaccgggcgcggtttttacgccatgatgatcgccgcagggacggccttcgacctcggcggccccatcaataaagccgctggttcggtggcgctggggctcaacggcgtcagcgaaaccttcgatttaaccgccagagagctggcgatcgtcattccatctatcggcgtcggcctggcggcgttactgaataaccgttttggcctgcccaacgtgtttagcagcgaagaaaaaaccgtcggcggtacgtctttactgctgggattcattggcatttcagaaggcgccattcctttcatcctgaaaaatccacgcctgattccggtctttatggtcggcgcgatgtccggcgcgcttattgctatcgcactcggcgtgaagcaatcgctgccgttgcctgccatctggggatggccgctggcgacaaatgtcacagggtatctgatcagcgtgtttgccggttctctcgtatgcgcgctgggcgtgctcttcgccagccctaagatcgccaaataa

SEQ ID NO: 75077 - DNA, 660 bp, Citrobacter koseri
atgaattcctttcagggtagtgaaagattaatatttgagtatattcagtgtcatgctcatgaaatatcgggtatttcagctaaggtgattgcgagcgaaacattcaccactacaacatccgttaatcgggtgtgtaaaaaaatgggataccggagctataccgagctacggtatcagttttctcgcgacaggttaatagccgaacccgtaagatatgttgttggtgatgaaaaagaagagaccattacacaactgtgcaacatactggttaattccagccatatcttcttatatgcgcgcggcgcgtcattgaccagcctgaattatttatcgcgttttttgtcgctggcgagcttgccgcacctcattctcaatgatgttcatcagctgacgcgtgtctctaaaggtacgctggtgttgatcagcaaatcgggtgaaacggcatcgttagtcgaaatggcgcgaaacgcgttacgtaagggattaaaaatcattgcgattacaaaacgagaatccacgttagcgacgatttcaacattatgctggcctctggatattgatattgacgcaatctcgttatatcaacgagaaggccagctggaactgctgacggtagtagaccgcatcggatgttatctgctgcaatacgatgcggcatag

SEQ ID NO: 75078 - DNA, 747 bp, Citrobacter koseri
atgaataaacctcttattaagttaagtttactttcagctttactcattagcagccagggatggtgcggtaatacctctgttgatttgcgttttggtcataataccaattcagaagctaatgattccagaattaaagtcatgcaccaggccgacaatggtttttatttctccgttgaagctgcgcaaaaccataacgatacgttttttggcgataccgatcgctacagttccgatgataaaggcgtgaccgaagcggcccaggaaatagaaactcgctggcgctttgatttaggtgacggttacgcggtcgcaccagggatggtcaccgtatttacgtccagtaatacccattatcgcccttttattcagggctggaaatccttcgataatggccttaacctttccgcccgttatcgttacaacacggtgaacgatgcgcacagcgacagagagttagacggcagcggttatacacgtcgtgaatctcatcagttcgatatatggtttgcctacaatattggtaactttggcatgtcttataacccccgtttccgctatcaggatggcgtcgatcaggggacgggcgacgatacttactgggaacataccctcgcgttcaactacaaactggacgatggctggacgccgtacgtcgagctggtctctcttgataaaacctatatcaatgacgacggtcatcatgaaaatgattacgccgtacgtcttggtatcgtaaaacagctttaa

SEQ ID NO: 75079 - DNA, 1656 bp, Citrobacter koseri
atgaatacccttccccactggtggcaaaacggcgttatttaccagatctatcccaaaagttttcaggacacgaccggcagcggaaccggcgatttacgcggcgttacgcagcgtcttgattacctgcaaaaactgggggtggatgctatctggctgacgccattctatgtttcaccgcagattgataacggctacgacgtcgcgaactacaccgccatcgacccggcctacggcacgctggatgattttgacaaactggcggcgcaggccaaagcgcgcggcatccgcattattctggatatggtgtttaaccacacctccacacagcatgcctggttccataacgcgctgaataaagagagtccgcaccgggagttttatatctggcgcgacggtacgtcggatgtgccgcccaataactggcgctccaaatttggcggcagcgcctggcgctggcatgcccagagcgaacagtattacctgcaccttttcgccccggagcaggccgacctgaactgggaaaatccggcggtacgcgctgagctgaaaaaagtgtgtgaattctgggccgatcgcggcgtggacgggctgcgcctggatgtcgtgaacctcatctccaaggatcagcgtttcccgaacgatctggacggcgatggtcgccgcttttacaccgacgggccgcgcgcgcatgagttcttgcacgagatgaaccgtgacgtttttactccgcgtaacctgatgacggtgggcgaaatgtcatccaccaccctggaaaactgtcagcggtatgccgctctcgatggcagcgagctgtcgatgacctttaacttccatcatctgaaagtcgattatcccggcggcgagaaatggacgctggcaaagccggattacgtggcgctaaaagcactgtttcgccactggcagcaggggatgcataacgttgcctggaatgccctgttctggtgtaaccacgatcagccgcgtatcgtgtcgcgctttggcgacgaaggcgaactgcgggttccggcggcgaagatgctggcgatggtgctgcacggtatgcagggtacgccctatatctaccagggcgaagaaattggcatgacaaacccgcatttctcccacatcaccgattaccgtgacgtggaaagccacaacatgtttgcctggctgcgcgcccagggccgggaagccaatgatttactggctattcttgccagcaaatcccgcgataacagccgcacgcccatgcagtgggatagcagcgcgaatgcagggtttacgcaaggcgagccgtggatcaacctctgcgataactatgcggacatcaacgtggcggcggcgctaaatgatgaagactcggtgttctacacctatcaaagactgattgccttgcgcaaaacagagccggtcttaacctgggggaattatcaggatctgctgccggacagcccgcatgtatggtgctatcgccgcgaatggcaggggcagcggttactggtggtcgccaacctgagcaacgcctgtcaggactggctgccagagcatcacgaaggaaactggcaggcgctgatgcataactacgacgaggttgccacccgccctgccgccatgacgttacgcccgtttgaggccgtctggtggttgcagaagtaa

SEQ ID NO: 75080 - DNA, 1422 bp, Citrobacter koseri
atgatgagcaaagtaaaacaagctgatatagaccagctgattgaactggtcggcgggcgagacaatatcgccacggtgagccactgcattactcgcctgcgctttgtgctgaaccagccagcaaatgccagaccgaaagaaattgaacaattaccgatggttaaaggctgcttcaccaacgccgggcagttccaggtggtgattggcactgacgttggcgactactacaacgcgctgctggcgaccaccggtaaggcgcacgccgacaaagagcaggctaaaaaagccgcgcggcagaatatgaaatggcacgagcagttgatctcccacttcgctgagatcttcttcccgctgctgcctgcgctgatcagcggcggtctgatcttaggttttcgcaacgtgatcggcgatctgccgatgagcaacggccagacgctggcgcagatgcatcccgcgctgaaaacgatctacgacttcctgtggctgatcggcgaagcgatcttcttctacctgccggtcgggatctgctggtctgcggtgaagaaaatgggcggcacgccgatcctcggtatcgtactcggcgtaacgctggtgtcgccgcagttgatgaacgcctatctgctgggccagcaggctcctgaagtgtgggacttcggcatgttcagcattgcgaaagtcggctatcaggcgcaggtcatcccggcattgctggcgggtctggcgctcggctttattgaaacgcgcatgaagcgtatcgtgccggattacctctatctggtggtggtgccggtatgctcgttgatcctcgcggtctttctcgcacacgcctttatcggcccgtttggccgcatgattggcgatggcgtggcctttgcggtgcgccatctgatgaccgggagtttcgcccctgtcggcgcggcgctattcggcttcctgtatgctccgttggtcattaccggcgtacatcagactacgctggctatcgatatgcagatgattcagagcatgggcggtacgccggtatggccgttgattgcgctgtcgaatatcgcccaggcttccgctgtggtgggcattattatctccagccgtaagcacaacgaacgcgaaatttccgttccggccgccatctccgcctacctcggcgtgaccgaaccggcgatgtacggcatcaacctgaaataccgcttcccgatgctgtgcgccatgatcggctctggcctcgccgggttgttatgcggcctgaacggcgtcatggcgaacgggatcggcgtcggcggcttgccgggcatcctttccatccagccgagctactggcaggtgtttagcatggcgatggcgatcgcggtcgtcatcccaatcgtgctgacttccgttatctatcagcgtaagtaccgtcagggcacgttgcagattgtctga

SEQ ID NO: 75081 - DNA, 948 bp, Citrobacter koseri
atgcagaatcggctgaccattaaagacattgcccgcttaagcggcgtagggaaatccaccgtttcccgcgtgctcaacaacgaaagcggggtaagtgaacggactcgtgaacgtgtggaagccgtaatgaatcaacatggtttttccccttcccgttccgcacgcgccatgcgcgggcaaagtgataaagtggtcgccattattgttacccgtctggattccctgtcagaaaacctcgccgtccagaccatgctgcccgcattttacgagcagggttacgatcccatcatgatggagagtcagttctcgccagaactggtagaagaacacctggggatgctcagacggcgtaatattgacggcgtggtgctgttcggttttaccggtatttgcgaggagatgcttgcgccctggcaggcctcgctggtgctgctggcaagggacgccagcggttttgcgtcggtgtgctatgacgacgaaggcgctatccataccttaatgcagcgtctgtatgaccagggacatcgggcgatcagctttctcggcgtgcctcacagcgacgtcacgaccggtaagcgccgtcacgaagcctatctgagtttctgcaaaaaaaataaactgcaccctgtcgccgctctgcctggcctggcgatgaaacaaggctatgagcacgctgcggatgtcattacgccagacaccagcgcgctggtctgcgcgaccgatacgctggcgctgggcgccagtaaatatttgcaggaacagcgtatcgattctctgcaactggcgagcgtcgggaacacgccgctgatgaaatttctccacccggagattatcacggttgatcccggttacgctgaagccgggaaacaagcggccttacagctgatcgaacaaatcaacggccgcagcgatccccgccagatcgtcattccgtctaccctctcctga

SEQ ID NO: 75082 - DNA, 2709 bp, Citrobacter koseri
atgctgaaaaatatcacccgcgagctgtttgcccgccttaaccgtcatttacctcatcgtctggtgcatcgtgaccctctgcccagtgcgcagagcgttgcgaatactccgattcccccgtcattgagcgatcgctgcctgaaaatggcggtgatggaagaggcggcgctctggcgcgcattcgatgcgcatcctgaggggctgaatgtcgcagaggtggaggatgcgcgcgagaaatacggtgaaaatcagctacccacacagaagccgactccgtggtggagacacctgtgggtctgctatcgcaaccctttcaatattttgctgactattctcggcgtcatctcctatgccacggaagatctgtttgccgcaggcgttattgcgctgatggtcgggatttcgacgctgctgaattttgtgcaggaagcacgctcgaccaaagcggcagatgcgttgaaggcgatggtcagcaataccgctacggtgctgcgcgttatcaatgagaaaggcgagaacagctgggttgagctgcccatcgaccaactggtgccgggcgatattatcaaactggcggcgggcgatatgatcccggcggatttacgcgttattcaggcgcgcgatctgtttgtcgcgcaggcttcgctcacgggcgaatctctgccggtagaaaaagtggcgacaacccgcgaccctaagcaaagcaatccgctggaatgcgacacgctgtgctttatgggcaccaacgtggtgagcggaacggcgcaggcgatcgtcatcgcgacgggcggcgagacctggtttggtcaactggcgggccgcgtgagcgagcaggaaagcgagcaaaacgcgtttcagaaaggcatcagccgcgtcagtatgctgttgatccgctttatgctggtcatggcgcctatcgtgttgatcattaacggctataccaaaggcgactggtgggaagcggcgctgtttgcgctctcggtcgcggtagggctgacgccggaaatgctgccgatgattgtcacctccacgctggcgcgcggggcggtgaaactgtcgaagcaaaaagtcattgttaagcacctggacgccattcagaacttcggcgcgatggatattctctgcaccgacaaaaccggcacgctgactcaggataaaattgtgctggagaaccatacggatgtctccggcaagcccagcgaacgcgtgctgcattccgcctggctgaacagccactaccagaccgggttgaaaaatctgctggataccgcagtgctggaaggcgtggatgaagagtctgcgcgtcagctctccgggcgctggcagaaaattgatgagatcccgtttgattttgagcgtcgccggatgtccgtagtggtggcggaagaaaccgatgtgcatcaactggtgtgcaaaggcgcgttgcaggagatcctcagcgtctgcacccaggtgcgtcacaatggcgatattgtgccgatggatgacaacatgctgcgccgggtgaagcgcgtaacggatacgctgaaccgccaggggctgcgcgtggtagccgttgccacgaagtatctgcctgcgcgggaaggggattatcaacgcattgatgagtctgacctgatcctcgaaggctacattgcgtttctcgatccgccgaaagagacgaccgctccggcgctgaaggcgctgaaagagagcggcattaccgtgaagatcctcactggcgacagcgaactggtggcggcgaaagtatgccatgaagtcgggcttgatgcgggcgatgtggtgactggcagtgatatcgaagggctgagcgatgatgaactggcggaacttgccgcgcgcaccacgctgtttgcccgcctgacgccgatgcacaaagagcgcatcgtcacgctgctgaaacgcgaagggcatgtggttggctttatgggcgatggcatcaatgatgctccggcattgcgtgcggcggatatcggcatttccgttgatggcgccgtggatattgcccgcgaagctgcggatatcatcctgttggaaaagagcctgatggtgctggaagagggcgttatcgaagggcgtcgcacgttctccaacatgctgaaatacatcaaaatgaccgcgagttctaactttggtaacgtctttagcgtgctggtggcgagcgcattcttgcccttcctgccaatgctgccgctgcacttactgattcagaacctgctgtacgatgtatcccaggtggcgatcccgtttgataacgtggatgacgagcagatccagaagccgcaacgctggaatcccgccgatctggggcgttttatgatcttcttcgggccaatcagttcgattttcgacatcctgaccttctgcctgatgtggtgggtattccatgcgaatgtgccggaagcgcaaaccctgttccagtcgggttggtttgtcgtcgggctgttatcgcaaacattgattgtgcatatgattcgcacgcgccgcgtaccgtttattcagagccgcgccgcatggccgttgatgctgatgacgctggtggtgatggtggtgggtatcgcgctgccgttctcgccgttggcgggctatctgcaattacaggcgctgccgctgagctacttcccgtggctgatcgctattctcgcgggttatatgacattgacacaattagtgaaaggtttttatagccgtcgttacggctggcaataa

SEQ ID NO: 75083 - DNA, 510 bp, Citrobacter koseri
atgggtgaattttattcgtcggtaatggatttgttttaccgaatctcaatgtgggttgccggattggcgctgttgattatggtggccgttattcccgtcgggatatttgcgcgctatgtgatgaacagcgcgctgtcatggccggaaccggtcgccattctttgcatggtgacattcacctttgttggcgccgcggtgagctatcgcgcgggttcccatattgccgtcagcatggtgaccgaccgcctgagcgagggcgcgcagcgaatctgtttcattgtggcggatctgatgctgatggccgtcagcctgtttatcctctggtacggctccctgctgtgctacgacctgtgggaacagccggtggcggaatttcctctgttatcagcgggggagaactacctgccgttgcctgtcggctctgccatcacgctgcttttcattatcgagaaaattttccgtggttcgcagtatcaacgtcctgtcgtcatgctgggctcaacccattaa

SEQ ID NO: 75084 - DNA, 1287 bp, Citrobacter koseri
atggatgcatttattctcgtctttacgctcggcattatgctggcgattggggtgccggtagcatacgcggtgggcattagcgcgatcgttggcgcctggtatatcgacattcccctggaagcggtcatgatccagctcaccagcggcgtgaacaaattttcgctgctggcgatcccattttttattctggcgggggcgattatggcggagggcggtattgcgcgtcgcctggtgaacttcgcctacatctttgtcggctttatacgcggcgggctgtcgctggtgaacattgtggcgtctaccttttttggcgcgatttccggctcgtccgtcgcggatacggcgtctatcggctcggtgatgatcccggagatggataaaaaaggctatccgcgtgactttgcggcggcggtcaccgccagcggctccgtacaggcgatcctgacgccgcccagccacaactcggtgatttattcgctggcgacgggcggtacggtgtcgattgccgcgctgtttatcgccggcattctgccggggctgctgttaagttttaccctgatggtgatgtgcgtcggttttgcccataagcgcggctatccgaaaggcgagcgggtgccgtttcgccaggcgttgaagatttttgtcgatacgctgtgggggctgatgacggttgtcatcatcatgggcgggattctctctggcatcttcaccgcgacggaatcggcggcgatcgcctgtctgtgggccttcttcgtcactatgtttatctaccgcgactacaaatggtctgaactgccgaagctgatgtaccgcacggtaaaaacggtcaccattgtgatgatcctgatcgggttcgccgccgcatttggcgccatcatgacctacatgcagctaccgatgcgcattaccgaggcgttcaccagtatttcagataacaaatacgtcatcctgatgtgcattaacattatgctgctgctgatcgggacactgatggacatggcgccgctgatcctgatcctgacgcctgttctgctgccggtcactacggcattgggtattgatccggtgcatttcggcatgatcatgctggtgaatcttgggatcggcctgattacgccgccggtgggatcggtgctgtttgttgccagtgcggtgagtaagcagaaaatagagcaggtggtgaaggcgatgctgccgttctacgcggtactcttcctggtgttgatgttagtgacctatattccggcgatctcgctgttcctgccgaaactgtttggggtgatgtga

SEQ ID NO: 75085 - DNA, 387 bp, Citrobacter koseri
atgagcaaaactatcgcgacggaaaatgcacccgcagctatcggcccatacgttcagggcgttgacctgggcagcatgatcatcacttccggtcagatcccggttgatccaaaaaccggcagcgtaccggatgacgtgtccgctcaggcgcgccagtcgctggaaaacgtaaaagctatcgtcgaagccgcaggcctgaaagtgggcgacatcgtgaaaacaaccgtgttcgttaaagacctgaacgacttcgcgaccgtgaatgcgacctatgaagcattcttcaccgagcataatgcgaccttcccggcacgttcatgcgttgaagttgcgcgtctgccgaaagacgtaaaaatcgagatcgaagcgatcgctgttcgccgctaa

SEQ ID NO: 75086 - DNA, 462 bp, Citrobacter koseri
atgacacacgacaataaactacaggttgaagcgatcaaacgtggcaccgtaatcgaccacattcccgcgcaggttggctttaagttactgacgctgttcaaactaaccgagaccgatcagcgcatcaccatcggccttaacctgccgtccggcgagatggggcgtaaagacctgattaaaatcgagaacaccttcctgaccgaagaacaggttaaccagctctccctgtacgcgccgcaggcaacggtaaaccgcatcgataactatgatgtggtgggcaaatcgcgcccgagcctgccggatcgcatcgacaacgtgctggtctgcccgaacagcaactgcatcagtcatgctgagccggtttcatccagttttgcagtgaaaaaacgcacagatgacattgcgctcaaatgtaaatactgcgaaaaagagttttcgcattatgtggtgctggccaactaa

SEQ ID NO: 75087 - DNA, 936 bp, Citrobacter koseri
atggctaacccgctataccaaaaacacatcatttccataaacgacctcagccgcgatgacctcaatctggtcctagcgacggcggcgaaattaaaagccaatccacagccggagctgctgaagcataaagtgatcgccagctgcttcttcgaggcatccacacgcacccgcctgtcgtttgaaacctcgatgcaccgcctcggcgccagcgtggtgggcttctccgacagcgctaacacgtcgctgggcaaaaaaggcgagacgctggcagataccatctccgttatcagcacttatgtggacgcgattgtgatgcgtcacccacaggaaggcgcagcgcgtctggcgaccgagttctccggcaacgtgccggtactgaacgccggcgacggcgcaaaccagcatccgacccagacgctgctggatctgtttaccattcaggaaacccagggccgcctggacaatctgaacatcgccatggtcggcgacctgaaatatggccgaaccgtacactcactgacgcaggcgctggcgaagtttgacggcaaccgcttctactttatcgcgccggacgcgctggcgatgccgcaatacattctggatatgctggatgagaaaggcattgcctggagtctgcacagcgccatcgaagaggtaatggcggaagtggatattctgtatatgacccgcgtgcagaaagagcgtctggacccgtccgaatacgccaacgtcaaagcgcagtttgtcctgcgcgccagcgacctgaacggcgcgcgtgaaaacatgaaggttctgcatccgctgccgcgtattgatgagatcaccaccgacgtagataaaacgccgcacgcctggtacttccagcaggcaggaaacggtattttcgctcgccaggcgttactggcactggttctgaatagcgatctggcactgtaa

SEQ ID NO: 75088 - DNA, 489 bp, Citrobacter koseri
atgaaggaatacaatgattgctccgccaaagaacagcagcaactggcggtatgtcagcgcctgattacagaaaaaagttacttatcccaggaggaaatacgtcgcgatctgcaaaaccacggcttcgaaggcatcagccagtcgaccgtttcacgtctgttgaaactgctcggcgtcataaaaataagaaatacaaagggacaaaaaatttattccgtaaatccgcaattgcgccccgctcctgacgctgcgcgatcgatatccgagatggtggtcagcgtggaacacaatagcgaatttatccttatccacacggtggccggttatggccgcgccgttgccagaatcctggattatcacgccctgccggaaattttaggtgtgatcgcgggcagcagtatcgtctgggtcgcgccacgggtcgtacagcgcaccgggcttgttcacaagcaaattaattatttattaaaaatgaattcttattcatga

SEQ ID NO: 75089 - DNA, 1404 bp, Citrobacter koseri
atgggcaaatttaaatttcccagcgcgtataccatcctgtttattcttatcgcactggtcgctgtgatgacctggattgtcccggcgggcaaataccagatggcgatgaaccccacgttgggtaaagaggttccggtcgcgggcacctatgctcctaccgagtcgcatccgcaagggattaccgccgtactgttggcccccattgacggcctctacaaccacgaaacctataccgcaggcgcaatcgatgtggcgctgtttgtactaatcatcggcggctttctcggcgtagtgaacaaaactggtgcaattgatgcgggtattgaacgcgtcacggtacggctcaacggcaaagaggagtggatgatccccatactgatgggactctttgccgcaggcgggacgatttacgggatggcggaagagtcactccccttctacacgctgctggttccggtgatgatggccgctcgattcgatccgctggtcgcggccgccaccgtgctgctcggcgcaggtattggcacactcggttcgaccatcaacccttttgccacggtgattgccgccaacgccgccggaatcccgttcactcagggtatgctgttacgcatcattctgctggtcgttggctatgtcatttgcgtggtctgggtgatgcgctatgcccgcaaagtgcgcagcaacccggagttatctatcgtggcggataaaatggaggagaaccgcgctcactttcttggcaaccgttccagcacgctgttggagttcaccgcaacccgcaaatggatcttgctgattttcgccgccgcctttgccgtgatgatttacggcgtcgcggttctcggctggtggatggcggaaatttccggcgttttcctggcgtccgcgattatcgtcggcgttatcgcccggatgagcgaagaggcgttcaccagtacgtttatcgacggcgcgcgggatctgcttggcgtagcgctgattatcggtattgcacgcggcattgtggtggtgatggataatggcatgattacgcataccattttgcacagcgcggaaaatctggtatctggcttgtccaccaccatttttatcaatgtcacttactggctggaagtattgctctcattcctggtgccctcttcctctggtctggcggtgttgaccatgccgatcatggcgccgttagcggacttcgcccatgtgcaacgggatctggtggtgacggcgtatcaatcggcgtccgggattgtgaacctgattacgccgacgtcggcggtcgtaatgggaggtctggcgattgcgcgcgtgccgtatgtgcggtatctgaagtgggtcgcgccgctgctgctgatcctgacgctactgaatatggctgttttgagcgttggcgcaatgctgtaa

SEQ ID NO: 75090 - DNA, 1005 bp, Citrobacter koseri
atggctacttcactgaaaaatcgcaactttcttaaactgctcgacttcactccgacggagatccagtacctgatcgatctggccatcgagctgaaagcggcaaaaaaagccgggcgcgagaagcaaacgctggtcggtaaaaacatcgcgctaattttcgaaaaaacctccacccgcacccgctgcgcgtttgaggtcggcgcattcgatcagggcgcacaggtgacctatctcgggccaagcggctcgcagattgggcataaagaatccatgaaagataccgcccgcgtgctgggccggatgtatgacggcattgagtatcgcggttttggtcagcagatcgttgaagaactggggcagtacgcgggcgtaccggtgtggaacggcctgaccgatgaatttcaccctacgcagatcctcgccgacctgatgaccatgctggaacatgcgccaggcaaaacgctgcctgaactcagcttcgcttacctcggcgacgcccgcaataacatgggcaattcgctgatggtcggcgcggcaaaaatggggatggacatccgcctggtcgcgccgaaatccttctggccggacgacgcactggtggcgcagtgccgcgatatcgccagcgtcaccggcgcgcgcattacgctaaccgaggatgtggaggaaggcgtttatgacgtggatttcctctataccgatgtctgggtgtcgatgggcgaaccaaaagaggcgtgggcggagcgcgtcagcctgatgaagccataccagatcaaccagcaggtcatcaacgccaccggcaaccccaacgtgaagtttatgcactgcctgcccgccttccacaacgagcacaccaaagtgggccgcgaaatcgaggccgcctatggcctgaaaggactggaggtgacggaagaggtgttcgagtcagcccactccatcgtgtttgacgaagcggaaaaccgtatgcacaccattaaagcggtcatggtggcgacgctcggcgactaa

SEQ ID NO: 75091 - DNA, 933 bp, Citrobacter koseri
atggacaacaaacccactctggttgtcgcactgggcggcaatgcgctgctcaaacgcggcgaaccgctggaagcggatatccagcgcaaaaacatcgatctggcggcaaaaaccatcgcccaactgacgcaacagtggcgcgtggtgctggtacacggcaacggcccgcaggttggcctgctggcgttacagaacagcgcctatgaccgcgtcaccccctacccgctcgatattctcggcgcggaaagccaggggatgatcggctacatgctgcaacagtcgctgaaaaaccagcttccgcagcgtgaaatcagcgtcctgctcactcaggtggaggtggacaccgacgatccggcattccgcaacccaaccaaatatatcggcccggtttatgacggcgaccaggccaacgcgctacaggcggaaaaaggctggattttcaaagccgacggaaaagcgtttcgccgcgtagtgccttcgccacagcccaaacgcatcgttgagagcgacgcgatccgcaccctgatcgcccgcgaccatctcgtgatctgcaacggcggcggcggcgtgccggtagtggaaaaagccgatggttttcatggcattgaagcggtgatcgacaaagacctctctgccgctctgctcgccagtcaaatccacgcggacgcgctgctgatcctgaccgatgccgacgcggtgtacctcgactggggcaagccgacccaacgcccgctggctcaggtaacgccggaactgctcagcgaaatgcagttcgatgccggttcgatggggccgaaagtcaccgcctgcgccgagtttgtcagccactgccaggggattgccggtatcggttcactggccgacggcccggccattctcagcggtgacaaaggcaccctgattcaacccgaaaccgtcgattacgacgcataa

SEQ ID NO: 75092 - DNA, 1221 bp, Citrobacter koseri
atggaaaaacattatgtcggttctgaaatcggtcaattacgtagtgtgatgttgcaccgccctaatctcagtctgaaaagactgacgccgtcaaattgccaggagctgctttttgatgacgttctgtcggtggaacgcgcaggcgaagagcacgatattttcgctaatacgttacgccaacaaggcatagaggtgttgctgctaaccgacctgctgacgcaaacactggatgttatcgaagccaaaacctggctgctggaaacacaaatctccgactatcgcctgggcccgactttcgcggcggatattcgcgcctggctggcggatatgccgcatcgggaattagcgcgccatttaagcggtgggctgacatatggcgaaatccccgcctcgattaaaaatatggtggttgatacacacgatattaatgactttattatgaagccattacccaatcacttatttacccgcgatacctcatgctggatatataacggcgtgtcgatcaacccaatggcaaaaacagcgcgccagcgtgagaccaataatctgcgggcaatttatcgctggcatccacaatttgcagatggcgaatttattaaatatttcggcgacgaaaacattaattacgaccatgccacgttagaaggcggagacgtgctggttattggtcgcggcgccgtgctgattggcatgtctgaacgtaccaccccgcaggggatcgagttcctcgcccagtcgctgtttaaacatcgccaggccgagcgcgtcatcgccgttgagttgccaaaacaccgttcctgcatgcacctcgataccgtcatgactcatatcgacatcgacaccttctccgtctacccggaagtggttcgcccggacgtccagtgctggaccttaacaccggacgggcgcggcgggctgaagcgtacccaggaaagcacgctggtacacgccatcgaaaaagccctcggcattgatcaggtgcgtttgatcaccactggcggcgatgccttcgaagccgaacgtgagcagtggaatgacgccaacaacgttctcaccctgcgccccggtgtggtggtcggctacgagcgcaacatctggaccaacgaaaaatacgacaaagcgggcatcaccgttctgcccattcctggcgatgaactgggacgcggacgcggcggcgcgcgctgcatgagctgcccgctggaacgcgacggcatttaa

SEQ ID NO: 75093 - DNA, 453 bp, Citrobacter koseri
atgatcgttggcaatatccacaatctgcaaccctggctgccggacgtgctgcgtcaggccattgaacatattaaagcgcatgtgacggatgaaacggcaaagggcaagcatgatatcgacggcaatcgcctgttttatctggtttcggaagacatgaccgagccgtttgaaaagcgtcgtgcggagtatcacgcgcgctatctcgatattcagatcgtattaaaggggcaggaaggaatgaccttcagcacccagcctgcgggcgcgccggaaactgactggctggcggataaagacatcgcgtttttgcctgaaggggcagaggagaaaacggtgatccttaatgaaggcgattttgtggtcttttacccgggggaagtccataagccgctgtgcgccgtaggggcgccagctcaggtacgcaaagcggtcgttaagctgctggtcgagtaa

SEQ ID NO: 75094 - DNA, 1005 bp, Citrobacter koseri
atgtctacgttttatcagaaacattttttgaaattactcgatttcacctccgctgaactcaccgctctgctgcaactcgccgccaaactgaaagccgacaagaaaaacggcgtagaagtcgccagactgaccggcaaaaacatcgcgctcatcttcgaaaaagactcgacccgtacccgatgctctttcgaagttgccgcatacgatcagggcgctctcgtaacgtaccttgggccaagcggcagccagattgggcataaagagtcaattaaagacaccgcccgcgtactgggacgcatgtatgacggtattcagtaccgcggccacggccaggaagtggtagaaacgctggcggaatatgcaggcgttcccgtgtggaacgggttgaccaacgagtttcaccccacgcagctgctggcggatttgctgaccatgcaggaacatctgccgggcaaagccttcaatgagatgaccctggtttacgctggcgatgcgcgtaacaacatgggaaattccatgctggaagccgccgcgctgacagggctggatttacgtctggtggctccgcaggcctgctggccggaagcaagcctggtcgcagagtgcaaagcgctggcgcaaaagaacggcggcgacattacgctgactgaagatatcgcagcgggcgtgaaaggcgcggactttatctataccgacgtatgggtgtcgatgggtgaagcaaaagagaaatgggcggagcgtatcgcactgctgcgtcagtatcaggtaaacagcgcgatgatggcgcagaccggtaatcctcaggtgaagtttctgcactgcctgcccgcattccacgatgatcagaccacgcttggtaagaaaatggccgaagagttcggtttgcacggcgggatggaagtgaccgatgcggtgtttgaatctccggccagcatcgtgtttgatcaggcggaaaaccggatgcacaccatcaaagcggtgatggtagcaacgctggcgaaataa

SEQ ID NO: 75095 - DNA, 426 bp, Citrobacter koseri
atggcaaacccggaactactggaagagcagcgtgaagagacgcggctgattattgaagaattacttgaagatggcagcgatccagatgcgctgtacactatcgagcatcacttttccgctgacgacttcgaaacgctggaaaaagcagccgtagaagcgttcaaactcggttatgaagtgaccgagccagaagagctggaagtggaagaaggcgatacggtgatttgctgcgatatcctcagcgaatgtgcgctgaatgccgatctgattgatgctcaggttgaacaactgatgaacctggctgagaaatttgacgtggaatatgacggctggggtacgtacttcgaagatccgaacggcgaagagggtgaagacggcgacgatgaagattacgtcgacgaagacgatgacggcgtacgccactaa

SEQ ID NO: 75096 - DNA, 501 bp, Citrobacter koseri
atgagttctacgctatttccccttacgctacgccgtattaccgctgacgataacgccgccatcgcccgcgtcatccgccaggtttccgctgaatacggcctgaccgctgataaaggctatacggttgccgatcctaatctggatgaactgttccaggtttacagtcagccaggcgcggcctattgggtcgtcgagcagaacggtcaggtggtgggcggcggcggcgtggcgccgttaggctgtagcgaaccggatatctgcgaactgcaaaaaatgtactttttgccgacggtacgcggccaggggctggcgaagaaactggcgctgatggcgctggagcacgcgcgtgagcaggggtttaaacgctgctacctggaaaccaccgcatccttacgcgaagcaattggcctgtatgaacatctgggatttgagcatatcagcgaaccactgggctgcaccgggcatgttgactgcgaagtccgcatgctgaaaacgctgtaa

SEQ ID NO: 75097 - DNA, 855 bp, Citrobacter koseri
atgagtaatgatatgtatttattaatgtctctgccccgtgagatatttgctacatcccatcgctttgaagattatcatattgatgatatgcagtatggtgatttggacgactgggatttttacactctggggttgaaggatatctctgctcgggttgacccgttcaggtgtttgcaatttgatatgatgactacttttaattcgcaggctttggatttcgtccatcaacaaccacaaggcaggccgattagtcgccagcattgtgcagatattctgtttgatgagatgaaagaactgtcagcacaattcgctaaagggttatattcccctattattggggaactgattgatcatttccattacggtaacgggcagccatggtttggagaacttctaaatcgcgcgtatgcagatgtcattaggggagctggaacaaatgatgtgttgatgaaagtccaaaaggcgataaatggtcgtttatattcgaagcgacaggtgatcctggactataatttttttatggaactcaaaacagcgataaaaagagactcgaggctgccaaagttcaaccgctttatcgacagatttaatggtttgggggtaagcgtacatgatatttatgcacaacaaatcaaactggtgcgttttcagcgctatgccatgtcatgggagggattactttcttttaaagggcaggatcattttggtctgggcaaagaggatattaccaatacgttatataaaaactttcgcttcttccgcatctggttttttctacagcgtcatcgtgactatgcgtacaggccgtttctgacaaactttagtgcccatgtttgtattgagagtaacgcatga

SEQ ID NO: 75098 - DNA, 525 bp, Citrobacter koseri
atgaagtcaaaacgcgaagtcgtcatcgttagcctggtactgctgatatgtggttatctgctttggactcagcgaccggtgactatatttcgggctgaagtcgaactcgaagatgaccctatgtatttacatggactttataccagcagtaaacgagggtttattgacaaggagtggtatgatattgcggttgaccacctggcattaaccgaatgggggcggattcactggtatttggaccacaaagctgaacttaagagaaaataccgtataccaacgagtacctcatacagtattgcttttttgggtattggtagcggatttatcgatattgataagtcaggcgatagcgatctgtattgtttctccccaaaaaaagatacaaaagaaaattgtatcgaaaaaaatatgctcctggaggtggatttcgatgcaggaagttatgagcgattttctttcggtgacagtgagtattactggataaccatgccggacgggaagcttgttagaataaaaagcgcataa

SEQ ID NO: 75099 - DNA, 852 bp, Citrobacter koseri
atgagtaatgatatgtatttattaatgtctctgccccgtgagatatttgctacatcccatcgctttgaagattatcatattgatgatatgcagtatggtgatttggacgactgggatttttacactctggggttgaaggatatctctgctcgggttgacccgttcaggtgtttgcaatttgatatgatgactacctttaatattcatcctatgaattttgaccatcaacaattgcaaggaactccgattagtcgccagtattgcgcagatattttgtttgatgagatgaaagtgctgtctacgcaatttgccagtgggcagtatgccttccttattggagagttgattgatcattttcattatggtaatggacggccctggtcaagcgagcgtctgaatcatgcgtacgcagaagtcattaggggggctggaacgaatgatgtgttgataaaaattcagaaagcaatagattatcatttgtatttgaaccgagaagcaagtctggattacaatttttttacgagtcttaacctagcaataaggcatttgaagctaccaaaattcaaccgttttaacgacagatttaatggcttggggataagcgtacatgatatttatgtacaacaaatcaaactggtgcgttttcagcgctatgccatgtcatgggagggattactttcttttaaagggcaggatcattttggcctcggcagagaggatattgctaacgaactctataaaaatttctgcttcttccgcatctggtttttcctgcaacgacatagtgactatgcgtacagaccatttctgacaaatttaaatgcccatgcgcatattaagggaagcgtatga

SEQ ID NO: 75100 - DNA, 528 bp, Citrobacter koseri
atgaagccgaaacgtaacgtcattatcggcagcttggtgttgctgatatgcggttatctcctctgggctcaacgacctgtgacaatccttcgggctggcgagagatttgagtatgatcctacgctttttcatgggctttatgttagcagtgaacgtggttttatggattttgaggcttatgatattgcagttaaccactttgcattaaccgagtggggacggatacactggtatctgcagcacaaaaatgagctgaaggcaaaataccatataccaacaagtgcctcttactatattgttttttgggatattggcggcgggtttatcgatggagagaaatcaggcgatggtgatctgttttgttttccgccacaaaaaaacacaaaagaaaattgtattgaaaaaaatgtgctgctaatcgtggaattcgacgcgggatcttacgaaagattttctttcagcaacatagagtattactggatcaccatgccggacgggaagctggtacgaataaaaaatgccttataa

SEQ ID NO: 75101 - DNA, 2856 bp, Citrobacter koseri
atggaaaagacatataacccacaagatatcgaacagccgctttacgagcactgggagcagcagggctactttaagccgaatggcgatgaaagccaggaaagcttctgcatcatgatcccgccgccaaacgtcaccggcagtttgcatatgggtcacgccttccagcaaaccatcatggataccctgatccgctatcagcgcatgcagggtaaaaacaccctgtggcaggtcggtactgaccacgcagggatcgctacccagatggtggttgagcgcaagattgccgcagaagagggtaaaacccgccacgactatggccgcgatgccttcatcgacaaaatctggcagtggaaagcggaatccggcggcaccattacccgtcagatgcgccgtctgggcaactccgtggactgggagcgcgaacgcttcaccatggacgaaggtctttccaatgccgtgaaagaagtgtttgtccgcctgtacaaagaagatctgatttaccgtggcaagcgcctggtcaactgggacccgaaactgcgcaccgctatctctgacctggaagtggaaaaccgcgagtccaaaggctctatgtggcacatccgctatccgctggctgacggtgcgaaaaccgcagacggtaaagattacctggtggtcgccaccacccgcccggaaaccctgctgggcgataccggcgtagccgtcaacccggaagatccgcgttataaagatctgattggcaaattcgtggtgctgccgctggtgaaccgtcgtattccgatcgtgggcgacgagcatgccgacatggaaaaaggcaccggctgcgtgaagatcaccccggcgcacgactttaacgactatgaagtgggccgtcgtcatcagcttccgatgatcaatattctgacctttgacggcgatatccgtgaaagcgcggaagtgtatgacaccaaaggcgaagagtccgacgtttactccaacgaaatcccggctgagttccagaagctggagcgctttgccgcgcgtaaagcggtggttgccgctatcgatgccctcggactgctggaagagattaaaccgcacgacctgaccgttccttacggcgaccgtggcggcgtggttatcgaaccaatgctgaccgaccagtggtacgtccgtgccgacgtgctggcaaaaccggcggtggaagcggtagagaacggcgatatccagttcgtgccaaaacagtacgaaaacatgtacttctcctggatgcgtgacattcaggactggtgtatctcccgccagctgtggtggggccaccgcatcccggcatggtacgacgacgcgggcaacgtctacgttggccgtagcgaagacgaagtgcgtcaggaaaacaacctgagcgccgacgttgcgctgcgtcaggacgacgacgtactggacacctggttctcttccgcgctatggaccttctcgactctcggctggccggaaaacaccgacgcgctgcgtcagttccacccgaccagcgtgatggtctccggtttcgacatcatcttcttctggattgcccgcatgatcatgatgaccatgcacttcatcaaagatgaaaacggcaagccgcaggtaccgttcaagaccgtctacatgaccggtctgattcgcgatgacgaaggccagaagatgtccaaatccaagggtaacgttatcgacccgctggatatggttgacggcatttccctgccggatctgctggaaaaacgtaccggcaacatgatgcagccgcagttggctgagaagatcgccaaacgtaccgagaaacaattcccggacggcattgagccgcacggtactgacgccctgcgtttcaccctggcggcgctggcctctaccggccgcgacatcaactgggatatgaagcgtctggaaggctaccgtaacttctgtaacaagctgtggaacgccagccgctttgtgctgatgaataccgaagatcaggattgcggcttcaacggcggcgagatgaccctgtcactggcagaccgctggatcctggcggaattcaatcagaccatcaaagcgtaccgcgaagcgctggacagcttccgcttcgatatcgcagcgggcattctgtacgagttcacctggaaccagttctgcgactggtatctggagctgaccaagccggtcatgaccggcggctctgaagcagaactgcgcggcacccgcaacacgctggtcaccgtgctggaaggtctgctgcgcctggcacatccgatcatcccgttcatcaccgagaccatctggcagcgtgtgaaagtgatttccggcattaccgccgacaccatcatgctgcaaccgttcccgcagtacgatgcctcccaggtggatgaagccgcgctggccgataccgaatggctgaagcaggcgatcgttgccgtacgtaacatccgtgcggaaatgaatatcgcgccgggcaaaccgctggaactgctgctgcgtggttgcagcgaagaagcgattcgccgcgtgaacgacaaccgcagcttcctgctgaacctggcgcgtctggaaagcatcaccgtgctgccagccgatgacaaaggtccggtttccgtgacgaagattatcgatggcgccgagctgctgatcccgatggcggggctgattgacaaagaagccgagctggcgcgtctggcgaaagaagtggcgaaggtcgaagctgaaattggccgcattgaaggcaagctggcgaacgaaggttttgtcgcccgcgcaccggaagcggtgatcgccaaagagcgtgagaagctggaaaactacgcggaagcgaaagcgaagctgattgaacagcaggcagttatcgccgcgctgtaa

SEQ ID NO: 75102 - DNA, 444 bp, Citrobacter koseri
atgaagaatgcaacgttctatattctggacaatgacaccaccgttgatggcctgagcgccgttgaacaactggtgtgcgacattgccgcagaacgttggcgcagtggtaaacgcgtgctgattgcctgtgaagacgaaaaacaggccatccgtctggatgaagcgctgtgggcaagaccgccggagagttttgtcccgcataatctggcgggagaaggtccacgcggcggcgcgccggtggaaatcgcctggccgcaaaaacgcaacagcagcccgcgtgatattctgatcagcctgcgtactggctttgcagattttgccaccgctttcacagaagtgatagactttgtcccttacgaagaaactttgaaacaactggcgcgcgaacgctacaaagcctaccgcgtggctggttttaacctgaatacggcaacctggaaataa

SEQ ID NO: 75103 - DNA, 1512 bp, Citrobacter koseri
atggagttcagtgtaaaaagcggtagcccggagaaacagcggagtgcctgcatcgtcgtgggcgtctttgaaccacgccgcctttctccgattgcagaacagctcgataaaatcagcgacgggtacatcagcgccctactgcgtcgtggtgaactggaaggaaaaccggggcagaccctgttgctgcaccatgttcctaacgttctttccgagcgaatcctcctcattggttgtggtaaagagcgcgagctcgatgagcgccagtacaagcaggtcattcagaaaaccatcaatacgctgaatgacaccggctcaatggaagcggtctgcttcctgaccgaactgcacgtcaaaggccgcaacaactactggaaagtgcgtcaggctgtcgaaacggccaaagagacgctgtacagctttgatcaactgaagaccaacaagagcgagccgcgtcgcccgctacgtaaaatggtcttcaacgtgccgacccgccgtgagctgaccagcggcgagcgtgcgatccaacacggtctggcgattgccgccgggattaaagcggcgaaagatctcggcaatatgccgccgaatatctgtaatgccgcctacctggcctctcaggcgcgccagttggctgacagctacagcaagaacgtcatcacccgcgtcatcggcgaacagcagatgaaagagctgggtatgcactcttatctggcggtcggtcacggttcgcagaacgaatcgctgatgtcggttatcgaatacaaaggcaacccgtccgaagacgcgcgtccggttgtgctggtcggcaaagggctgacctttgactccggcggcatctccatcaagcctgccgaaggcatggacgagatgaagtacgatatgtgcggcgcggcggcagtgtacggcgtgatgcgcatggtcgcggaccttcagttgccgattaacgtcatcggcgtgctggcaggctgcgaaaacatgcctggcgggcgagcgtatcgtccgggtgacgtgctgaccaccatgtccggccagacggtagaagtgctgaacaccgatgccgaaggccgcctggtattgtgcgacgtgttaacctacgttgagcgttttgagccggaagcggtgattgacgtcgcgaccctgacgggcgcctgcgtgattgcgctgggccatcacatcaccggtctgatgtcgaaccacaatccgctggcgcatgagctgattagcgcgtccgaacaggcgggcgatcgcgcatggcgcttgccgttgggcgatgagttccaggaacagctggagtctaactttgcggatatggcgaacatcggcggccgtcctggcggcgcaatcaccgccggttgcttcctgtcgcgctttacccgtaagtacaactgggcgcacctggacatcgctggcaccgcatggcgttccggcaaagcgaaaggcgcaaccggtcgtccggtggcgttgctgtcgcagttcctgctcaatcgcgcgggttttaacggcgaagagtaa

SEQ ID NO: 75104 - DNA, 1101 bp, Citrobacter koseri
gtgataatcataagatatctggtgcgggagacgctcaaaagccaactggcgattcttttcatcctgcttttgatcttcttttgtcaaaagctagtgaggatcctcggggcggcggttgacggtgatattccggcaaatctggtgctctcgctactggggctgggcgtgccggaaatggcgcagctcatcctgccattaagcctgttcctcgggctgttgatgacgttgggcaaactgtataccgaaagtgaaataacggtcatgcacgcctgtggtctgagccgggctgtgctggtgaaagccgcgatggtgctggcgctgtttaccggcgtcgtcgctgctgtcaacgtcatgtgggcggggccctggtcatccagacatcaggatgaggtactggcggaagcaaaagccaatcctggcatggccgcgctggcgcaagggcagttccagcaggcgaccaatggcagcgccgtgctgtttattgaaagcgttgacggcagcgattttaaagatgtgttccttgcgcaaatccgcccgaaaggcaacgcccgtccttctgtggtggtggccgattctggacatctgacgcaattgcgcgacggctcccaggttgtgacgttgaacaaagggacgcgctttgaaggcactgccctgctgcgtgacttccgcatcaccgatttccagaactatcaggcgattattggtcatcaggccgttgcgctggacccgaacgataccgatcagatggatatgcgcacgctgtggcagaccgataccaatcgcgcccgtgcggaactgcactggcgtattacgctggtattcaccgtatttatgatggcgctgatggttgtaccgctgagcgtggttaacccacggcaggggcgcgtgctgtcgatgctgccagctatgctgctgtatctgctgttcttcctcctgcaaacttccctgaaatcaaacggcggtaagggcaaactggatccggttatctggatgtgggcggtcaacctgatctatctggcgttggcggttggtctgaacctttgggatacggtgccggtacgccgcctgcgcgcccgtcttctgcgtaaaggagcggtataa

SEQ ID NO: 75105 - DNA, 1083 bp, Citrobacter koseri
atgcagccgtttggtgtacttgaccgctatatcggtaaaaccattttcaccaccatcatgatgacgttgttcatgctggtgtcgctctccggcatcatcaagtttgttgaccagcttaaaaaagccgggcaggggagctacgatgcgctgggcgcggggatgtataccctgctcagcgtgccgaaagatgtgcagattttcttcccgatggcggcgctgcttggtgcgctgctggggctggggatgctggcgcagcgcagtgaactggtggtgatgcaggcttcgggtttcacccggatgcaggtggcgctgtcggtgatgaaaaccgctattccactggtgctgttgacaatggccatcggggaatgggtcgctccgcagggcgaacagatggcgcgtaactaccgtgcgcaggcgatgtacggcggttcgttgctctctactcagcaaggcctgtgggcgaaagatggcaacaatttcgtctatatcgagcgggtgaagggcgacgaagagctggcgggcattagcatctacgcctttaacgatcagcgtcgcttacagtcagtgcgttatgccgcgtctgcgaagttcgacgcagacaacaaggtctggcgtctgtcgcaggtggacgagtctgacctgaaagacccgaaacagatcaccggttcgcagaccgtgagcggcacctggaaaaccaacctcacgccggacaaactgggcgtggtggcgctggacccggatgcgctctccatcagcggcttgcataactatgtgaagtatctgaagtcgagcggccaggacgccggacgttatcagctcaatatgtggagtaaaatcttccagccgctttccgtggcggtaatgatgttgatggcgctgtcgttcatttttggcccgctgcgtagcgtgccgatgggcgtgcgtgtggtgaccgggatcagctttggtttcgtcttctacgttctggaccagattttcggcccgctgacgctggtttatggcattccgccgattatcggcgcgctgctgccaagcgcctcgttcttcctgattagcctctggctgatgatgcgtaagtcgtaa

SEQ ID NO: 75106 - DNA, 1503 bp, Citrobacter koseri
atgagtgcacccctgttaattgcccgcacgctggaaagcgaactgttcctgttgccgggcatgaccaaccgtcacgggctgattaccggcgcaaccggaaccggcaaaacggttaccctgcaaaaaccggctgagtccctatcagacatcggcgttccggtatttatggcggatgtgaaaggtgacttaaccggcgtcgcgcaggaaggcgaaccttctgaaaaactgctcgcacggctgaaaaatatcggcatcaccgactggcaaccgcacgctaatccggtggtgctgtgggatatttttggcgaaaaaggtcatccactacgggcgaccgtctccgatcttgggccgctattgctggctcgcctgctgaacctgaacgaggtgcagtccggcgtgctgaatattatcttccgcatcgccgatgaccaggggctgttgctgctggactttaaagacctgcgggcgatcacgcagtatatcggtgataatgccaaatccttccagaaccagtatggcaatatcagcagcgcatcggtcggggcgatccagcgcgggttgctgtcgctggaacagcaaggcgcggcgcacttcttcggcgaaccgatgctggacatcaaagactggatgcgtaccgatgccaacggcaaaggcattatcaacatcctcagcgccgaaaaactctaccagatgcccaaactgtatgccgccagcctgctgtggatgctctccgaactgtatgagcaactgccggaagcgggcgatctggaaaaaccgaagctggtgttcttcttcgacgaagctcacctgttgttcaatgacgctccgcaggtgctgctggataaaatcgaacaggttatccgcctgattcgctccaaaggcgtgggcgtctggttcgtctcacagaacccttccgatatcccggacaacgtgctcggtcagttaggcaaccgcgtacagcacgccctgcgcgctttcacccccaaagatcagaaagcggtgaaagccgccgcgcaaaccatgcgggcgaatccggcgtttgataccgagaaagcgattcaggaactgggcactggcgaggcgctaatctccttcctggatgccaaaggcagcccatcagtggttgaacgagcgatggtcatcgcgccgtgctcacgcatggggccggtgacggacgatgagcgtaacgggcttatcaatcactcctcgctgtacggtaaatatgaagacgaagtcgatcgcgaatcggcgtatgaaatgctgcaaaaaggcgttcaggctaccaccgagcagcaaaacaatccgccagcaaaaggcaaagaagtcgccgttgatgacggaattcttggcgggctgaaagagatattgtttggcagtaccgggccacgcggcggcaaacgggatggtgtggtgcagagcgtcgccaaaagcgcagcgcgtcaggtaacgaaccaaattatccgggggatgttaggtagcctgatgggcggtagaaaacgctaa

SEQ ID NO: 75107 - DNA, 1020 bp, Citrobacter koseri
atgtctattataaaaagctatgccgcaaaaaaggcgggcagcgaacttgaactctatgaatatgatgcgggtgaactcaagccggaagatgttgaggtacaggtagattactgcggtatctgccactccgatctgtcgatgatcgacaacgaatggggcttttctcagtatccgctggttgccgggcatgaggtgattggccgagtcgtggcactcggcagcgccgcgcaggataaaggtctgaaggtaggtcaacgcgtcgggattggctggacggcgcgcagttgcgggcactgcaatgcctgtatcagcggcaatcagattaactgtctggaaggatcggtgccgactatcctcaatcgcggcggctttgccgagaagctgcgagcagactggcaatgggtgatcccgcttccagaaagcatcgatattgaatccgcaggccctctgttgtgcggcggcatcaccgtcttcaaaccactgctgatgcaccacgttaccgccaccagtcgcgttggggtgatcggtatcggcggcctcggccatatcgccattaagctgttacacgcgatgggctgcgaggttaccgcattcagctccagtccggccaaagaacaggaagtgctggcgatgggcgccgataaagtggtcaacagccgcgatccagaggcgttgaaagcgctggcaggtcaatttgatctcatcatcaacactgtcaatgtcgatctcgactggcagccttacttcgaagcgctggcctatggcggcaacttccacaccgttggcgcggtgctgaagccgctaccggttccggcgtttaccctgattgcaggcgatcgcagcatctccggttcggcaaccggtacgccgtatgaactgcgcaagttgatgaaatttgccgggcgcagcaaggtctcgccgacgaccgagctgttcccgatgtcgcaaatcaacgaggccatccagcacgttcgtgacggtaaagctcgctaccgtgtggtactgcaagccgacttttga

SEQ ID NO: 75108 - DNA, 1251 bp, Citrobacter koseri
atggctctcacggatatcaaagttaggactaccaagccctctgacaaacccttcaaacttactgatgggcagggtatgcacctgctggtcaaccccaatggttcaaaatactggcgtttacagtatcgctttaatggaaagcaaaagattctggcattaggtgtctaccctacggtgtcacttggcgaagctcgcagaaaaagagatgtagccaaaaagttggtatctgatggtatcgacccttctgagaagaaaaaagcagacaagatcgagcaaagcgaagccctgacattcgaagctgttgcaagggactggcatactgcctgtaaaaggaaatggtcagattcccatagtgagagggttttaaagagccttgaagataaccttttctcttccataggaaagagaaaaatagccgagcttaaaaccaaggatctcctcgttccgatcaaggttgttgaagcttctggacggttagaagtagcagcccgtctacaacaacgaaccacagcaattttgcgatatgccgtccagaatggcttaattgactataatccggcccaagaaatgtctggggctattgctgtagcaaaaagaacccacaggccagctttgccattcgaacgattctcagaactcttagaacgaattgataacttcaaaggtaggaaactcacgaagttagccgtaaagctgacattgctcattttcattcgttccagtgaactcagattcgcaagatggtcggaaatcgatttcgagaatgcaatgtggactattcccgctgaacgagaaccactacccggagtgaaacattcgcaccgtggttcgaaaatgcgaactccacaccttgttcctttgagttgtcaggcattggctgtgttgacggaaattaaagagatcagcggtgatcataaactcgtgttcattggcgaccatgatttcagaaagcctatgagtgaaaatacggtaaacaaggctttgaggtctatgggctatgacacaaccgtggaggtctgtggacatgggttcagggctatggcttgtagtgccttgattgaatccggtttgtggtcgaaagatgctgttgaacggcaaatgagccatcaggagcggaactcagttcgtgctgcctacatacataaagcagagcaccttgatgagagaaagcttatgttgcagtggtgggccgattaccttgacctccttagaatacgacaagtttcaccatttgattttaaaaggatttaa

SEQ ID NO: 75109 - DNA, 810 bp, Citrobacter koseri
atgaaagtagtaagcccttatgaagaattaaaaagctggtttagtctcgaaaactatgagcagttaaaatcacttacaatcaaagaactgcatactgagcttgcctttagagaagcgattttcgacagtgtaaattttggatgggaagatgataatcaaaatttaagatctatccttgaaggtaatcctattttaagcacacaagataataatcatggtcattttggcaagggccaaagacatgttgcgcaggttagcttcggtgatataaaaaaattagagaacaagttaataatgtttagcatggatttttttgaagaaaatggcgatttcaaaaaagagttgaaaaagaagccaataacaaaaactatgagagacttttttcttaaccaaaatagcagtaagatgtatgtttcatttgatttaggaatgtccagcgatgaagaaattataacagccttacaaacgatgctacccattctcaggaaagaatatgaaattgagccagtaaaaacagaaaaaattggactggcaaaaataagaaagcttgtcgattacaatattatcccaatgatggatttattgatttgggcaaaatttaaaaaagtaaaaatctcaaatatggtcttgtctcgtgtcttgtatcccgactttacaagtgagatcagaggagaagatcacattaaagatacagacaggcctgttgcagagaagtcattgaatggagaaacaacccgtagtctcgaatactttatcagcaaaaacagccatctcctcaacataccgatttctgaactcggctctttctag

SEQ ID NO: 75110 - DNA, 207 bp, Citrobacter koseri
atgaatacaatcaatcaaagcttaattcgtttaccagaagtcttgaaacgaactggtttcggcaaagcctggatctatcgtctgatcagtgaaggtcggtttccggcaccagtgaagatcggtgttcgtgccgttgcttttgtcgagagtgaagttgacgtgtggattcaatcagttatcgaaacaagtcgaaataatgttgcttag

SEQ ID NO: 75111 - DNA, 300 bp, Citrobacter koseri
atgaatatcgaagaatttgtgagtgaagataaccatatgtgcaatttatgcggagatcttttttacaagatctttgacccagaagtgatttatgacttacccaataacgagttgaataaacaaatcatttactggctcagtcagtaccttgtaggaaatttgagagaacctttagattcgatctctgagcttaatgcttccaaacagatatatgtttacgagacctggttctctctaattaaatgtcctgatgaaatgaaactcctagcgaagcggataattttatatctattggactaa

SEQ ID NO: 75112 - DNA, 1203 bp, Citrobacter koseri
atgcgtagtatttgtgtggattcttttatgttcgaaaatggtgagagatattgtcatatcgtaaataaaaatactggtgaaccattgtattatcctaacttgtatataacaacacaggtcaggaatcggtcagagtctatatcaacaatgaaggttattgccggtagcatttcattgttatatcgattctttatgaggaaagagatcaatattgatgaaagaattcagaaaaggatatttctggctcctcatgaaattgaagatttgatcgaattcacttcattcaattttcgagatggcgagaatgataattttagaagttcaaatgtcaaaaaaccaactaagtactttcggataacaaccatagctaactatctggaatggctgtgcaaaatacatctttctcatacaggacagaaggatactctcaaatatattttagatttcattaacaacataaaacgaaagaaatcgagaaataatgataaatataatatggatatagaaaaaagtttaaataatgaacaattggattctttgtttagcattcttgcaccgggtagcaaattaaatcctttttcagaaaaagtgcaaaaaagaaacaatctaatattcctgctattacactgctttggcctgagagcaggtgaacttttgaatctgcgaattggtgatatagattttgcagaatcgacaattgcaataagaagaagagcaaatgataaaacagatccgcgagtgtatcagcctttagttaaaacttgtgagaggaaattaattgctgataaaaagctcatgtttgaaatttcagattatattctgaatgatcgaagaaaaataaaaaattctaacaaacatgatttcctgtttattacttataaggaaggaaaaactcaagggcaacctatttcattttcttcatatcacaaagtggtgagtgttgttcgtcaatcctcctcacttctagggggattgacaggtcacaaactcagacatacatggaattatgagttttcgaaagcaatagacaagaatcaggacatatccgatgaaaaagagcaacaaatccgttcttatctcatgggatggcgaccgggttcagaaacttcaatgatttataatcgcaggcatatttatgagctatcgaaaaaaactgcacttgaacaacaagagcaactattcaaaggagaatttgatgaataa

SEQ ID NO: 75113 - DNA, 432 bp, Citrobacter koseri
atgaataatttaattaaaaataaatctgataaaatgtctttgcatgaacataaaatcgtcagttcgattgaaaataacggaatcaatcttacaaacttaatatatgctatgaacgaaaaattggtttgtgggtttgtatatacagtacaatattattttaatagcaacagctatttgtatgtgaaaaatattgttagaaatatggagagtcttatccgtaaactatctcctactcatattgatgataaggttctaattgaatatcaaaataagaaattatcaaaagccccagcatcatttcgcgttttacgaccatttttgattaaatggtttgagttaggatatccgggaatagatgaaagtgcggtagaactgttaaagcatttggacctaaaaataaaaaaaatctggtcagtctgtgcttcaagatga

SEQ ID NO: 75114 - DNA, 828 bp, Citrobacter koseri
atgaatcatgcatatagaaaaggtgaactgtcactgccacattatgcaatatcactattgatcagtcttacaggtagaagacctcagcagttagttatgttgaaatataaagaccttcttcaaaagaacttagataatggcaaagtagaatatgtaatttcagtgccacgagtaaaacaacggggtaaagaactacgatatcgagaacttgcaataatatcagaggttgcatcaattgttcaattgcaagctaatcaatcagtgaaacttgttgagcaagctcttggaaaaactcttgatgattattctaaacgagaagttcctattttcttaaatgaggaaaaactctcagatttatccataacaggttcaattcttatggaatataataagttatatgcgaagcctacaattgctaatgtagcattgaaaagtattgttaataatgggaatgtaatatccaaccgtaccggttcgatactaaatattactcctcgtaggcttcgttatacaatagcaactatgctggctaagaatgggcataatgttaatactatagctgaattattggatcattcatctacttcaagtgcggggatttatattaaaaatcatgctgacagtgttgaaaggattgattccgctgtttcagaacaattgtcatttgtcgctgatatttttatgaatggaataaagtctaaagagaaaaaacatttcaaattttgctcttcgagaaaatgcgaaagtcagaatttaaatgtaagttttccttgtgataaatgtgctttctttatgccagttgatattgatgaggtaaatgcccaatga

SEQ ID NO: 75115 - DNA, 1875 bp, Citrobacter koseri
atgaacaatattattttattcaagtctaaaaaacaacttacggcagaaaacaattataatgaattcataaaattttgtcgctatcaactatctgggctaacccaaactcaggattgggaacaatatgtttggaaagggtatgtaacctttagaaagataggggttggacataaagtatttaactccaaagatgcaatgcatgaagatttcctcgattttgccaaatcatatattagatatcagcactcattgaaacccttgaaaaattatggggccataatgatggctttgagatgtctcgaacaggctcttttgcaggttctgaatagtggtctcatttataatgttacagccgttgtttttgatgaggcaatgcagatcggaagtagatattttgaaggtaatgttcttgctcaatgtgggatacagcttgaaaaattatcaaagtttatatgtgaacataaccttgtaaaatcaggatacatatcctggaaaaaccatgtgaagcagaaggtcaaaaacaactatcttcctgagattgaggactatcacagaaacgataagttaccagatgaaacagcattacttgcgattgctgatattttttctaaaaatgatgagctactgagtccaagggataaattcaccagtgcagtatttgcactcctgctttgttgtccgagcagaatttctgagattttagccttacctgctgattgtgagattacacaaaaagatgagaagggtatcgaaagatatggtctaagattctattcggttaaggggtatggccctaatatcaagtggattccacaggttatgataccagttgcgaagaaagcgattagaagattgctttccttatcacaaaatgcaagggcatttgctcaatggtgcgaaaaataccctgataaattttaccgacatgaactttgcccaaaagttgatgaaaaattaaagttgactgttgtacaggtttgtcatgcacttggctaccctttacatgatcgtaaatcatgcgttctaaaaattaaaagaacgagtttggatggtgggaaaagtttcttaaactccaatgattataactattcattgagtgagctatgggaaatgattagctctggttttagcagagactttccttggtatgatgaagaaaaatctataagatttagtaatgcattatgtttattgaatcctcgccaattttctttatcccaaatgagtgatatctattcattttacaaacctactaaaggattcttttttaatgatatacaaaataaaatgcgtcacgagtctggatttaaaaatattttcgcccgatacggatattatgatattgaaggtaagccattacttatccggtcacaccaaccacggcaccttttaaatacaatagcccattatggtgaaatgtctgaactggatatagctaaatggtctggtcgtgtcaatgtgaatcagaacagagtttataaccatgtttcggaagaagatatgttagataaaatcaaagctattaaattgaatgggagtaattattgtcaaagtgagacaatacccacaaatgaattgacaattgattttgataaccttaatcaaggtgcaatacacttaacagaatttggttactgtgtacataactatttagttaagccttgtgcgaaaatcaatcagtttgttgagtgtgataatgaaacactggacatgaaatcagtagatagaattagacttgaatctatccgagaaaaagtaacaaaactgaagagtataacgcagaccgcttatgaaaatggtgattatggtgcagacaaatggctgcaacaccatgaaaaaaatttggaaagaattaacaaacttttgaataattga

SEQ ID NO: 75116 - DNA, 387 bp, Citrobacter koseri
atggcaaaacatttgaacaggagtgaaataaaggtaatcacacacattatattgacttgggacgggaaaatcacatggagtgatttatgtgaatcagtttataagaatttaaacagaactatcacaaggcaatctttaagtgctcatgatgaagttgttgaagcatatagatcaaagaaaaatttgtctaatttgaaaaaatctggccttaaaaagccagctaacttaacgattgcggcacaacaaataataaatcttaaagccgaaaatgaaatgttaaaaaaacagaacaatagatacaaagagcagtttagctattggcagtataatgcttatagacatggtctcactatggaacaattgaatagaccatttaataaaaaataa

SEQ ID NO: 75117 - DNA, 426 bp, Citrobacter koseri
atggacaaaaacatcatcaattcagagtttactctggaagagcaacttatcattataattgataaatatatctcaaaacggtaccagcccggagataaaagtttctcatatcaactttacctaatttttgtgggataccatttaaaatatttctaccctaaaaggatttattccaaatccaatcgtaatattgataacataatgactatgtttagctcggtatacaaaagtctgacaagcaatcttctacaacgattaaataacaaggaaggagttattagggaactaaactcgcttgttaattacatagataacaatcaagaaaacgcagaggaaatctatgctactgtcagagcacaatatgaaatgaaagtaattgagaaagagttaacccatgaagttcgcgtaagaaccgtcaggttatag

SEQ ID NO: 75118 - DNA, 315 bp, Citrobacter koseri
atgaaaatatactcaatcctcacagttattcttacctcatttcttctaaccgcatgtaacagtgaaccatcgcaagacgatatatacaatgctttcaaaagtgttgtagataaatcaaatgccagtatgaaagcttttgattcaagagtttcagaaaaggatcttttaagaatcgattatgtgaagaaagttagctgcacagaagaagcaaacaatgtttataactgcattgtcgatgcctctattagtaatatgaaacagacaaagcctgttaagcttgtgaaagcagatggtatctggaaagaagttcagtag

SEQ ID NO: 75119 - DNA, 387 bp, Citrobacter koseri; identical to SEQ ID NO: 10362

SEQ ID NO: 75120 - DNA, 273 bp, Citrobacter koseri
atggaaaacgaaacaataaagtgcccgttctgctttacactaagtcctcatggtgtgcggatttgcaaaggctgtcatgcaaaggtcgcttacggtgaaagcccgctcagtgtggcattcctgtttcaattcgtggcatttggtctcgcgtggttagcattttcgtggaccggcagcactcttgtatcagtcattacgtttttcgtaagcatcattattcttatctataaaatcaaaagaatgtatgcagacagagttgtttttatacggtga

SEQ ID NO: 75121 - DNA, 1158 bp, Citrobacter koseri
atgaagggtatgcagaagatcaaaaggggtaagagcttcgctggtgtcgttcaatatgcattgaaaccgggagcacatcataaaagtgatcccatcatcattggcgggaacatgttaggtgattcagcccttgaactgatcgctgaattcgatagcaccaagcatcttcgccaggatgtcgcaaaatcagtttggcacaactcgcttcgcttacccaacggtgaatcactaacgaatgaacagtggtctaatatcgcagatgactatatgaaacgaatgggattcagtgatacccatctccgttgctatgtcttacatgacgacgaaggccagcatatacacattatcgccagcagaatcgacatagccagtgggaagctctacttaggtaggaacgaaaatcttataagcacgcggatcatcagtgaacttgaaatcactcataacctgacagtgaccatgacagcaccaaagcaaccgaagcgaagaaaggtttcccgcaatgaacagatgctttcagaacggactggccttccctcccccaaagaagctctccaacagatacttgataaaagtttggcagatacacctgatcttttaacttttatcaagagacttgaagaagcagaagtcggctggaccgcgaatgtcgcaagcacaggtaaaatgaacgggttctcattttcctaccgagatatagccttcaaagcatctcagcttggaaaggcatactcttgggtaaatcttcaaaagcaacttagctacaaccccgaccacttagaagctatacgaaccaacacaccaacaaaagaccaccctgctgctcctgctcctgctcctgctcctgctcctgctcctgctcctgcaaaagatgtttcaacaacagatatttcaaaggaaagcataagtgaaaaaattgctgaactcgaactacgactcaaagaagacagaagaaacgaaatcgtagaaaagattcttcaaaaaaactcagtacaacagcaaaagcatctcaggcttatcggctggattccatttctcagaaggctcgcagagcttctcagaagctatgggaagtccattcttcacaaaacccacacacacttctcaaaaattcatgtaatccaacctttaaacaaggcgagaaaaattcgtttatag

SEQ ID NO: 75122 - DNA, 429 bp, Citrobacter koseri
atggcaaataaacaatcgcagtttttgaacactcagaatgtaaaacattcaacatcaaagtgtaagttactaccacaggaattacgaattcattgtgttagtgttcgtcttaacaatgctgaattggtcaagcttaatacattgagggagcattattcgaaaggagagtggcttcgtatggtttcccttcaaaggttacctccggctatacccgcgattaatatcaaagcctggaaagctttaactgatatatcgcaaaagctaaatcgaatttcgacccatatagattgtaaaagcaaagacagtcagcttactcatacagagcttttcgctgtgaaacgacaactccaagagcttcgccagcacctgctaaatgctgacatatggagcaaacccgatgaagggtatgcagaagatcaaaaggggtaa

SEQ ID NO: 75123 - DNA, 747 bp, Citrobacter koseri
atgggaaaatttgcggattttaatatcaaaaacaataccgaaaatactaatgtcagccaaagcaatagtggtggttataatgttcaaaataatcaggtcataaataatcgaaccattaacaatcattatacaaagcaaaattctaatggtgatggcgatgcaggtgcttttatggcgggagcggccattttaactgtaggaataggatttgttatttggtcatttttcacccattatcaagaaatatatcccattttaaaaacaggtgctttattctctcctgtattatcgataattgggattatatctttggttcttagggaagaggttgaaacgacagacgtagtcagattttttttcttagtcttagctggaggttctgtttttttattaaatgaatatttgaatataaatgttccacaagaaattatagacttatcaaaacaagccgtatcagtttcaggtttttggaacggattaaacgaatatggtaaaaacctttctttgtcgttgatatcttcgagtatcttgattggtgcatcaataatattgataatattctcttcgttcagagaattatcatactccttagctaacaaaaataagtctgggttttggtttgcaagccttaaattaactaatttattccgagcccaagcccttggtaatggcggaatcataactctaatcttggcaatgacttttttaacattaaatggatatgtattccattttgaatggaactaa

SEQ ID NO: 75124 - DNA, 864 bp, Citrobacter koseri
atgggaagtggatggcatgaatggccgctgatgatcttcacggtttttggtcagtgcgtggtcggcggttttatcgttctggctctggcgctgatgaaaggcgagttgcgtaccgaatctcaacagcgtgtgctgaccggcatgtttgctctgtgggtgctaatgggaattggcttcatcgcgtctatgctgcatctggggtcgccaatgcgcgccttcaattcgctgaaccgcgtgggctcgtcggcattgagtaatgaaattgccagcggctcgctcttttttgccgtcggcgggatcggctggttactggcggtgctgaaaaagctctctccggcgctgcgtaatctctggctggttgtgacgatcgtgctgggcgttatctttgtctggatgatggtgcgcgtgtataacagcattgataccgtaccgacctggtacagcatctggacgccgctgggcttcttcctgacgctgtttatgggggggccgttgctgggttatctgctgctgcgtattgcgggcatcgatggctgggcgatgcgtctgctgcccgtaatttcagtcctcgcactggtggtcagcgccattatgtcagtgatgcagggagcggagctggcgacaattcatagctccatccagcaggcttctgcgctcgtaccggattatggttcgctgatggcctggcgtattgtggtgctggtcgtggcgctgtgctgctggattgtgccgcagttgaaaggttatcaacctgcggttccgctgctgtcggtggcgtttatcctgctgctggtgggggaactgattggtcgcggcgtattctacgggctccatatgaccgtgggaatggcggtggcgagttaa

SEQ ID NO: 75125 - DNA, 627 bp, Citrobacter koseri
atgactaagccttacgttcgtctcgataaaaatgatgctgcggttcttttagttgatcaccaggcggggctactgtctcttgtacgagacatcgatcctgacaaattcaaaaataacgttctcgcacttggcgatttagccaaatacttcaacctccccaccatccttaccaccagtttcgaaacggggccaaacgggccgttggtgccggaattgaaagcacagttccccgatgccccctacattgcacgccccggaaacatcaacgcgtgggacaatgaagatttcgtgaaagccgttaaggcgacaggtaagaagcagctcatcattgcgggggttgtcacggaagtgtgcgtggccttccccgccctctctgcgattgaagaagggttcgatgtgtttgtcgtgaccgatgcgtcaggcacctttaatgaaattacccgtcactccgcctgggatcgcatgtcgcaggctggcgcacaattaatgacatggtttggcgtggcgtgtgagttacaccgcgactggcgtaatgatatcgaaggtctggcgacgctgttctctaatcacattcctgattatcgcaatctgatgaccagctacgacacgttaactaagcagaagtaa

SEQ ID NO: 75126 - DNA, 138 bp, Citrobacter koseri
atgcgcatcatgccaccaacaaaaacattgtcaatctacccgaatcgcggcattacacgctttcccgcccttcgatttgaaatactgattcatggcatgaaagagcagcgtctgataaacatcatgttattgttttaa

SEQ ID NO: 75127 - DNA, 1149 bp, Citrobacter koseri
atgtccatctatacccggcccgtcatgcttttgctgtgcggcctgcttttgttgaccctggcgatcgcagtattaaacacgctcgtccccttgtggcttgcccaggaaagcctggcaacctggcaggtcggtatggtcagttcgtcctactttaccgggaatctggttgggacgttgcttaccgggtatttaatcaagcgcctgggctttaaccgcagttactatattgcctcgctcatttttgcggcgggttgcgtagggctgggcatgatgattggtttctggagctggctggcctggcgctttgttgccggcgtgggctgcgccatgatttgggtcgtggtggaaagcgctttgatgtgcagcggaacatcccgtaatcgtgggcggttactggctgcgtacatgatggtctattacgtgggaacgtttttggggcaactgctggtcagtaaagttccgacagaattaatgagcgttctgccgtgggtaaccggcatgattctggcgggcattttgccgctgctctttacccgtatcctgaaccagcagtcggaagaacacgatacgacgccgattacgtcaatgctgagactgcgtcaggcgcggttaggtgtaaacgggtgcattatttccgggattgtactgggatcgctgtatggcctgatgccgctgtatcttaatcatcaggggattagcaatgcgagcatcggtttctggatggccgtgctggtgagcgccggtattttaggccaatggccgattggtcgtctggccgataagtttggtcgtcttctggtgctgcgtgtacaggtctttgtggtgatcctcggcagtattgccatgctgactcaggctgcgatggcgccagccttattcattctgggggcggcaggctttacgctctatcccgtcgcgatggcctgggcttgtgaaaaggtagaacgtcatcagcttgtggcgatgaaccaggcgttgctgctcagctataccgtaggcagcctgctggggccgtcatttaccgcgatgctgatgcagaattactctgataatctgttgtttattatgattgccagcgtctcgtttgtttatttgcttatgctgctgcgcaacgcaggacatacgccgacccctgtggcgcacgtttaa

SEQ ID NO: 75128 - DNA, 741 bp, Citrobacter koseri
atgtcagttattggtcgcattcactcctttgaatcctgtggcactgttgacggcccaggtatccgctttattacgttcttccagggctgtctgatgcgctgcctgtattgccataaccgcgacacctgggatacgcatggcggcaaagaagttaccgttgaagatctgatgaaagaggtcgtcacctaccgccactttatgaacgcatccggcggcggcgtaacggcttccggcggcgaagcgatcttacaggctgagtttgttcgcgactggttccgcgcctgtaagaaagaaagcatccatacctgtcttgataccaacggctttgttcgccgctacgatccgatcattgatgaactgctggaagtcaccgacctggtgatgcttgacctgaagcagatgaatgacgagattcatcagaatctggttggcgtatccaaccatcgcacgctggagttcgccaaatacatctccgcaaaaggcattaagacctggattcgctacgttgtggtgccgggctggtctgacgatgacgactcagcacaccgtctgggcgaattcacccgcgatatgggcaacgttgaaaaaatcgaactgctgccctatcacgagttaggcaaacacaaatgggtcgcaatgggcgaagaatacaagcttgatggcgttaaaccgccgaagaaagaaaccatggagcgcgtaaaaggtattcttgagcagtacggtcataaagtgatgtactga

SEQ ID NO: 75129 - DNA, 2283 bp, Citrobacter koseri
atgtccgagcttaatgaaaagttagccacagcctgggaaggttttaccaaaggtgactggcagaatgaagtaaacgtccgtgacttcattcagaaaaactacactccgtacgagggtgatgagtccttcctggctggcgcgacgaatgcgaccactgcactgtgggacagcgtaatggaaggcgttaaacaggaaaaccgcactcacgcgcctgttgactttgacacctccgttgcttctaccatcacttctcacgacgctggctacatcaataaagcgcttgagaaaatcgttggtctgcaaactgaagctccgctgaaacgtgcgatcatcccgttcggtggtatcaaaatggttgaaggttcctgcaaagcgtacaatcgcgagctggatccgatgctgaaaaaaatcttcaccgaataccgcaaaacccacaaccagggcgtattcgatgtttataccaaagacattctgaactgccgtaaatccggtgttctgactggtctgccggatgcgtatggccgtggccgtatcatcggtgactaccgtcgcgttgcgctgtacggtatcgacttcctgatgaaagacaaatacgcccagttcgtctctttgcagtctgacctggaaaacggcgtaaacctggaagcgactatccgtctgcgtgaagaaattgctgaacagcaccgcgcgctgggtcagatcaaagagatggcggctaaatacggctgcgatatctctggtccggctaccaacgctcaggaagctatccagtggacctacttcggctacctggccgctgttaagtctcagaacggcgcagcaatgtccttcggtcgcgtatccaccttcctggatgcgtacatcgaacgtgatatcaaagcaggcaaaatcaccgaacaagacgcacaggaaatgattgaccacctggttatgaaactgcgtatggttcgcttcctgcgtacgccggaatacgatgaactgttctctggcgacccgatttgggcaactgaatctatcggcggtatgggcgttgacggccgtactctggttaccaaaaacagcttccgcttcctgaacaccctgtacaccatgggtccgtctcctgagccgaacatcaccgttctgtggtctgaaaaactgccgctgaacttcaagaaattcgccgctaaagtgtccatcgacacctcttctctgcaatacgagaacgatgacctgatgcgtccagacttcaacaacgatgactacgctattgcttgctgcgtaagcccgatggttgttggtaaacaaatgcagttcttcggtgcgcgtgcaaacctggcgaaaaccatgctgtacgcaatcaacggcggcgttgatgaaaaactgaaaatgcaggttggtcctaaatctgaaccgatcaaaggcgacgttctgaacttcgacgaagtgatggaccgcatggatcacttcatggactggctggctaaacagtatgtcaccgcgctgaacgtgatccactacatgcacgacaagtacagctacgaagcctctctgatggcgctgcacgaccgtgacgttatccgcaccatggcgtgtggtatcgcaggtctgtccgttgctgctgactccctgtctgcaatcaaatatgcgaaagttaaaccgattcgtgacgaagacggcctggctgtagacttcgaaatcgaaggcgaatacccgcagtttggtaacaacgactctcgcgttgatgacatggcggttgacctggtagaacgtttcatgaagaaaattcagaaactgaccacttaccgtggcgctatcccgactcagtctgttctgaccatcacttctaacgttgtgtatggtaagaaaaccggtaacaccccagacggtcgtcgtgctggcgcgccgttcggaccaggtgctaacccaatgcacggccgtgaccagaaaggtgctgttgcctctctgacctccgttgcaaaactgccgtttgcttacgctaaagatggtatctcttacaccttctctatcgttccgaacgcactgggtaaagacgacgaagtacgtaaaaccaacctggcgggtctgatggatggttacttccaccacgaagcgtccatcgaaggtggtcagcacctgaacgtgaacgtgatgaaccgtgaaatgctgctggacgcgatggaacacccggaaaaatatccgcagttgaccatccgtgtatcaggttacgcagtacgttttaactccctgactaaagaacaacagcaggacgttattactcgtaccttcactcagaccatgtaa

SEQ ID NO: 75130 - DNA, 861 bp, Citrobacter koseri
gtgaaagctgacaacccttttgatctattactccctgctgcaatggccaaagtggccgaagaggcaggtgtctataaagcaacgaaacatccgctgaagactttctatctggcgattaccgcgggtgtgttcatttccattgcctttgttttctatatcaccgccacaaccggtacaggcacaatgccttttggtatggcgaaactggttggaggcatctgcttctcgctggggctgattctctgtgttatctgcggcgcagatcttttcacatcaacagtgctgattgttgtcgcgaaagcgagcggccgaatcacatggggccaactggcaaaaaactggctcaacgtttattttggtaacctgatcggttgtctgctctttgtgttgttgatgtggctttccggcgagtatatgaccgccaacggcggatgggggcttaacgtcctgcaaaccgccgaccacaagatgcatcatacttttattgaagctgtctgcctgggtatcctggctaacctgatggtttgcctggccgtgtggatgagctactcgggtcgtagcctgatggacaaagcgtttatcatggtattgcccgtcgccatgtttgttgccagcggttttgagcacagcatcgcaaacatgtttatgattccgatggggattgtaatccgtgacttcgccacaccggaattctgggccgcagtgggctccagtccggaaagtttttctcacctgaccgtgatgaatttcatcaccgataacctgattccggtcacaatcggtaacattatcggcggcggtttattggtcgggttgacatactgggtcatttacctgcgtggcgacgatcatcattgctga

SEQ ID NO: 75131 - DNA, 2019 bp, Citrobacter koseri
atgcgcgctacgtcacacaacagaatctatcggattgacgacataaaaccgatagattcgctgtcaggtagcccgttttacccggctggccttcgaccattctggatttgcgccgcgcgggcgtcattgacgatccccggcattcacaggaacgacgctactacgcacttttatttacgctgccggggcggcggcgatagcgccgtcaacataaaacccgtatcattgcgcgctttccgtacgacaaaagtgattttcatgacgcaaacatttatccccggcaaagacgccgccctggaagattccatcgctcgcttccagcaaaaactgctcgacctcggttttcatattgaagaggcctcctggctgaatccggtgcctaacgtctggtcggtgcatattcgcgacaaagagtgcgcgttgtgctttaccaacggcaaaggcgcaaccaaaaaagccgcgctggcttccgcgctgggtgaatattttgagcgtctgtccaccaactatttcttcgccgatttctggctgggtgaaaccatcgccaatggcccgttcgtgcattatccgaatgaaaaatggttcccgctaaccgatgacgacgccctgccggaagggttactggatgaccgtctgcgcgcgttctacgacccggaaaacgagctggccggaagcatgcttatcgatctgcaatccggtaacgaagatcgcggtatctgcggcctgccgtttacccgccagtctgataatcacaccgtgtatattccgatgaacattatcggcaacctgtacgtttccaacgggatgtcggccggtaacacccgcaacgaagcgcgcgtgcagggtttgtctgaagtgttcgaacgtcatgttaaaaaccgcatcatcgccgaaagcattagcctgccggaaattccagccgatgtgctggcacgctacccggcagtggtagaggccatcgctaagctggaggcagaaggtttcccaatcttcgcttatgacggctcgctgggcggtcagtatccggttatctgcgtcgtcctgttcaacccggccaacggcacctgcttcgcctccttcggcgcgcatcctgatttcggcgttgcgctggagcgtaccgtcaccgagctgttgcagggccgtggactgaaagatcttgatgtctttaccccgccaacgttcgacgacgaagaagtggctgaacacaccaaccttgagacgcacttcattgactccagcggtttgatctcctgggatctgttcaagcaggatgccgactacccgtttgctgactggagtttctccggcactacggaagaagagttcgccacgctgatggcaatcttcaatgcggaagataaagaggtctatattgccgactatgagcacctcggcgtttatgcctgccgcattattgtgccgggcatgtctgatatttatccggcagaagatctgtggctcgccaacaacagcatgggcagccatctgcgcgaaaccctccttgccctgccgggcagcgcatgggagaaagaggcttacctcaatctgattgaacaattagatgaagaaggctttgatgactttacccgcgtgcgcgagttacttggcctggcgacaggcccggataatggctggtataccctgcgcatcggtgagcttaaagcaatgctggcgctggctggcggcgatctggagcaggcgctgatctggacagagtggacgatggaattcaacgcctccatctttagcgctgaacgtgcgaactactaccgctgtctgcaaacgctgctgcttctggcgcaggaagaagaccgcgaaccactgcaatacctgaatgcttttgttcggatgtatggcgccgaagctgttgaagcggccagcgcggcactgagcggcgaagcggcattttatgggctgcaagcggttgatagcgatctgcatgctttcgcatcacatcagtctctgctgaaagcctatgagaaattgcagcgcgccaaggccgctcactggtcaaaatag

SEQ ID NO: 75132 - DNA, 1053 bp, Citrobacter koseri
atgctaccggcggaagtgcttaaactggctcaacaggatctgcgtgactggcacggtcttggcacgtcagtaatggaaattagccaccgtggcaaagaatttatccaggtcgcagaggaagcggaacaggattttcgcgatctcctcagcatcccctccaactacaaagtattgttctgccacggcggcggccgtgggcagtttgcggcaattccgttaaatattctgggcgataaaacgtcggcggattacgttgatgccggttactgggcggccagcgccatcaaagaagcgaaaaaatactgttcgccaaacgtgattgacgccaaagtcacggttgacggtctgcgtgcggtcaaaccgatgagcgagtggcagctttctgataacgccgcttacgttcattattgcccgaacgagactatcgacggcatcgcaattgatgaaacgccgaattttggttcggatgtcgttgtggctgcggatttctcatccacaattctttccgcgccgctggatgtgtcgcgttatggcgtgatctacgccggggcgcagaaaaacatcggcccggcggggctgacaattgtgatcgtgcgtgaagatctgttaggtaaagcgaacatcgcttgcccgtctatccttgattacaccgtgctgaacgacaacgactcgatgttcaataccccgccgacctttgcctggtatctttctggcctggtgttcaaatggctgaaagcgcagggcggcgttgcggcgatgaacaaaatcaatcagcaaaaagcggaactgctgtatggcgtgattgataacagtgatttctaccgtaacgatgtggcgaaatcgaatcgttcacgtatgaacgtgcctttccagctagcggacagcgcgcttgataaagtcttcctggaggaatctttcgctgcgggtctgcatgcgctgaaaggtcatcgcgtggtgggcggaatgcgcgcctctatctataacgcaatgccgcttgaaggcgtgaaggcgttgacggatttcatggtcgatttcgagcgtcgccacggctaa

SEQ ID NO: 75133 - DNA, 1284 bp, Citrobacter koseri
atggaatccctgacgttacaacccatcgcgcgggtcgatggcaccatcaatctgcctggctccaagagtgtttcgaatcgcgctttgttactggcggcattagcaagcggcaccactgttctgacaaacctgctggacagcgatgatgttcgccatatgctgaacgcgctgagtgcgttgggggtcagttataccctttccgccgaccgtacccgttgtgaaattaccgggcagggcggcgtattacatgccgaaggcgcgctggaactgttcctgggcaatgcgggaacggcgatgcgtccgcttgccgccgcgctgtgcctgggggcaaatgatatcgtgctgaccggtgagcctcgcatgaaagagcgcccgatcggtcatctggtcgatgcgctgcgtcagggcggtgcgaagattgattatctggagcaggaaaactatccgcctctgcgtctgcgcggcggttttagcggtggtcacgttgaggttgatggcagcgtctccagtcagttcctcaccgcgctgctgatgaccgcgccgcttgcgccgcaggacacgacgatcgcaattaaaggcgatctggtgtccaaaccgtatatcgacatcacgctgaacctgatgaaaacattcggcgttgaggttgagaaccagaattaccagcgttttgtggtgaaaggggagcagcagtatcgttcaccgggtcaatatctggtggaaggcgacgcgtcatccgcttcttatttccttgccgctggcgccattaaaggcggaacggtaaaagtgacggggattggccgcaacagtatgcagggcgatatccgctttgccgacgtactggagaagatgggcgccaccatcacctggggcgatgacttcattgcctgtacgcgcggtgaactgaacgctgtggatatggacatgaaccatatcccggatgcggcgatgaccatcgccacggcggcgttgtttgctaaaggcaccaccacgctgcgtaatatctataactggcgtgtgaaagagactgaccgcctgtttgcgatggcgacggaactgcgtaaagtcggcgctgaagtggaagaggggcatgatttcattcgtatcacgccaccgactcagttgcagtttgccgaaatcggcacctataacgatcaccgtatggcgatgtgtttctcgctggtcgcgttgtcggatacgccggtgacgattctcgatccgaaatgtaccgctaaaaccttcccggattacttcgaacaactggcgcgtattagtacgcctgcctga

SEQ ID NO: 75134 - DNA, 684 bp, Citrobacter koseri
atgacggcaattgccccggtaattaccattgatggcccaagcggtgcaggtaaaggcaccttgtgcaaggcaatggcggaagcattgcaatggcatctgctggactcgggcgcgatttatcgtgtactggcgctggcggccttacatcatcatgttgatgtcacctctgaagacgctcttgtaccgcttgcgtctcatctggatgttcgttttgtctcaaccaatggcaatctggaagtcattctggaaggggaagatgtgagcggggaaatccgcacgcaagaagtcgcgaacgcggcatctcaggtcgctgcgttcccgcgcgtgcgcgaagcgcttttgcgccgccagcgtgcgtttcgcgatgcgccagggttgattgccgatggccgcgacatgggaacggtggtattccctgatgcgccagtaaaaattttcctggatgcgtcttctgaagaacgcgctcaccgccgtatgctacagttgcaggagaagggctttagtgttaactttgaacgccttttggccgagataaaggaacgtgacgaccgcgatcgtaatcgcgctgtcgcgccactggttcctgctgccgatgctttagttctggattctacccgattaagcattgagcaagtgattgaaaaagcgttacaatacgcgcgccaaaaactggcactcgcttaa

SEQ ID NO: 75135 - DNA, 1674 bp, Citrobacter koseri
atgactgaatcttttgctcaactctttgaagagtccttaaaagaaatcgaaacccgcccgggttccatcgttcgcggcgttgttgttgctattgataaagatatcgtactggttgacgctggtctgaaatctgaatccgccattccggctgagcagttcaaaaacgcccagggcgaactggaaatccaggttggcgacgaagttgacgttgctctggatgcagtagaagacggcttcggcgaaaccctgctgtcccgtgaaaaagcgaaacgtcacgaagcctggatcacgctggaaaaagcttacgaagatgctgaaactgttaccggtgttatcaacggcaaagttaagggcggcttcactgttgagctgaacggtattcgtgcgttcctgccaggttccctggtagacgttcgtccggtgcgcgacacgctgcacctggaaggcaaagagcttgaattcaaagtcatcaagctggatcagaagcgcaacaacgttgtggtttcccgtcgtgccgttatcgaatccgaaaacagcgcagaacgcgatcagctgctggaaaacctgcaagaaggcatggaagttaaaggtatcgttaagaaccttactgactacggtgcattcgttgatctgggtggcgttgacggcctgctgcacatcaccgacatggcatggaaacgcgttaagcatccgagcgaaatcgtaaacgttggcgacgaaatcactgttaaagtgctgaagttcgaccgcgagcgtactcgtgtatctctgggcctgaaacagctgggcgaagatccgtgggtagctatcgctaagcgttatccagaaggtaccaaactgactggtcgcgtgaccaacctgaccgactacggctgcttcgttgaaatcgaagaaggcgttgaaggcctggttcacgtttccgaaatggattggaccaacaaaaacatccacccgtccaaagttgttaacgttggcgatgtagtggaagttatggttctggatatcgacgaagaacgtcgtcgtatctccctgggtctgaaacagtgcaaatccaacccgtggcagcagtttgcggaaacccacaacaagggcgaccgtgttgaaggtaaaatcaagtctatcactgacttcggtatcttcatcggcctggacggcggcattgacggcctggttcacctgtctgacatctcctggaacgttgcaggcgaagaagcagttcgtgaatacaaaaaaggcgacgaaatcgcagcagttgttctgcaagttgacgcagagcgtgagcgtatctccctgggcgttaaacagctcgcagaagatccgttcaacaactgggttgctctgaacaagaaaggcgctatcgtaaccggtaaagttactgctgttgacgctaaaggtgcaaccgtagaactggctgacggcgttgaaggttacctgcgtgcttctgaagcatcccgtgaccgcgttgaagatgcgactctggttctgagcgttggcgacgaagttgaagctaaattcaccggcgttgatcgtaaaaaccgcgcaatcagcctgtctgttcgtgcgaaagacgaagctgacgagaaagatgcaatcgcaactgttaacaaacaggaagatgcaaacttctccaacaacgcaatggctgaagctttcaaagcagctaaaggcgagtaa

SEQ ID NO: 75136 - DNA, 285 bp, Citrobacter koseri
atgaccaagtcagaattgattgaaagacttgcaacccagcaatctcacattcccgcgaaagcggttgaagatgcagtaaaagagatgctggaacatatggcctcgactcttgcgcagggcgagcgtattgaaatccgcggtttcggcagcttttctttgcactaccgcgcacctcgtaccggacgtaacccgaagactggcgataaagtagaactggaaggaaagtatgttccgcactttaagccgggtaaagaactgcgcgatcgcgccaatatttacggttaa

SEQ ID NO: 75137 - DNA, 2265 bp, Citrobacter koseri
atgaaaataacaacggtcagcgtgtgtgcattatgcggaattcttccgctaatactcttacctgtacttcccggttcgttgtgtctcattggcatattttgttttgcctgcgcgctgtcctttgttccatataaatatacgcagtacgccagcttgaccctgctgttttttctctggggaatacttgctgcaaagcaagccgtctggccgggtaataccttgcctggcgcaacacaagaagccgtggtgcaaattacggcgaccgatcatgccaccacacattacgggcaaattacccatgtacaggggaaacgcctgtttccctcggtgggcgttgttctttatgggcaatatttgcccggcgaggtgtgtgcaggtcaacgttgggcgatgaaactaaaagtccgtgccgtgcatggtcagcttaatgaggggggatttgatagccagcgttatgcgcttgcgcaacatcagcctctgagcggccggtttctgcatgcgacggtcatcgaatcgtcatgtagtttacgcgcgcgttatcttgcttccctcaataccacgctggcgcactacccctggcagcaggttatcctggcattaggcatgggcgagcgtttatcagtatcgcaagaagtcaaaaatattatgcgtgatactggtacggcgcacctgatggccatttcagggttgcatatcgcctttgccgcactgctggcgggaggattgattcgtggcgcgcaatttttacttcctacccgctggattcactggcaaacgccgttagtgggagggattgtgtgcgcgacgttttatgcctggctcacggggttacaaccccccgcgttgcgtacggttgtggcgctggcggcgtggggattactgaagctgagcggtcggcaatggagcggttgggaggtctggttctgctgcttggcggcaatagtgattgccgatccgattgctgttctgtcgcaaagtctgtggctttcggcctttgccgtcgctgcgcttattttctggtatcagtggtttcctgtaccggcctgggcgttgcctcgggcagggaaagtcgtgttggacctcgttcacttacagttgggcattacgcttctgctcttacctgtgcaaatagcgctttttcatggcgtaagtgtgacctcttttctggcgaatctgtttgcggttcctttggttacatttatctctgtaccactgatactggcgggaatgatcggccatttgaccgggccgctgatggctgaagaaggcctctgggcgctggctgacgcctctctggacgtgttgttccgggcgctgaaaagtctgccggaagggtggattaatattgattatcgctggcaatacctgtccttggctccctggttaacgcttatggcatggcgattgaatgtctggcgaacttacccggtgatctgtttgtctggcgtgttgctgttgagctggccgttatggcgtacgccgcgcacggaggcgtggcaggttcatatgctggatgtcggacaggggctggcgatggttatcgcacataacgggaaagcgatactttatgatacgggacgcgcctggccggatggcgatagcgcacagcagctcatcattccctggctacgctggcacaatctggaacctgaggggattatcctgagccatgaacatctggatcatcggggtggcctgtcatcattacagaagacgtggccttcgctctggatacgaagcccattaggctggaagggccatctgccgtgctttcgtgcggagcagtggacgtggcaggggctatccttcagcgcacactggccgattaaaggaaacagggaaaagggcaacaaccattcctgtgtggttaaagtggatgacggaaagcagagtattttgctgacgggcgatattgaatctccggctgaacaaaaaatgctaagtcgttattggcggcatttgcaggcgacaattattcaggttccgcatcatggcagtaatacatcgtcgtcattagcgttaattcaacgggttgagggcctggccgcgctggcgtcggcatcgcgctacaacgcctggcgtctgccttcctggaaggtaaaacagcgctatcaacaacaaggttatcagtggctggataccccgcatcaggggcaaatttcggtggatttttccccgcaaggctggcgcatacgaggtttacgggagcaaattttacctcgttggtatcatcagtggtttggcgtgtcagaggataacgggtag

SEQ ID NO: 75138 - DNA, 1749 bp, Citrobacter koseri
atgcataacgataaagatctctctacgtggcagacgttccgccgactgtggcctaccattgcgcctttcaaaactgggctgatcgtggcgggtgtcgcgttgatcctcaatgcggccagcgatgcttttatgttatcgctcctcaaaccattgctggacgatggttttggtaaaacagatcgatcggtgctgctttggatgccgctggtggttattggcctgatgatattacgtggtatcaccagctatatttccagctactgtatttcatgggtatcgggcaaagtggtgatgaccatgcgccgtcgtctgtttggtcatatgatggggatgcctgttgcattctttgataaacaatcaacggggacactgctttctcgtattacctatgactcagaacaggttgcgtcatcgtcttccggggcgttgattacggtcgtgcgtgaaggtgcatcgatcatcgctttgtttatcatgatgttctataacagctggcaactgtcgatcattctggtcattctggcgcccgttgtgtctattgcgattcgcgtggtttcgaagcgttttcgtagcatcagtaaaaacatgcagaacacgatggggcaggtgaccaccagtgcagagcagatgctgaaaggccacaaagaagtgcttatctttggcggtcaggaagttgaaacgaagcgttttgacaaagtcagcaataaaatgcgtctgcaagggatgaaaatggtgtctgcatcatccatctctgatccgatcattcagctgatcgcgtctctggcgctggcctttgttctctatgcggctagcttcccgagcgtaatggacagcctgactgcgggtacgattaccgtcgtattctcatcaatgattgccctgatgcgtcctctgaaatcgctgaccaacgtcaatgcgcagttccagcgtggtatggcggcatgccagacgctgtttgctattctggatagcgagcaagagaaagacgaaggcaaacgcgtaattgaacgctcgacgggcgatctggaattccgcaatgtgacctttacctatccggggcgtgaaacgcctgcgctgcgcaatatcaatctgcacattccggcgggtaagacggttgcgctggttgggcgttccggttcaggtaaatcaaccattgccagtctgatcacgcgcttctacgacatcaatgaagggaatatcctgatggatgggcacgatctgcgtgaatataccctgtcttcattgcgtaatcaggtcgcgctggtttcgcagaatgtgcacctgtttaacgatacggttgcgaacaacatcgcctatgcgcgtactgaagagtacagccgcgagcaaattgaagaagcggcgcgtatggcgtatgccatggactttatcagcaagatggatgacggtctggatacggttatcggcgagaacggcgtactgctttccggtggtcagcgtcagcgtatcgcgattgcccgtgcgttgctgcgtgacagcccaatcctgattctggatgaagccacctctgcgctggacaccgaatccgaacgcgcgattcagtccgcgctggatgagttgcagaaaaaccgtacttcgctggttatcgcgcaccgcctctcaacgattgaacaagctgatgaaattgtcgtggtggaagacgggattattgttgagcgtggaacccatcgcgaattgctggagcagcgcggggtgtattcgcaactgcataaaatgcaatttggccaatga

SEQ ID NO: 75139 - DNA, 978 bp, Citrobacter koseri
atgatcgcccgcatctggtctggtgaatcgcccctgtggcgtctgttgctcccactctcctggctgtatggcctggtgagtggggggattcgcttgtgctaccggctgggaattaaacgcgcctggcgtgcgccggtgccagttgttgtcgtcgggaaccttacggcggggggcaacggaaaaacgccggtcgttatctggctggtcgagcaactgcaacagcgcggcattcgcgtaggggttgtttcgcgggggtatggcggtaaagcggcgtcttatccgctgttgcttactccacaaacgtcctctacggaagcgggcgatgagccggtactgatctatcaacgaaccggcgcgcctgtcgctgtctcgccggttcgctcagacgcagtaaaagcgattctcgcgcgtcacgatgtacaaattatcgtgacggatgacgggctacagcattatcgtctggcgcgcgatattgaaatcgttgtcatcgacggcgtgcgtcggtttggcaatggctggtggctgcccgcagggccgatgcgtgagcgcgccagtcggcttaaatcggtagatgcggtgatcgtcaacggcggcgttgccagaccaggagaaattccgatgcagctggcgccagggctggcggtcaatttatgcaccggtgagcgccgtcatgtcgcggagttaagcaacattgtcgcgatggcggggattggccatcctccacgtttctttgctacgctcgaagcgtgtggggcgtcgctacagaaatgcgttccgttggccgatcatcagtctctcgcctctaacgatgtgaaggcgttagtaaccgacgggcaaacgctggtcatgacggaaaaagatgccgttaaatgccggggatttgccgaggacaactggtggtatttacctgtagacgcgcgtttgtcgggtgaacaacctgacgcactgcttgaacaactcatctcgctggctcgctag

SEQ ID NO: 75140 - DNA, 1233 bp, Citrobacter koseri
atgtcgttgccgcatctctctcttacggatgttcgtcatctccatcttgctgcgcaaggtttgctgaaaaagccccgccgtcaggcattgcctgcggatattctcgcaacgatttcgcgcatgtctttattgcaaatcgatacgatcaacgttgtggcgcgcagcccctatctggtgctgtttagccgcctgggccactacccgcaacaatggctggacgactcgttgtcgcgtggcgaactcatggaatactgggcgcatgaggcctgtttcttaccgcgtagcgactttacgctaattcgtcaccgtatgctggcgcctgagaagatgggctggaagtacaaagcatcgtggatgcaggaacatgccgatgagatcgcgcagttgatccagcatattcaccataacggccctgtgcgctcagcggattttgcgcatccacgcaaaggcgccagtggatggtgggaatggaagccgcataagcgccatcttgaaggattgttcactgccgggaaagtcatggttgtagaacggcgcaactttcagcgcgtgtatgacctgacgcaacgcgtgatgccgcactgggacgataaacgcgatttactgtcgcaggcagaagcagaaatcgccatgctggataatagcgcgcgcagtctggggatttttcgcgagcagtggctggcggattactatcgcctgcggcgacctgaagtgaaaacgtggcgtgatatccgcgttgaacaagggcaactggttcccgttcaggccgacaggctgggggcaatgtggctacacgccgatctgttgccgctactggagcaggcgctgaacaataagctcaccgctacgcatagcgcggttttatccccttttgatcccgtcgtctgggaccggaaacgggcagagcagttgttcgattttagctaccgcctggagtgctataccccggcgcctaaacgccagtacggctattttgttttgccgctgctgcatcgggggcagttggttgggcgtatggatgccaaaatgcatcgcaaaacgggcgttctggaagtcatctcgctctggttgcaggagggggttaaaccgggcccgacgctgcaaaaagggctgttgcaggcgattaatgcgttcgctcgctggcaacaggccagccgcgtcacgctagggaactgcccatccggcttgtttgcagaaaatcgtcatggctgggaaatagacgcggtctcataa

SEQ ID NO: 75141 - DNA, 183 bp, Citrobacter koseri
atggatcatcgtctacttgaaatcattgcctgcccggtatgcaacggcaaactctggtataaccaggaaaaacaagaactgatttgcaaactggataacctggctttcccattgcgcgatggcattccggtattgctggaaacggaagcgcgttccattactgctgatgagagtaaatcatga

SEQ ID NO: 75142 - DNA, 747 bp, Citrobacter koseri
atgagttttgtggtcattattcccgctcgtttttcgtccacgcgtctgcccggtaagcctttactggatatcaacggcaaaccgatgatcgtgcatgttctggaacgcgcgcgcgaatctggcgctgaacgcattattgtcgcgacggaccatgaagatgtcgctcgcgcggtagaagcggcgggtggggaagtttgcatgacgcgcgctgaccatcagtccgggacggagcgtctggcggaagtcgttgaaaaatgcggttttagcgacgataccgttattgtgaacgtgcagggcgatgaaccgatgatcccggcggtgattattcgtcaggtggcggaaaacctggcgcagcgccaggttggtatggcgacgctggcggcgccgattcacggtgctgaagaagcctttaatcctaatgcagtgaaagttgtgctggatgctgaaggctatgcgctttatttctcgcgtgcgacgatcccctgggatcgcgatcgttttgcgaaaagccttgagaccgtgggcgacacgttcctgcgccatctgggaatttacggctatcgcgccgggtttgttcgccgctacgtgaactggcagcccagcccgcttgagcatattgagatgctggagcagcttcgtgtgctgtggtatggcgaaaaaatccatgttgccgtcgccaaagaagtcccgggaacgggcgttgatacagccgaagatcttgagcgcgttcgcgccgaaatgcgctga

SEQ ID NO: 75143 - DNA, 894 bp, Citrobacter koseri
atggaacagttgcgagccgaactgagtcatctgctgggcgaaaaactcagccgtatagagtgcgtgagtgaaaaggcggatacggccttgtggtcgctgtacgacagtcagggaaacccgatgccgctaatggcgagaagttttacgacccctggcgtggcgcagcaactggcatggaaaacgaccatgctggcgcgtagcggcacggtacgcatgccggttgtctatggcgtgatgacgcatgaggaacaccccgggcctgatgtcctgctgctggagcgtctgcgtggcgtctctgtggaagcgcccgcccgcacgcctgagcgctgggagcaattgaaggatcagattgtagaagggttgttagcctggcatcgacaggacagccggggttgcgtgggcgcggtggatcatacgcaggaaaatatctggccgtcctggtatcgccagcgtgttgaagtgctatggacgacgttaaaccagttcaacaacaccgggttaaccatgcaggataaacgcattctgtttcgtacccgggagtgcctgcctgcgctgtttgaaggatttaatgataattgcgtgctcatccacggcaattttagcctgcgcagtatgctgaaagacgcccgcagcgatcagcttctggcaatggtggggcctggcgttatgctgtgggcgccacgagagtatgaactgttccggctgatggacaatgcgctggcggaagggttgctctggcattatctgcaacacgcgccagtggcggaatcgttcatctggcggcgttggctttatgtgttatgggacgaagtcgcgcaattggtcaataccgggcgttttagccgctccaactttgacctcgcaacaaaatcactgctgccctggctcgcctga

SEQ ID NO: 75144 - DNA, 780 bp, Citrobacter koseri
atgctttttactctgaagaaagtgactggcggtctgttgctgccgcttccctttatactgctcatcatgggcgtggggctggcgctggtatggtttagccgctttcagaaaaccgggaaggcgtttatcagcctgggatggctggcaatatttctgttaagcctgcaacctgttgctgatcgtttactcaaaccgattgaagacagttaccccacctggcagggaacgcaaaaagtagactatatcgtggtgctgggcggcggctacacctggaacccccagtgggcgcccagttcaaatctgatcaataacagcctcccacgtctgaacgaaggcgtacgcctctggctggccaatccgggatcgaaactgatctttacgggcgcggcggcaaaaaccaatcgcgtgagtacggcagaagcgggcgcaagagtggcacaatcgctgggtgtgccacgcagcgacatcatcacgctggatcagccaaaagataccgaagaagaggcggaagcggtgaaacaggccataggcgatgcccctttcctgctggtcacttccgcctcccacttaccgcgcgccatgatcttcttccagaatgttgggttacatccgctgcctgcgccagccaatcaactggcgatagattcaccgttaaatccgtgggagcgagcaattccctccccggtatggttgatgcatagcgatcgcgccggttatgaaacgctggggcgcatctggcagtggctgaaaggcgcgtcaggcgagccagggcagcagtga

SEQ ID NO: 75145 - DNA, 780 bp, Citrobacter koseri
atgcgggaccgcaattttgatgacattgctgaaaagttttcccgtaacatctacggaaccactaaagggcagctgcgacaggcgattctgtggcaggatcttgatcggttgctggcggaattcggcgagcgaaaactgcacatcctggatgctggcggcggagaggggcaaacggccatcaaaatggcggagcgtgggcatcaggttacattgtgcgatctgtccggcgagatgatcgcgcgtgcgcagcaggcggcagaagcaaaaggtgtgagcggaaacatgcattttatacaatgcgccgttcaggatgtcgcttcgcatttggaaacctccgctgatctgatattgtttcatgctgtgctggagtgggtggcggaaccggtcggcgtgttagagacgctttggtcagttttgcgccccggcggagcactgtcgttaatgttctacaatgctaacggcctgttgatgcataacatggtggcagggaactttgactatgtgcaggtggggatgccaaaacgcaaaaagcgtacgctttcgccagactatccacgtaaacccgagcaggtttatcagtggctggaagatattggctggcagattaccggtaagaccggcgtacgcgtatttcatgattatctgcgtgagaagcatcaacagcgtgactgctatgagatgttagttgaattagaaacgcgttattgccgccaggagccgtatattagccttggccgctacattcatgtcaccgcgcgcaaaccgcagatgcaaggataa

SEQ ID NO: 75146 - DNA, 1323 bp, Citrobacter koseri
atgagtgaattttcccagacagtccccgaactggttgcctgggccagaaaaaatgacttttccatctctctgccggtagaccgactttcgttcctgctggcggtagccacgctgaacggcgagcgcctggacggggagatgagtgaaggcgaactggtggatgcgttccgccatgtcagtgatgcgtttgagcaaaccagcgaaaccatcggcgtgcgcgccaacaacgcgatcaacgatatggtacgtcaacgtctgctgaaccgctttaccagcgagcaagcggaaggcaacgccatttatcgcctgacgccgctcgggattggcattaccgattactacatccgccagcgtgagttttccacgttgcgcctttccatgcagctatccattgtcgcgggtgaactgaagcgggcggcggatgcggcagatgagggcggcgacgagtttcactggcatcgcaacgtttatgcgccgctgaaatattcggtcgcggaaattttcgacagcatcgacctgacccagcgcatcatggatgagcagcagcagcaggtaaaagacgacattgcgcagttgctgaacaaagactggcgcgcggcgatttcgagttgcgaactgctgctttctgaaacatccggcacgctgcgtgagttgcaggatacgcttgaagcggctggcgataaattacaggctaatctgttacgcatccaggacgccacgatggcgcatgacgacctgcattttgtggatcgtctggtgttcgatctgcaaagcaaactcgaccgcattattagctggggtcagcaatccatcgacctgtggattggctatgaccgacacgtacacaaatttatccgtactgcgattgatatggataaaaaccgcgtctttgcccagcgactgcgccagtccatccagagctattttgatgagccgtgggcgctgacctatgccaatgccgatcgtctgctggatatgcgcgatgaagagatggcgctgcgcgatgaagaggtgaccggagaactgccgccggacctggaatatgaagaatttaacgagatccgcgaacaactggcggcgatcatcgaagaacagctggctatctataaatccagacaagccccactggatctcggcctggtagtgcgcgaatatctggcgcaatacccacgagcgcgtcacttcgacgtggcgcgtattgttatcgatcaggcggtacgtcttggcgtagcgcaagcagacttcaccggactgccagccaaatggcagccgattaatgattacggagccaaggtacaggcgcatgtcattgacaaatattga

SEQ ID NO: 75147 - DNA, 705 bp, Citrobacter koseri
atgtcattgacaaatattgaacaagtgatgccggttaagctggcgcaggcgctggcaaacccgttatttccggcgctggatagcgcattacgctccggcagacatatcggtctggatgagctggataatcatgccttcctgatggatttccaggagtatctggaagagttttacagtcgctataacgtcgaactgattcgcgcgccggaggggtttttctacctgcgcccgcgttccacgacgattatcccgcgctctgtcttgtctgaactggacatgatggtgggtaaaatcctctgttacctctatctcagcccggagcggttggcaaatgaggggatttttacccagcaggaactgtacgatgagctgctcgccctgacagacgaagccaaattgctgaaactggtcaacaaccgctcaacggggtctgacgtggatcgtcagaaactacaggagaaggtgcgctcgtcgttaaaccgtctgcgtcgcttagggatggtgtggtttatgggccatgacagcagcaaattccgcatcacggaatcggtgttccgctttggcgcggatgtgcgtaccggtgacgatccgcgtgaagcgcagcgtcgcttaatccgcgatggtgaagccatgccggttgaaaatcacctgcaactcaacgatgagaccgaagagaatcagccggacagtggagaggaagaataa

SEQ ID NO: 75148 - DNA, 4470 bp, Citrobacter koseri
atgattgaacgcggtaaatttcgctcactaacgctgattaactggaacggcttttttgcccgcacctttgacctcgatgagctggtcaccacgctgtccggcgggaacggcgccggtaaatccaccacgatggcggcgttcgtcacggcgctgatcccggacttaaccttactgcatttccgtaacaccacggaagccggggccaccagcggatcgcgcgataaaggcctgcacggtaagctgaaagcgggcgtctgttattccatgctcgacgtcctcaattcccgccatcagcgtgttgtggtgggcgtacgtttgcagcaggtcgccggacgcgatcgcaaagttgatatcaaaccgtttgccattcagggcttgccgatgtcggtgcagccgacgcagctggtgacggaaacgctgaacgagcgccaggcgcgcgtgttgaccctcgcggagctgaaagagaagctcgatgcgatggaaggcgtgcagtttaagcagtttaactcgatcaccgattatcactcactgatgttcgatctgggcatcattgcccgccgtctgcgttctgcgtccgatcgcagcaagttctatcgtctgattgaagcctcgctgtacggcgggatctccagcgcgattacccgttccctgcgtgactacctgctgccggaaaatagcggcgtgcgtaaagcgttccaggatatggaagccgcgctgcgtgaaaaccgtatgacgcttgaagcgatccgcgtaacccagtcggatcgtgacctgttcaagcatttgattagcgaagccactaactacgtggcggcggactacatgcgccatgccaacgaacgccgggttcatctggataaagcgctggagtttcgtcgcgagctgtacacatcgcgtaagcaactggcggcggaacagtacaaacacgtcgacatggcgcgtgaactgggcgagcacaacggtgcggaaggggatctggaagcggattaccaggccgccagcgaccacctgaacctggtgcagaccgcgctgcgtcagcaggagaagatcgagcgctatgaagcggatctcgatgagttgcaaattcgtctcgaagagcaaaatgaagtggtggctgaagccgccgacatgcaggaagagaacgaagcccgtgcggaagccgccgagctggaagtggatgaactgaaaagccaactggcggactatcagcaggcgctggatgtgcagcagacgcgcgcgattcagtacaaccaggcgatccaggcgctcgaccgcgccaaagcgctttgtcatctgcctgacctgacggcggacagcgccgcagaatggctggaaacgttccaggcgaaagagcaggaagcaacggaaaaactgctttcgctggaacagaaaatgagcgtggcgcaaaccgcgcacagtcagtttgaacaggcatatcagctggtggccgccattaatggcccgctggcgcgtaatgaagcctggagtgtggcgcgcgacctgctgcgcgaaggtgtggaacagcgtcacctggcggagcaggttcagccgctgcgtatgcgtctgagtgagctggaacagcgcttgcgcgaacagcaggaagctgaacgcctgctggcggaattctgtaaacgtcagggcaaacatttcgacattgatgagctggaagcgctgcaccaggagctggaagcccgcatcgccgccctgtcggatagcgtttctaacgcccatgaacagcgtatgacgctgcgtcaggagcaggagcaactccagtcccgcattcagcacttaatgcagcgcgccccgatctggctggcggcgcaaaacagtctgaatcagctgtgcgaacagagcggtgaagagtttacctccagccaggaggtaaccgagtatctgcaacagttgctggagcgcgagcgtgaagcgattgtagagcgcgacgaagttggcgcgcgtaagaatgcggttgatgaagagattgaacgcttaagccagccgggtggctcggaagactcgcgtctgaacgcgctggcggagcgttttggcggcgtgttgctgtcggaaatctatgatgacgtcagcttcgaagacgcgccgtacttctccgcgctgtacggcccgtcccgtcatgctatcgtggtgccggatctgtcgctgatcgccgaacagcttgaagggctgacggattgcccggaagatctctatttcatcgaaggggacccgcagtcgttcgatgacagcgtcttcagcgttgatgagctggaaaacgcggtggtggtgaaaaccgccgagcgtcagtggcgttattcccgtttcccgacggtgccgatctttggtcgcgccgcgcgtgaaaaccgtattgaaagtctgcatgctgagcgcgaagggctgtctgaacgctttgcgacgttgtccttcgacgtgcagaaaactcagcgtctgcatcaggcgttcagtcgttttatcggcagccatctggcggtcgcgtttgaggccgacccggaagcggaaattcgccaattgaatggccgtcgcgttgaactggaacgcgcgctggctacgcatgaaaacgacaaccagcagcagcgtattcagtttgaacaggcgaaagagggcgtctccgctctgaaccgcttactgccgcgcctgaacctgctggcggacgacacgctggctgaccgcgtggatgaaattcaggaacgtctggatgatgcgcaggaagcggcgcgttttatacagcaacacggtaatcagttagccaaactggagccgatcgtctcggttctgcaaaacgatcccgaacagtttgagcaactgaaagaagattacgcatactcccagcaaacgcagcgggatgcgcgtcagcaggcttttgcgctgaccgaggtcgtacagcgtcgggcgcacttcagctattccgactcggccgaaatgctgagcggcaacagcgatctgaacgaaaaactgcgtcagcgtctggaacaggcggaagccgagcgtacccgtgcccgtgaagcgttacgcggtcatgccgcgcaactcagccagtacaatcaggttctggcctcactgaaaagctcgtatgacaccaagaaagagctgctgggcgacctgcaacgtgaattacaggatatcggcgtgcgtgccgacagcggttcggaagagcgcgcgcgtatccgccgtgacgaactgcatacgcaactgagcaataaccgctcacgtcgtaaccagctggaaaaagcgctgaccttctgtgaagcggagatggataacctgacccgcagactgcgcaaactggaacgcgattatcatgaaatgcgcgagcaggtggtcaccgcgaaagccgggtggtgcgcggtgatgcggatggtgaaagataacggggtagagcgccgtttacatcgtcgcgagttggcttatctgtcggcagatgaacttcgctccatgtcggataaggcgttgggtgcgttgcgtctggcggtggcggataacgaacacctgcgtgatgtattacgtatgtcggaagatccaaaacgaccggaacgtaagatccagttcttcgtggcggtttaccagcatctgcgggagcgtattcgccaggatatcatccgtaccgatgacccggttgaggccatcgaacagatggaaattgagttgagtcgcctgacggaagagctaacctcccgcgaacagaagctggcgatcagctcgcgcagcgtggcgaacattattcgtaagacgattcagcgcgaacaaaaccgtattcgtatgctgaaccaggggctgcaaaacgtctcgttcggtcaggtgaacagcgtgcgtctcaacgttaacgtgcgggaaacgcatgcgaccttgctggatgttctttccgaacagcatgagcaacatcaggatctgtttaacagcaaccgcctgaccttctctgaagcgctggcgaagctgtatcagcgcctgaatccgcagattgatatggggcagcgtacgccgcagaccattggcgaggagttgctggattaccgtaactatctggagatggaagtcgaggtcaaccgtggttcagacggctggctgcgtgcggagtccggcgcgctgtctaccggtgaagcgattggtaccgggatgtccattctggtgatggtagtacaaagctgggaagacgaaggccgccgcttgcgcggaaaagatatctccccatgccgcctgctgttccttgatgaggctgcgcgtctggatgcgcgttccatcgcgacgctattcgaactgtgcgaacgtctgcaaatgcagcttatcatcgcagcgccggaaaacatcagccctgagaaaggcaccacctataagctggtgcgtaaggttttccacaataccgaacacgttcatgtggtcggactgcgtggcttcgccccacaactgccggagaccctacctggcactggcaccgaagatgcctcgtcgcaggccgccgggtaa

SEQ ID NO: 75149 - DNA, 1863 bp, Citrobacter koseri
atgttgcttaacaaaatttgtagtcgtcggctgtcggcaatcagtttatgcctggccgtaacatttgctccactgttcagtgtgcaggccgatgagcctgaaatgattcctggcgacagctcagcgaccgtcagcgaacagcctaccgcgttgtcacagccgcaagcgcaatcgcctgcgacagcggtaatggcggggattcagccgctgccggaggggatctctgcggagaaagcccgggctgaattacaatcgcaacttccttctggttatacgccggtttatctgaatcaactggaactgctgtatgccgcccgcgatatgcaaccaatgtgggaaaatcgcgatgcggtgaaagcgtttcagcagcaactggcggaagtggccatcgccgggttccagccgcaatttaccacttgggtcgcgctgctgaccgacccgtcagtcaccggtctggcgcgagatgctgttttatccgacgccatgatgggctatctccatttcatcgccaatattcccgtaaaagggacgcgctggctgtacagcgacaaaccttatgcgctggcaacaccgccgctttcagtgatcaaccagtggcaggttgcgttggacaacggtcaactgacgacgtttgtcgccagccttgcgccacagcatccgcaatacgccgcgctgcatgattcactgaaaaagctggttagcgacgctcgtccctggccgcagttgaccagtaccgcgacgttgcgtcctggtcagtggagcaatgatgtgcctgcgctgcgtgagattttacagcgcaccggtatgctggaaggcgggcctaagatagcgctcccgggggatgacgtggcggccgatgtggttgtcagcccttccgccgtcgcagtggagcctgccgccgtgaaacctgttgcccggcaatccactcagcgcagccaacccgctccggcagtccgtgcggcttatgatcgtgagcttgttgatgcggtgaaacgttttcagacctggcaagggctgggggcggatggcgctgtcggcccggcgacgcgcgaatggctgaatgtgacgcctgcgcaacgtgcgggggtgctggcgctgaatattcagcgtttgcgtttactgccaggagaattatcaacgggcattatggtcaatattccggcctattcgctggtttattaccagaacggcaaccaggtgttggcttcccgggtgattgttggccgccccgatcggaaaacgccaatgatgagcagcgcgcttaataacgtggtggtgaatccgccctggaatgtgccgccaacgctggcccgaaaagatattctgcccaaagtctggaatgatccagggtatctggaacgccacggttataccgttatgcgcggctggaacagcaaagagacgattaacccgtggcaggtggactggtcgaccattacgccatcgaatctgccgttccgcttccagcaggcgccgggcgcacacaactcgctggggcgttacaaatttaatatgccaagttcagacgcgatttatctgcacgatacgccgaatcacaatctgttccagaaagatacgcgagcgctcagttccggctgcgtgcgtgtgaataaggcctctgagctggcaaatatgctgcttcaggatgcaggctggaacgatacgcggatttcggatgcgctgaagcaaggtgatacccggtacgtcaacatccgtcagaatattccggtgaatctgtattacctgacggcgtttgtgggagcagacggacgcactcagtatcgtacagatatttacaattatgatctgactgcgcgatccagcgcacaaattgtgtcaaaagcagaacaattaatcaggtaa

SEQ ID NO: 75150 - DNA, 549 bp, Citrobacter koseri
atggacaaatttgacgctaatcgccgcaagttgctggcgtttggtggcgttgctctcggcgccgccatcttgcctacgccagcatttgccacactctccaccccacgtccgcgtattttgacactgaacaacctccataccggagagtcaattaaagcggagtttttcgacggaagagcctatattcaggatgaattagcaaaactaaaccattttttccgtgattttcgcgcgaataaagtgaaagccatcgacccaggattgttcgatcagctcttccgcctgcaaggccttttaggcacccgtaagcccgtacagctcatctcgggttaccgctcactggataccaataacgaactgcgtgcgcacagtcgtggagtggcgaaaaaaagctaccacacgaaagggcaggcgatggatttccatattgaaggcgtttcattaagtaatattcgcaaagctgcgttatctatgcgcgcaggtggtgtaggatactacccacgcagtaactttgtgcatattgacaccgggccggcacggcactggtga

SEQ ID NO: 75151 - DNA, 648 bp, Citrobacter koseri
atgaactatcgtattattccggtcaccgcattctcccagaactgttcattgatctggtgtgagcaaacccgtctggccgcgctggtcgatcccggcggcgacgcacagaccatcaaacaggaagtggacgccagcggcgtgacgttgatgcagatcctgcttacgcacggtcatctcgatcatgttggcgcggcggcggaactggcaaagcattatggcgtgccagtgatcggcccggaaaaagaagatgagttctggctacagggtttaccggcgcaaagtcgcatgtttggtctggaagagtgtcagccgctgacgcctgaccgttggctgaatgagggagatcgtattagcgtagggaatgtgactttacaggtgttgcattgtcctgggcatacgccgggccatatcgtcttctttgatgagtcttcacggctactgatttccggtgacgtgatcttcaaaggcggcgttgggcgcagcgatttcccgcgtggcgatcacgctcagctgattgattcgatcaagcgtaaattattgccgttgggcgatgatgtgacgtttatttcgggtcatgggccgatgtcgacgcttggtcatgagcgactgcataacccgttcctgcaagatgaaatgccggtctggtaa

SEQ ID NO: 75152 - DNA, 1191 bp, Citrobacter koseri
atgtttgagaacattaccgccgcccctgccgaccctattctgggcctggccgatctgtttcgtgtcgatgaccgtcccggaaaaattaaccttggtatcggtgtctataaagatgagacaggcaaaacgccggtgttaaccagcgttaaaaaagccgagcagtatttactggaaaatgaaaccaccaaaaactatctcggtattgatggtattccagaattcggccgttgcacgcaggaattactgtttggcaaaggtagcgcgctgatcaatgacaaacgcgctcgcaccgcgcaaacgccaggcggtactggcgcgctccgtgttgccgcggacttcctggcaaaaaatacggcggtaaaacgcgtgtgggtaagtaatccaagctggccaaaccataagggcgtgtttaattccgccggtctggaagtgtgcgaatacgcttattacgatgcagaaaaccacgcgcttgatttcgatgccttgctggcaagcctcaataacgcgcaggctggtgacgtcgttctgttccatggctgctgccataacccaaccggtatcgatccgacgctggaacagtggcaaacgctggctcagctttctgtcgaaaaaggctggctgccgctgtttgacttcgcctatcagggttttgctcgcggtctggaagaggacgcggaaggtctgcgtgcgttcgcagcgttgcataaagagctgatcgtcgccagttcctactctaaaaactttggcctgtataacgagcgtgtcggtgcctgtacgctggttgccgcagatgcagaaaccgttgatcgcgcattcagccagatgaaatccgccattcgcgccaactactctaaccctccggcacacggcgcatccgttgtagcgactatcctgagcaacgatgccctgcgtgctatctgggaacaggaactgaccgatatgcgccagcgtattcagcgcatgcgtctgttgttcgtcaatacgttgcaggaaaaaggcgcagatcgcgatttcagctttatcactaaacagaatggcatgttctcattcagcggcctgacgaaagagcaggtactgcgtctgcgtgaagagtttggcgtatatgcggtggcttctggtcgcgtcaacgtggctggaatgacgccggataacatggctccgctgtgcgaagccattgtcgccgtactgtaa

SEQ ID NO: 75153 - DNA, 1119 bp, Citrobacter koseri
atgatgaagcgtaatatcctggcagtggtaatccctgccctgctggcagctggcgccgcaaacgcagccgaagtgtacaacaaagatggcaacaagctggacctctacggtaaagcggtaggtctgcactacttctctaaagacaacggcaaaaacagctacggcggtgatggcgaccagacctatgcacgtctgggttttaaaggtgaaacccagatcaacgatcaactgaccggttacggccagtgggaataccagttcagcggtaacagatccgaaggtggttctgactctcagaaaggcaacaaaacccgtctggcattcgcgggtctgaaactcggcgatgcgggttctctggactacggtcgtaactacggtatcgtttacgatgcactgggctacaccgatatgctgccagaatttggtggtgacactgcatacagcgataacttcttcgttggccgtgttggcggtgtggcaacctaccgtaactccaacttcttcggtctggttgacggcctgaacttcggcgttcagtatctgggcaaaaacgagcgcgcaagcaactacgttgttaacgcagacgattccagtaacttcagcgacgtacagcgctctaacggcgacggctggggtgcatctctgagctatgaattcgaaggctttggtatcgttggtgcttacggtgccgctgaccgcaccaacgctcagcaagattctcgccttgctggtcgtggtaaaaccgctgagcagtgggctactggtctgaaatacgacgccaacaatatctacctggcagccaactacggtgaaacccgtaacgccacggctatcgacggcggcttcgccaacaaaactcaggacatcctgttagttgctcagtatcagttcgacttcggtctgcgtccgtccatcgcttacaccaagtccaaagccaaaaacgttgaaggcgtgggtagcgaagatctggtcaactacgtagaagttggcgcgacttactacttcaacaaaaacatgtccacctatgttgactacatcatcaaccagattgattctgacaacaaactgggcgtaggctctgacgacacggttgctgtaggtatcgtttaccagttctaa

SEQ ID NO: 75154 - DNA, 1401 bp, Citrobacter koseri
atgagcgttgtgcctgtagccgacgtactccagggccgcgtagccgttgacagcgaagtcaccgtgcgcggatgggtgcgtacccgccgagattcaaaagctggcatctccttcctcgccgtttatgacggttcctgctttgatcctgtacaggctgtcattaataattctctgcccaattacaatgaagacgtattgcgtctgacaaccggctgctcggttatcgtcacgggtaaagtcgttgcgtctccaggacaagggcaaagttttgaaattcaggccaccacggttgaagtaaccggttgggttgaagatcctgatacctatccgatggcggcaaaacgccacagtatcgaatatctgcgtgaggtcgcgcacctgcgtccgcgcaccaatatgattggcgcagtcgcgcgcgtgcgccatacgctggcgcaagcgctgcaccgtttctttgacgagcagggtttcttttgggtttcgacgccgttgattaccgcctccgataccgaaggcgcgggtgaaatgttccgtgtatcaacattggatctggaaaacctgccgcgtaacgaccagggcaaagtcgattttgataaagacttcttcggtaaagagtccttcctgaccgtatccggccagttgaacggcgaaacctatgcgtgcgccctgtccaaaatctatacctttggccctacattccgtgcagaaaactccaacaccagccgccacctggctgagttctggatgctggagccggaagtcgcctttgccaacctgaatgacgtagctggccttgccgaagcgatgctgaaatatgtcttcaaagccgtactggctgaacgcgcggatgatatgaaattcttcgccgagcgtgtcgataaagatgcgatttctcgcctggaacgttttattgatgcagacttcgcccaggttgattacaccgatgcggtcacaattctggaaaactgcggtaggaaattcgaaaacccggtttactggggtgtggatctctcctctgagcacgaacgctatctggcagaagagcactttaaagcgccagtggtagtgaaaaactacccgaaagacattaaagcgttttatatgcgccttaacgaagacggtaaaaccgtggcggcaatggatgttctggcgccgggcattggtgaaatcattgggggttcccagcgtgaagagcgtctggacgtactggatgcccgtatggcggaaatgggcctgaataaagaagattactggtggtatcgcgatctgcgccgctacggtactgttccgcattcaggtttcggtctcggcttcgagcgtctgatcgcttatgtcaccggcgtgcaaaacgttcgtgatgtgattccgttcccgcgtactccacgtaacgccagtttctga

SEQ ID NO: 75155 - DNA, 1203 bp, Citrobacter koseri
atgacacaattcgcttctcctgttctgcactcgttgctggatacagacgcttataagttgcatatgcagcaagccgtttttcaccactactatgatgtgcatgtagcggctgaatttcgttgccgtggtgacgacctgctcggtatttacgccgacgctattcgcgagcaggtgaatgcaatgcaacacctgcaacttcaggaggacgagttccagtggctctccggcctgcccttctttaaagctgattatctcaactggttacgtgacttccgctataacccggaacaggtctgcgtgaccaacgataacgggaagctaaacatccgcttaaccggtccgtggcgcgaagtcatcatgtgggaagtcccgctgttggcggtgatcagcgaactggtgcaccgttaccgctcgccggaaatgggtgtggcgcaggcgcttgatgcgctggaaagtaaactcgtcgatttctctgcattaaccgccgatctcgatatgtcccgcttccatctgatggatttcggcacccgtcgccgtttctctcgcgaagtgcagcaggccatcgtcaaacgccttcagcaggaaccgtggtttgtcggcaccagtaactacgatctcgcccgtcggctgtcgcttacgcctatgggcacacaggcgcatgaatggttccaggcacatcagcaaatcagcccggatctggcaaccagtcagcgcgcagctctcgccgcctggctgaatgaataccctaaccagctcggtatcgcgctgacggactgcatcacgatggacgctttcttacgcgacttcggcaccgaatttgccacgcgttatcagggcttacgccacgattctggcgatccggttgaatggggtgaaaaagccatcgcccattaccagaagctgggcattgacccgctgagtaagacgctggtcttctcagataacctcgatctgaagaaagcggtcgatctctatcgtcacttctcttcacgcgtgcagttgagctttggtattggcacccgtctgacctgcgatatcccgcaggtgaagccgctcaatattgtcatcaaactggtggaatgtaacggcaaaccggtcgccaaattgtcagacagcccggggaaaacaatctgtcatgacaaagcttttgtgcgtgcattacgtaaagcttttgaccttcctcatataaagaaagccagttaa

SEQ ID NO: 75156 - DNA, 1008 bp, Citrobacter koseri
atgagtgatattgattttgttgttttatgggttgattcaaccgatgtagcctggcaagaaaagtttactgagttcaaaggaaaaggtagccacggtgagagagccgtccaccctgcgcggttcagggatatgggtatctttaaatattggttcagatgtgtcgaaaaatatgcgccatgggtaagaaaagtacatttggttacctgtggacaaattccgtcatggatcaatgtagaacatgaaaaattaaatattgtctttcatgatgagtttattccgtctgaatatttaccaacgttcaactctaatacgatagagctaaatcttcatcggataaaagatctcagtaataaatttgttttatttaatgacgatacgttcattacctctcctttgcgggaagatttttattttgataatggctatcctaatgacttcctcatcataaaaaaacaatcacctaaaaataaagatgagatcataatgaggtcgtcagaatttcttaatgtcagtgttttaaatacgcatattaataaaaaaacaataatcaaagaaaacagacgtaaatactatagcttacgttataaaaaaggtctgttgaaaaattttatgaaccgccgtgcaagttattttgaaggcttctacggtaagcatcttccccagccattcctgaaaagtacattcactgagatatggcaggccgaagaggagttgttgaaaaaatcatcaagcaaaaggttcagagagccattatgtttaacgcagtatttattcaggtactggcaactggcccacggtaactttaatcctaagaacccggaagggcgtggagtatatttcaatttgtcgtccagtaacataaacgaggccatcaagacgctgtcaaatggcaccgcgcaggcctgttttaatgacactgaaaagttacacgattttgaaaaggtaacgactacgctaagaaatgcctttgaaatgaggcttggtcataaatcaagttttgagatttaa

SEQ ID NO: 75157 - DNA, 2613 bp, Citrobacter koseri
atgacacaacagccacaagccaaataccgtcacgactaccgtgccccggattaccagattactgacattgatttgacctttgacctggatgctgagaaaaccgtcgttacagcactgagtcaggctgtccgtcatggcgcatctgacgcgccccttcgcctgaacggtgaagatctgcgactggtatccctccatgtaaacgatgcgccgtggactgactacaaagaagaagagggcgagctggtgatcggcagcctgcccgagcgctttactttgcgcattgtgaatgagatcagcccggcggcgaacacggcgctggaaggcctgtaccagtcaggcgacgcgctgtgtacgcagtgtgaagcggaaggtttccgccacataacctggtatcttgaccgcccggatgtgctggcgcggtttaccaccaaaatcatcgccgataaatccagatatccgttcctgctttccaacggcaaccgtattgcgcagggtgaactggataatggccgtcactgggtgcagtggcaggacccgttcccgaaaccctgctacctgtttgcgctggtggcgggcgatttcgatgtactgcgcgataccttcatcacgcgttctggccgggaggtggcgctggaactgtacgttgatcgcggcaatctggaccgtgcgccgtgggcgatgacttcgctgaaaaactccatgaaatgggatgaagagcgtttcggcctggagtatgacctcgacatctacatgatcgtggcggtggacttcttcaatatgggcgcgatggagaataaaggtttgaacgtctttaactccaagtatgtgctggcccgcaccgatacggcgaccgacaaagattatctcgacattgagcgtgttattggtcatgaatatttccacaactggacgggtaaccgcgttacctgccgcgactggttccagttgagtctgaaagaaggcctgaccgttttccgcgaccaggaattcagttccgatctcggctcccgcgcagtgaaccgcatcagcaacgtgcgcaccatgcgtggtctgcaatttgctgaggatgcgagcccaatggcgcatcctatccgcccggataaggtcattgagatgaacaacttctacaccctgaccgtctacgagaagggcgcggaagtgattcgtatgatccacacgctgctgggcgaaacgaatttccagaaagggatgcagctttattttgagcgtcatgacggcagcgccgctacctgtgatgactttgtgcaggcgatggaggatgcgtcgaatgtcgatttgtctcacttccgccgctggtacagccagtccggcacgccggttgtcagcgtacgggacgactataacccggaaacggaacagtacacgttgaccattagtcagcgtacgcctgcgacggcggatcaggcagaaaagcaagcgctgcatattccgttcgcgattgagctgtacgacaacgaaggcaacgttattccgttgcagaagggcggtcatccggtcaattccgtgttgaatgtaacccaggcggagcaaacctttgtctttgacaatgtgtatttccagccggtgccagcactgctgtgcgaattctccgcgccggtgaaactggagtacaaatggagcgatcagcaactgacgttcctgatgcgtcattcgcgcaatgacttctcacgttgggacgcggcgcaaagcctgttggcgacgtatattaagctgaacgttgcgcgccaccagcaggggcagccgctgtcgctgccggtacatgtggcggatgccttccgggcggttctgctggatgagaaaatcgatccggcgctggcggcggaaattctgacgttgccttcggtgaatgagatcgcggaactgttcgagatcatcgatccgctggcaattgccgaagtccgcgaagcgttgacccgcacgctggcggcggaactggcagacgagttcctggcaatctataacgcgaatcatcttgatgagtaccgcgttgaacacgccgacattggcaagcgtacgctacgcaatgcctgcctgcgcttcctggcctttggtgaaacccacctggcggatacgctggtgagcaagcagtaccatgaagccaataatatgaccgatgcgctggcggcgctgtcggcggcggtcgcggcgcaattgccgtgccgtgacgcgttgatgcaggagtatgatgataagtggcatcaggacggactggtcatggataaatggtttatcctgcaatccaccagcccggcggataacgtgctggaaacggtgcgtgacctcctgaagcatcgttctttcagtatgagcaacccgaaccgtattcgttcgttgattggcgcatttgccgggagcaatccggcggcgtttcatgctgaagacggcagcggctatcagttcctggtcgaaatgctgacggacctcaacagccgtaacccacaggtggcatcacgcctgattgaaccgctgattcgtctgaaacgttacgatgcgaagcgccaggaaaaaatgcgcgccgcgctggagcaactgaaagggctggaaaacctctctggcgatctgttcgagaagattaccaaagcgttagcctga

SEQ ID NO: 75158 - DNA, 768 bp, Citrobacter koseri
atgaataccgctcgtcttaatcagggaacgccgctactgctcaacgcggtaaccaaacaatatgctgacaacacggtgctgaaccagttggatctgcatattcccgccgggcaatttgtggcggtggttggacgcagcggtggcgggaaaagtacgctgctgcgtctgctggccggtctggaatcccctacagctggcgaattgcttgccggaacaacgccgctggccgagatccaggacgacacgcgtatgatgttccaggatgcgcgtctgctgccgtggaagtcggtgatcgataatgttggattgggtctgaaaggcggctggcgagatgcggcgcgtcaggcgctggcggcggtcggtctcgaaaaccgggcgacggagtggcctgcggcgctgtccggcgggcagaaacagcgtgtcgcgctggcccgcgcgctgatccaccggcctggattattgctgctggatgaacctctcggcgcgctggatgccctgacccggctggaaatgcaggatttgatcgtctcgttatggcaagaacacggttttacagtgctgctggtcacgcatgacgtcagcgaggccgtggcgatggccgatcgggttctgttgatcgaggacgggaaaattggtctggacttgacggtggatatcgcgaggccgcgccgtctggggacggtacgtttagcggaactggaagcggaagtgttgggtcgggtgatgcaacgtggcgaaaatgaggctccgctacgcaagcacggttaa

SEQ ID NO: 75159 - DNA, 792 bp, Citrobacter koseri
atggcaacgcccacaaacaaatggttattgcgcgttgccccctggtttttaccggtgggcatcgtggcggtctggcaaatagcctcttcgatgggctggttgtcaacccgcatactcccctctcctgaaggggtgatcgcggcattctggacactctccgccagcggcgaactctggcagcatctggccattagttcgtggcgcgctttcatcggcttttcaattggcggttctatcggtctgacgctggggctgatcagcggtttgtcgcggtggggagaacgtctgctggatacttcagtacaaatgctgcgtaacgtgccgcacctggcgctgatcccgctggtgattttatggttcgggattgatgaaagcgcgaagatttttctcgtggcgctgggaacgctgtttccgatttatatcaatacctggcatgggattcgtaatatcgatcggggtctggtggagatggctcgcagctatggcttatccggcttcccgctgtttgtgcatgtgatcctccccggcgccctgccctctattatggttggcgtccgttttgcgctcgggttgatgtggctgacgctgattgtggcggaaaccatttcggcgaatgccgggatcggctatctggcgatgaacgccagggaattcctgcaaacggacatcgtcgtggtcgcgattattttgtatgccctgctcggtaaactcgccgacgtcagcgcgcagctgttagagcgcgtctggctgcgctggaatcctgcttattacacgaaagaggcaaccgtatga

SEQ ID NO: 75160 - DNA, 1146 bp, Citrobacter koseri
atgagcctgaatatgttctggtttttacctacccacggtgacgggcattatctgggaaccgaagcaggctcgcgcccggtcgatcacggttacctgcaacaaatcgcgcaaacggcggaccgcctgggctttacaggcgtattgatcccaaccgggcgttcctgcgaagacgcctggctggttgccgcctcaatgattccggtcacacagcgactgaaattcctggtcgccctgcgcccaagcgtcacgtcgccaacggttgccgcccgtcaggccgcaacgctggacagactctccaatggccgcgcgctgtttaatctggttaccggtagcgatccgcaggagctggccggtgacggcgtcttccttgaccacaccgaacgctatgaagcctcatccgagtttacgcaggtatggcgacgcctgctgcaaggcgagacggtggacttcaacggtaaacatattcatgttcgtggcgcaaaactgttcttccctgccattcagcaaccgtatccaccgctctattttggcggttcatcggatgtcgcacaggatctcgccgctgagcaggtcgatctctatctcacctggggcgaaccgcctgcgcaggtaaaagagaaaattgaacaggtacgcgccaaagcggcggctcgcgggcgtaaaatccgtttcggcatccgcctgcacgtcattgtgcgtgaaaccaatgaagaggcctggcgtgcggccgatcgcctgattgctcacctggatgacgatacgatcgccaaagcgcaagccgcattcgccagaacggattctgtcggtcagcaccggatggccgcgctgcataacggtaaacgtgatcaactggagatcagccctaacttgtgggctggcgtcgggctggtgcgcggcggcgcgggaaccgccctggtaggtgatggcccgaccgtcgccgcacgtattaatgagtacgcggcgctgggtatcgacagttttgtgctctccggttatccgcatctggaagaggcctacaacgtgggcgaactgctgttcccgcatctggacgtcgccatcccggaaattccgcaaccgcagcctctgcatcagcaaggcgaagctgttgccaatgaatttatcccccgtaaagccgcgcagagttaa

SEQ ID NO: 75161 - DNA, 975 bp, Citrobacter koseri
atgtttaaatttttcagacatcgtcctcaatggctggcgctggccggattgctctcgctttcggcctggtcacacgcggcagagtcagcgcctgacgcactgcgcatcggctatcagaaaggcagcatcagtatggtgctggcgaaaagccaccaactgctggagaagcgttacccgcaaaccaaaatctcctgggttgagttcccggcgggcccgcaaatgctggaggcattgaatgtcggcagtatcgatctcggcagtaccggcgatattccccctatttttgcgcaggctgccggggcggacctggtttatgttggcgttgagcctcccaaaccaaaagccgaggtcattctcgtccctgaaaacagtccgattaaaaccgtcgcggatctgaaaggacacaaagtcgccttccagaaaggttccagttcgcacaatctgctgttgcgcgcactgcaacaggccggacttaaatttaccgatatccaggccacatacctgacgccagcagacgcccgcgccgcattccagcaggggaatgtcgatgcgtgggcaatctgggacccttactattccgctgcgctgttgcagggtggcgttcgcgtcctgaaagacgggaccgacctgcaacaaaccggttcgttctatctggcggcgcgcccttatgccgaaaagaacggcagcttcattcagggcgttctggacaccttcagtcaggccgatgcgttaacgataagccagcgtgaacaaagtatcaccctgctggcaaaaacgatgggattgcctgaaccggtgattgccacctatctggatcatcgcccgccaaccaccattacgccggtgagcgcctctgtcgctaccttgcagcagcaaaccgccgatctgttttacgacaaccgtctggtgccgaaaaaaatcgatattcgccagcgtatctggcagcccactcaacaagaaggagcaaaattatga

SEQ ID NO: 75162 - DNA, 576 bp, Citrobacter koseri
atgcgcgtcatcactctggcgggaagcccacgctttccctctcgttccagtgcgttactggaatattcccgggaaaaactgaacagtctggacgtcgaagtcagccactggaatttgcataactttgaccccgaagacttgctatatgcgcgtttcgacagcccggcgttaaaaacatttattgaacaattacaggatgtagacgggctgatcgtcgcaacgccggtttataaagccgcctattccggggcgttaaaaacgttgctcgacctgcttcctgaacgagcgctggaaggcaaagccgtattaccgctggcaaccggcggtactgtcgcccatttactggccgttgactacgcgctcaagccggtgctgagcgcgctgaaagcacaagagatcctgcacggcgtgtttgccgacgattcccaggtgattgattaccagcataaaccgcagttcacccctaatttacaacatcgccttgacagtgcgcttgaaacattctggcaagcgttgcaccgccgcgatgtgccggttcccgtcattcattcaccacgaggcgttgcccatgtttaa

SEQ ID NO: 75163 - DNA, 1011 bp, Citrobacter koseri
atgtactaccccttcgttcgtaaagccctttttcagctcgatccagagcgcgctcatgaatttacgtttcagcaattacgccgtgtaacaggcacgccgctggaagcgcttgtccgacagaaagtccctgcgaagccagtaagctgcatggggctgacatttaagaatccgctcggccttgctgcgggtctggataaggacggagagtgcatcgatgctctgggcgcaatgggattcggatcgattgagatcggaaccgtgacgccgcgccctcagcctggtaacgataagccgcgccttttccgcctggttgatgctgaagggttgatcaaccggatgggctttaataatttgggcgttgataacctggtagagaatgtcaaaaaagcgcatttcgacggtatcctcggaattaatatcggcaaaaataaagatacgccggtagagaatggcaaagatgactatctgatttgtatggaaaaaatctatgcatatgccggttatatcgccattaatatctcttcgccaaataccccagggttacgtacgctacaatatggcgaggcgctggatgatttgctgacggcaattaaaaataagcaaaatgatctccagacgatccaccataaatatgttccgatcgcggtaaagatcgccccggatctttctgaggacgaattgatccaggtggccgacagtttagttcgccataatattgatggtgtgattgcgacaaatacgacgctcgatcgttctctggttcagggaatgaaaaattgcgatgaaacgggtggtttaagcggtcgaccattacagttaaaaagtacagaaattattcgccgactgtcccaggaattgaaaggacagttaccgattattggcgtcggcgggatagattctgtcatcgcggcgcgtgagaagatggctgctggcgctacgctggtacaaatttattccggctttatttttaaaggcccgcaactgattaaagaaatcgttacccatatttga

SEQ ID NO: 75164 - DNA, 543 bp, Citrobacter koseri
atgcgaattaaacctgacgataactggcgctggtattatgatgaagagcatgaccgaatgatgctcgatttagccaatggcatgttatttcgctcgcgctttgctcgcaaaatgctcacgccggatgcattttcgccgtctggtttttgtgtcgatgatgccgcgctctatttctcttttgaagaaaaatgtcgcgatctcgaattatcgaaagaacaaaaagcggaactggtgctcaatgcgctggtggcgatccgttatctgaaaccacagatgccaaaaagctggcattttgtcgcacacggcgagatctggacgccaacggtgggtgatgccgcctgcgtgtggcttagcgataccgaagagcaggtgaatttactggtggttgagccgggtgaaaacgcggcgctgtgcctgctggcccagcccggtgtcgtcgtggctggacgcactatgcagcttggcgatgcgattaagatcatgaacgacagactgaagccgcaacagcgactcgccagcttcagccttgaacaagcggtttaa

SEQ ID NO: 75165 - DNA, 1110 bp, Citrobacter koseri
gtggtgacgttaacccggctttttattcatccggtcaaatcgatgcgcggcatcggcctgacgcatgcgctggcagacatcagtggcctggctttcgatcgtatctttatggttactgaacctgatggcacctttattaccgcccgccagtttccgcaaatggtgcgctttacgccttctccgctacacgacggattacatcttagcgccccggatggcagcagcgtggtggtgcgctttgctgatttcgccgcgcaggatgcgccaaccgaagtctggggaaaccattttactgcccgtatcgccccggacgcgataaatcagtggttaagcggattcttttcccgtgacgtgcaattacgctgggtcggcccccaacttacgcgtagagtcaaacgccgcgacgacgtgccgttgtcatttgccgatggttatccctttctgctggccaacgaagcctcactgcgcgacttacagcagcgttgcccggctggcgtgaaaatagaacagtttcgtcccaatctggtcgtttccggcgcggcgccctgggaagaagacacctggaaagtcattcgtatcggcgacgtcatctttgatgtcgcaaaaccgtgcagccgttgtattttcaccaccgtcagccctgagaaagggcaaaagcacccaacgggtgagccgctggcaaccttgcaaacctttcgcacggcgcaggacaacggcgatgttgatttcgggcagaacctgattgcgcgtaacagcggcgtcattcgcgtaggcgatgaggttgacattctcgcaaccgcccccgccaaaccttatggcgccgcaaattctgatgatgcggtggcgccggaaaaacagcctgatacaacagtcactatcgactggcaggggcaaacctttcgtgggaataaccaacaggtgctgcttgaacaactggagaatcagggtatccgcatcccttattcatgtcgggccgggatctgcggcagttgccggataacgctgctggaaggcgaagtgagtccgctgaaaaaatcagcgattaacgatgacggaacgattcttagctgtagctgcgtgccaaaaaccgcgctcaggctgggaaattaa

SEQ ID NO: 75166 - DNA, 2109 bp, Citrobacter koseri
atgaattctctgtttgccagtacggcccgcgggctggaagagctgttaaaaactgaacttgaaaacctgggcgctgcggattgccaggtggttcagggtggtgtccattttcagggcgacacgcggcttgtgtaccagagtttaatgtggagccgcctggcctcgcgcattatgctgccgatgggagagtgcaaggtctacagcgatttagacctgtacctcggcgtgcaggcaatcaactggacagagatttttaatccagatgccacctttgccgtgcattttagtgggctgaacgacaccattcgcaacagccagtatggtgcgatgaaagtaaaggatgcgattgttgatgcgttcacgcgtaaaaacctgccgcgtcctaatgtcgatcgtgaatctccagatattcgcgttaacgtctggctgaacaaagacactgccagcattgccctcgatctgagcggcgatggtctgcacctgcgcggctatcgcgatcgtaccggtctggcgccaattaaagagacgctggcggcggccatcgtgatgcgttccggctggcagccgggaacgccgctgctcgacccgatgtgtggttccggtacgctgctgatcgaggccgcaatgtgggcgaccgatcgcgcgccgggtctgcatcgtggtcactggggctttagcggctgggcgcagcatgatgaggctatctggcaggaagtcaaagcagaagcgcaaacccgcgcccgtaaagggcttgcggaatatagctcgcatttttatggttctgacagcgatgcccgcgtgattgaacgtgcgcgcagcaacgcccgtcgcgcaggcattggtgagttgattaccttcgaggtaagagatgtcgcccaactgagcaatccgctgccgaaagggccgtacggtacggtaatcagcaacccgccgtatggtgagcgtctggacagcgaaccggcgctgattgcgctgcacagcctgctggggcgcaccatgaaaaatcagttcggcggctggagcctgtcgctgttcagcgcctcgccggatctgctgaactgcctgcaactgcgcgcggataagcaattcaaagccaaaaacggcccgctggactgcgtgcagaaaaactatcatctggcggaaaaaacgccagacagcaagcctgcgacggtggcggaagattacgccaaccgcctgcgaaaaaatattaagaagctggagaaatgggcgcgccaggaagggatcgaatgctatcgcctgtatgatgccgatctgccggaatacaatgtggcggtcgatcgctacggcgagtgggtggtgattcaggaatatgcgccgccgaaaacggttgatgcgcagaaagcgcgtcagcgtctgttcgacatcatcgccgccacgctgttggtactggagattgcgccgaataaactggtgttaaaaactcgtgagcgccagaaaggcaaaagccagtatcaaaagatgaacgagaaaggtgagttcattgaagtcagcgaatataacgcgcgtttatgggttaacctgaccgactatcttgataccggtctgttcctcgatcaccgtattgcgcgccggatgctgggtcagatgagcaaaggcaaagatttccttaacctgttctcctataccggcagcgccagcgtacatgcggggctgggcggcgcacgcagcaccactacggtggacatgtcgcgtacctatctggagtgggctgaacgcaacctgcgtctgaacgggctgagcggccgtgcgcaccgcctgattcaggccgactgcctgggctggctgcgtgaggcgaatgaacagttcgatctgatttttatcgatccgccgacgttctccaactcaaaacggatggacgagtcgtttgatgtgcagcgcgatcacctggtgttaatgaaagatctgaaacgtctgctgcgcaaaggcggcacgatcatgttctccaacaacaaacgcggattccgtatggatctggacggcctggcggcgctgggactgaaagcacaagaaattacgcaaaaaacgctttctcaggactttgcccgtaatagtcagatccacaactgctggctgattaccgcagcctga

SEQ ID NO: 75167 - DNA, 1908 bp, Citrobacter koseri
atgtcattaatcagtatgcatggcgcatggctgtcgtttagcgacgcgccgcttctcgataacgcagagctgcatatcgaggataacgaacgcgtgtgcctggtgggccgtaatggcgccgggaagtcaacgctgatgaagatcctcaaccgcgaacagggactggatgatggacgcatcatttatgagcaggatttgatcgtcgcgcgtctgcaacaggatccgccgcgtaatgtcgaaggcagcgtttatgattttgttgcggaagggatcgaggagcaggctgaatacctgaaacgttaccacgatatttcccgcctggtgatgaccgaccccagcgataaaaatctcaatgagatggcgcgggtgcaggaacagctcgaccaccacaacctgtggcaactggaaaaccgtattaatgaagtgctggcgcagcttgggctcgatcctaacgcggcgctctcttcgctttccggcggctggctgcgtaaagcggcgctgggcagggcgttggtcagcaaccctcgcgtattgttgctggatgagccgaccaaccacctggatattgaaacgatcgactggctggaaacgttcctgaaatctttcaacgggacgattattttcatttcccacgaccgttcatttattcgcaatatggctacccgcatcgtcgatctcgatcgcggcaagctggtttcttatccgggagattacgatcagtatctgctggagaaagaagaagccctgcgcgtggaagagttacagaatgccgagttcgatcgcaaactggcgcaggaagaagtctggatccgccagggtattaaagcgcgccgtacccgcaatgaaggtcgcgtacgcgccctgaaagcgatgcgccgcgagcgtagcgaacgccgtgaagtgatggggacggcgaagatgcaggtcgaagaagcggcccgctccggtaagattgttttcgaaatggaaaacgtcagctatcaggttgacggcaagcagctggtaaacgatttctccgcgcaggtgcagcgtgccgacaagattgctttaattggccctaacggctgtgggaaaaccacgttgctgaaactgatgctgggccagcttcaggcggacagcggacgtattcatgtcggcacgaagctggaagtggcttatttcgatcagcatcgcgcggaactggatcccgataaaaccgtgatggataaccttgctgaaggtaagcaagaggtgctggttaacggtaagccgcgtcatgtgctgggctatcttcaggacttcctgttccatcctaagcgcgccatgacgccggttcgcgccctgtctggcggagaacgtaaccgcctcttactggcgcgtttattcctgaaacccagcaatttgctgattctcgatgaaccgaccaacgatctggacgttgaaacgctggaactgctggaagagttgattgacggctatcagggaactgtcctgctggtgagccatgaccgtcagtttgtggataacaccgtgaccgagtgctggatcttcgagggcggcggtaagattggtcgctatgtcggcggatatcatgatgcgcgtggtcagcaggaacagcatctggcgtttaaacaacccgtcgtcaagaaaactgaggaagtggttgccccgaaagcagaaattgtaaagcgcggcagtaacaaactaagctataaactgcaacgcgaactggaacagctcccccagttactggaagagctggaggccaaactggaagcgttgcaggcgcaggtggcggatgccgcctttttcagccaaccgcatgatcatacgcaaaaagttctggccgatttgagtcacgcagagcaggaacttgaacaagcctttgagcgctgggagtatcttgaagccttgaagaatggcgcataa

SEQ ID NO: 75168 - DNA, 1254 bp, Citrobacter koseri
atgtgcgaacatcatcatgctgcgaagcacattttatgctcgcaatgtgacatgctggtggcgttaccccaccttgagcatgggcagaaagcggcatgtccaagatgtggcacaacgctgacgaccgagtgggacgcgccaaggcagcgtcccaccgcctattcgttagtggcgttgtttatgctgctgctttccaatcttttccctttcgtgaatatgaacgtcgcgggtgtaaggagcgaagtctcgctgcttgaaatccccggcgtcatgttttcggaaaattacgccagccttggcaccttctttttgctgtttgtccagctggttccggctttttgcctggtgacgatattattgcttgtgaatcgtgtcgaattgccgctacgtgtaaaaaaggttctggcgcgcgtgttgttccagctaaaaacctggggaatggcggagatcttcctcgcaggcgtgctggtcagttttgttaagctgatggcttacggggatatcggggttggaagcagttttattccgtggtgcttcttctgcatcctgcaattgcgcgcgtttcagtgcgtcgatcgccgttggttatgggacgatattacgccgatgcctgtgctggcgcagccgctgaaacctggcgttaccggcattcgccagggactgcgttcctgctcctgctgtacggccattctcccggagaatgaattagtgtgtccgcgctgtcatgcaaagggtcatgtgcgacgcaaaaacagcctgcaatggacgctggccctgttatttacgtcgatcatgctttatctgcccgcgaatatcatgccgatcatgatcaccgatttattgggatcgaagatgccttctacgatcctcgccggggtcgttttgctctggagtgaagggtcttatccggtggcggcggttatttttattgccagtattatggtgccaacgctaaaaatgattgcgattgcctggctgtgctgggatgcgaaagggcatggcaaacgcgacagtgaaagaatgcacctgatttatgaggtggtggaatttgttggtcgttggtcaatgattgatgtgtttgtaattgccgtactctctgcgctggtgcgcatgggggggttaatgaatatttatccagcgatgggtgcattgatgtttgctttagtcgtcattatgacaatgttttctgcgatgacctttgatccgcgtctgtcgtgggatcgtgaacctgaaccaggccatgaggagtcctga

SEQ ID NO: 75169 - DNA, 1641 bp, Citrobacter koseri
atggaatctaaaaatggggaagccaaagtgcagaaggtaaaaaactggtctcccgtgtggatattccctatcgtcactgcgctgattggggcatgggtgctgttttatcactacagccatcaggggcctgaagtcaccttgatcaccacgaatgctgaaggtattgaaggcggtaagaccaccatcaagagccgtagcgtggatgtgggggtggtggaaagcgcgacgctgaccgacgatcttacgcatgtagagatcaaggccagactgcattccggcatggaaaaactgctgcacaaagattcggtcttttgggtggtgaaaccgcaggtcgggcgtgaagggatcagcggcttaggcacgttgctgtccggggcatatattgagttgcagccggggacgaaaggtaacaggctggaggattaccagttgctggattccccacctctggcgccgccagatgcgaaaggcatccgcgttattctagacagcaaaaaagccgggcagctcagtccgggcgatccggtgcttttccgtggctaccgcgttggctcggttgaaaccagcaccttcgatccgcaaaaacgctccatcagctatcaactcttcattaatgcgccaaacgatcgcctggtgaccagcaacgtccgtttctggaaggacagcggtattgcggtggacctgacttctgccggtatgcgggttgaaatgggatcgctaagcacgctgtttggcggtggcgtgagctttgacgtgccggaagggcttgaactggggcagccggttgcggaaaaaaccgctttcagcctgtatgacgatcagcgaagcattcaggattcgctgtataccgaccacatcgactatctgatgttcttcaaagattcgattcgcggcctgcaaccgggtgcaccgctggagtttcgcgggattcgcctggggacggtcagcaaagtgcctttctttgcgccgaatatgcgtcaggtgtttaacactgactaccgtattccggtgctggtacgcattgagccggaacgcctgaaagcacaattgggcgaagagacggatgtcggcgcgcatctggccgaactgctcaaacgtggcctgcgcggttcactgaaaacgggcaatctggtgactggcgcgctgtatgttgatctggacttctatccgaaagagccgccaattacgggcattcatgagttcaacggttatcagatcatcccgacggtaagcggcggtctggcgcaaatccagcagcgtctgatggaagcgctggataaaattaataacctgccgctgaacccgatgattcaacaggcgaccaatacgctgtcggaaagccagcggacgatgaagcatctgcaaaccacgctggataatatgaacaagattacctccagccagtcgatgcagcagctcccggcggatatgcagaacaccttgcgcgaactgaaccgcagcatgcagggcttccagcctggctccgcggcgtataacaagatggtggcggatatgcagcgtcttgatcaggttctccgcgaactgcaaccggtattgaaaacgctgaacgaaaagagcaacgcgctggtatttgaagcgaaggacaagaaagatccagagccgaagagggcgaaacaatga

SEQ ID NO: 75170 - DNA, 564 bp, Citrobacter koseri
atgaaaaagtggctagtggtgatgatggcgttctggttaacgtcatgtagcagtagcggagaaaacaagagctactaccagctacccgtcgcgcaagggggcgtacagagtacggcaagccagggaaaccgcttattgtgggtggaacaggtttcggtgccggactacctggcgggcaacggcgtggtgtatcaaaccagtgatgtgcagtacgtgattgcgagtaacaatctttgggccagcccgctggaccagcagttgcgcaatacgctggtggcgaatctgagcgcccagcttccgggctgggtggttgcctcacagccgctgggcagcgtgcaggatacgcttaacgtgacggtgacgggatttcatggccgttacgatggcaaagttatcgtaagtggggagtggctactgaaccatcaggggcagttgattaagcgcccattccacatcgaaaccgcgcagcagcaggacgggtatgacgaaatggtcaaggtgctggcagccgcctggaatcaggaagccgccgctatcgctcaggcgctgaagcaaataccataa

SEQ ID NO: 75171 - DNA, 168 bp, Citrobacter koseri
atgaagagacaaaaacgagatcgcctggaacgggcacatcaacgtggatatcaggccggcattgccggacgctcaaaagaaatgtgtccctatcagacgctgaatcagaggtcgcactggctgggaggttggcgagaagccatggcggacagggtagtaatggcctga

SEQ ID NO: 75172 - DNA, 519 bp, Citrobacter koseri
atggtagataaacgcgaatcctatacaaaagaagaccttcttgcctctggtcgcggtgaactgtttggcgctaaaggcccacaactgccggcaccaaacatgctgatgatggaccgtgtcatcaaaatgacagagactggcggtaacttcgacaaaggttatgttgaagctgagctggatatcaatccagatctctggttcttcggatgccactttatcggcgatccggttatgccgggctgcctgggtctggacgcaatgtggcagttggttggattctatctcggctggctgggcggcgaaggtaaaggccgtgcgctgggcgtaggtgaagtgaaatttaccggtcaggttctgccaagcgcgaagaaagtgacctaccgtattcacttcaaacgtatcgttaaccgtcgtctgatcatgggtctggcggatggcgaagttctggttgatggccgtctgatctacaccgccaacgacctgaaagtaggtctgttccaggacacgtcagcgttctga

SEQ ID NO: 75173 - DNA, 1761 bp, Citrobacter koseri
ttgaccattacgaaacttgcatggcgtgatctggttcctgataccgacagttatcaggaaatatttgcacagccacactttactgacgaaagcgccaccctactcagcgatactcaaccgcgactgcaatttgcgctggaacaacttctccagccctgggcgtcgtcctcatttatgctggcgaaagcgccggaagagcccgagtatctcactctcctttctgatgcggccagaacgttgcaagccgatgccggtcagctgatcgggggccattacgaaatttcgggccacactatccgttatcgcgcagcagaaaaagcagaagacaattttgccacgtcggcgcaggttgtcagcgctgactgggttgaagccgaacagctgtttggctgtctgcgccagtttaacggcgaaattacgctgcaaccgggtctggtgcatcaggctaacggcggcgttctggtgatctccttacgcacccttctggcgcagccgttgctgtggatgcgtctgaaggcgattgtcagccataaccgattcgactgggtcgcgtttgacgagtcgcgtccgttgccggtctctgtgccgtctatgccgctcaagctgaaagtcgtgttggtcggcgaacgtgaatcgttagccgacttccaggaaatggagccggaactggctgaacaggcgatttacagcgaatttgaagataatctgcaaatagtggatgccgaaaccatgacccagtggtgtcagtgggttcagcacacgcttaaacgcaataatctgccagcgccaacgcctgatgcctggcaagtgctggtacgcgaagccgttcgctacacgggagaacaggacacgcttccactgtgtccgctatggatttcccgccagttcagagaagccgcgccgctgtgccaggacgggacatgcagcgccgaacagctcgccctgatgcttgcccaacgcgaatggcgtgaaggctatcttgcggagcgcatgcaggacgaaatcctgcaagagcagatcctgattgaaacggaaggcgagcgcattggtcagattaacgccctttccgtcattgaatttcccggccatccgcgcgcgtttggcgagccttcacgcatcagctgcgtcgttcatattggcgacggtgaattcacggacatcgagcgaaaagccgagcttggcggtaatattcatgccaaggggatgatgatcatgcaggctttcctgatgtcggaactacagcttgaacagcaaatcccgttctccgcctcgctgacctttgaacagtcctatagtgaagtggatggcgacagcgcctcaatggcagaactgtgcgcattgatcagcgctctgtccaacgtgccggttaatcaaaatatcgcgattaccggttccgtcgatcagtttggacgcgcccagcctgttggcggcctgaatgaaaaaattgaaggctttttcacaatttgtcagcagcgtgaactgacgggtaaacaaggcgttattattccggcggctaacgtgagacacctcagcctccagcctgcgctgttgcaggccgtggaagaagagaaatttagcatctgggcggtagacgacgtaacagacgcactgccgcttctgcttaatctggtgtgggatggcgaaggtcagacaacattgatgcagaccatccaggaacgtattgcccaggctacacaacaggaaggacgtcatcgttttccctggccgctacgttggctaaacgggtttataccgaactga

SEQ ID NO: 75174 - DNA, 453 bp, Citrobacter koseri
atgaaatatcaacaacttgaaaaccttgaaagcggctggaaatggaagtatctggtgaagaagcaccgcgaaggggagttgattacccggtacgtggaagccagtgctgccaaagaagccgttgatttgttgctaaccctcgaaaatgaaccggttcgggtaaatgcctggattgaagagcatatgaatcctgcgctgttaaaccgtatgaagcagaccatacgagcacggcgtaaacgacactttaatgccgagcatcaacatacgcgcaagaagtctatcgatctggagtttattgtctggcagcgtctggcgggactcgcgcagcgacgtggcaaaacgctttcagaaacgattgtgcagttgattgaagatgcggaacataaagagaaatacgccagcaagatgtcgaccctgaagcaggatttgcaggcattactggggaaagagtag

SEQ ID NO: 75175 - DNA, 1047 bp, Citrobacter koseri
atgaaaaagacagctatcgcgattgcagtggcactggctggtttcgctaccgtagcgcaggccgctccgaaagataacacctggtacactggtgccaaactgggctggtctcagttccatgatgttggcaacaaccagatcgacaacaacggcccgacccatgaaagccaactgggtgccggtgcgttcggtggttatcaggtaaacccgtacgttggttttgaaatgggttacgactggttaggtcgtatgccatacaaaggcaacactcaaaacggtgcattcaaagctcagggcgttcagctgactgctaaactgggttatccgatcactgacgatctggatgtctacacccgtctgggtggtatggtttggcgcgcagacgctcagaacaacactggcttcaaagatcacgataccggtgtttccccagtattcgctggtggcgtagagtacgctgtaacgcgtgacatcgctacccgtctggaataccagtggactaacaacatcggcgacgcaaacaccgttggcggtcgtccagataacggcctgctgagcgttggtgtttcctaccgtttcggccagcaggaagaagcagctccggttgctccagctccggcaccggctccagaagtacagaccaagcacttcactctgaagtctgacgttctgttcaacttcaacaaagcaacgctgaaaccagaaggccagcaggctctggatcagatgtacagccagctgagcaacctggacccgaaagacggttccgtcgtggttctgggcttcactgaccgtatcggttccgacgcttacaaccagggtctgtccgaaaaacgtgctcagtctgttgttgattacctgatctccaaaggtatcccggctgacaaaatctccgcacgtggtatgggcgaatccaacccggttactggcaacacctgtgacaacgtgaaagctcgcgctgcactgatcgactgcctggccccggatcgtcgcgttgagatcgaagttaaaggcgttaaagacgttgtaactcagccgcaggcttaa

SEQ ID NO: 75176 - DNA, 510 bp, Citrobacter koseri
atgtacacttcaggctatgcaaatcgttcttcgttgttctcttccactgcgggcagcattgcgcgcgtctcttcagagaacaccaccgccgggcttattagcgaagtggtctatcgcgaggaccagcccatgatgacgcaattactgcttttaccgctgctgcaacaattaggtcagcaatcacgctggcaactctggctgacgccgcaacaaaagctgagccgggaatgggttcaatctgcggggctgcctttaacaaaagtgatgcagatcagccaactttctccatgccatacgctggagtcgatgattcgcgcattgcggacgggcaactacagcgtcgttatcggctggctggcggatgagcttagcgaagaagaacacacccggcttgtgcaagcggcagatgagggaaatgcgatgggatttatcatgcgtcctgtgagcgcacacgctcatgccacgagacaccattccgggctaaaaattcactcaaatttatatcattga

SEQ ID NO: 75177 - DNA, 624 bp, Citrobacter koseri
atgaaattacgttcctatgacaagatctataaatcacaagaatatttagcctctctgggcacggttcactatcgttcgctgtttggtagctacagcctgacaatcgaggatacggtgtttgcgatggtggctgagggtgagctatacctgcgcgcctgtgagcaaagcgtcgcgtattgcgtgaagcattcccccgtctggttaacatttatgaaacgtggccgtcccgttatgttgaattattaccgggtggatgaaagcttatggcgcgatcaacaacagctggtgcttttatcgcagtattcgctggatgcagccataaaagaaaaacgtacccgtttttcacaacgtcgattgaagaatctgccaaacgtgacgtttcatctggagaaccttctgcatgaggccggaattaatgatgaaaacacattgcggatactcggcgcaaaaatgtgttggctgcggctaagagagagcaataagctgctaacggtgaaaactctctatgcgttagaaggggcaatcgctggcatacatgaagcggcgctcccggcggtacgccgccaggagcttgctgagtgggcgcagtcgcttatgccggagcaccagaaggcgacggcgtga

SEQ ID NO: 75178 - DNA, 2148 bp, Citrobacter koseri
atgttaagtcccttgctcaaacgctatacctggaacagcacctggctgtattacgttcgcatttttatcgcgctatgcggcacaacggccctgccctggtggttgggcgatgtcaaactcaccataccgttaacgctcggtatggtcgccgccgccctgaccgatctggatgaccgtctcaccgggcgtctgcgcaatttaatcatcacattaatctgtttttttatcgcctccgcttccgtggaactgctctttccctggccgtggctgtttgcaattggattaacgctctctaccagcggatttattctgctcggcggtttagggcagcgttacgccaccattgctttcggggcgctgcttatcgctatttacacgatgctgggcacctcgctttacgaccagtggtatcaacagcccattctgctccttgctggcgccgtatggtacaacctgctgacgctgaccgggcatctgctcttcccgattcgccccttgcaggataatctggcgcgcagctacgaacagctggcacgctacctggagttaaagtcgcgcttgtttgacccggatatcgaggatgaaagccaggcgccgctgtatgatttagcgctggccaacggacaactgatggcgacgctgaatcagacgaaagtctctcttcttacccgcttacgcggcgaccgggggcaacgaggaacccgccgcacgctgcactactattttgtcgcgcaggatattcacgagcgtgcaagctcatcgcatattcagtatcagacgttgcgcgatcatttccgccacagcgacgtgatgttccgtttccagcgcctgatgtcgatgcaggggcaagcctgtatgcagctctcacgctgtatattactgcgtacgccttatcagcatgatccacacttcgagcgcgcgtttacccatattgatgcggcgctcgaacgtatgcgcgccgctggagcatcctctgacttactcaaaacactgggctttttgttgtccaatctgcgggcgattgatgcgcaactggcgacgattgaatccgagcaggcgcaggcaatgccgcgcagcgaatcagaaaacctgcttgccgacgacagtcctcatgggttcagtgatatctggctacgtctgagccgtaacttcactcccgattcagcgctatttcgccacgcggtgcgtatgtcgctggtgctctgcgtcggttacgcgctgatccagattaccggcatgactcacggttactggatcctgctcaccagcctgttcgtctgccagccgaactataacgccacgcggcaccggctggcgctgagggtcatcgggacgctggtcggcgtcgccattggtataccaatcttgtggtttgtcccctcgcttgaaggccagttgatactgctggttatcaccggcgtactgttttttgcttttcgaaacgtacagtatgcccatgcgacgatgttcatcaccctgctggtgctactctgttttaacctgctgggtgaaggcttcgaagttgccttgccgcgcgtgatcgatacgctgatcggctgtgcgatcgcgtgggccgccgtcagctttatctggcccgactggcgctttcgtaacctgccgtgtgtcctgcaacgggccacggatgcgaactgccgctacctggacgcgatccttgagcagtatcatcaggggcgtgataaccggctggcctaccgcattgcccgccgtgacgcccacaaccgtgatgccgagctggcctcggtggtgtcgaatatgtccagcgaacccgatgtcactgccgaaactcgtgaggcggcgtttcggttactctgcctcaatcatacctttaccagctatatctctgctctgggcgcgcatcgcgaacagctcaccaacccggatgtcctggcgctgctggatgatgctgtgtgttatgtcgatgatgcgcttcaccatcaacccgccgatgaacagcgtgttcaccaggagctggcaagcctgaaagagcggattcagcacctggagccaaaaccagacagtaaagaacccctggtggtgcaacaagtcggcctgctcattgcattactgcctgagattggtcgtttacagcggcaaatcacgccgtcgccttctggtgctccggcataa

SEQ ID NO: 75179 - DNA, 447 bp, Citrobacter koseri
atgcgtactgttctgaatattttaaattttgtattgggtggttttgccaccactctggcctggctgctggcgacgctcgtcagcatcgtgctcattttcacattaccgttaacccgctcatgctgggagattacaaaactttcgctgcttccctacggcaatgaggccgttcatgttgacgagctgaacccggcagggaaaagcacgctgttgaataccggcggtacggtactcaatgttttctggctgatcgtctttggctggtggctctgcctgatgcacattgcctccggcattgcgcaatgcattacgatcatcggcattcccgtcggcatcgcgaattttaaaatcgccgccattgcgctctggccggtagggcgtcgcgtggtttccgtagagacagctcgcgcggcgcgtgaagccagtgcgcgtcgccgctttgagtaa

SEQ ID NO: 75180 - DNA, 2055 bp, Citrobacter koseri
atggaactgaaagcaacttctcttggaaaacgtctggcgcaacacccgtacgatcgggccgttattctcaatgccggtattaaagtctcgggcgatcgccacgagtatcttattccattcaatcagttactggctattcattgtaaacgggggctggtgtggggggagcttgagtttgtcctcccggatgacaaagtggtgcgtctgcacggtactgaatgggcagagacgcagcgttttcatcactacctggatgcgcactggcagcgctggagccaggagatgagcgaggtggcggcccgggttttacaggaacaacgggatcttattgccgagcgaaccggagaaaaacggtggttaactcgcgagcaaacgtcaggattacagcaacacattcgccgcgcttttgctgcgttaccgctgccggttaatcgcctggaggagttcgagaactgccgcgatgcctggcgtagctgtctggcatggttgaacgatatcgagggatgccgccagcagcataaccaggcctataccgaggtgatgctgacggaatatgctgacttcttccagaacattgagtcctcgccgctgaatccggcgcaggccagagcagtggtcaatggtgaacatgctttgctggtgcttgcgggagccgggagcggtaagacgtctgtgctggtcgcgcgcgcaggctggctgttagccaggggggaagcggcggctgagcaaattctgctgctggcctttggccgcaaggccgcagaagagatggacgaacgcattcgtgaaagattgcatacggacgcgatcaccgcccgtacgttccacgccctggcgctgcatatcattcagcaggggagtaagaaagtcccgaccatcagcaaactggaaaacgacgctgccgcgcgacataaactgttcatcaaaacctggcgtcagcagtgcagcgagaaaaaagcgcaggcgaaagggtggcggcagtggctggaagaggaaatgcaatggccgctgcctgagggcaatttctgggatgatgaaaagctacagcgccgtctggcctcccggctggaccgttgggtgagcctgatgcgaatacatggcggcgctcaggctgagatgatcgccagtgcgcctgaggagattcgcgatctgttcagtaagcgcatcaaattgatggcgccgttgctgaaagcgtggaaaggcgcgctgaaagaggaaaacgccgtcgatttctccgggcttatccaccaggcgatcgttatcctggaaaaggggcgttttatcagtccctggaaacatattctggtggacgaatttcaggatatctccccgcagcgttcggcgttgctggcggcgctgcgcaaacaaaattcgcataccacgctgtttgccgttggcgatgactggcaggcgatttaccgtttcagcggggcgcagctctctttaacgaccgcgtttcatcactcttttggcgagggcgatcgctgtgacctcgatacaacctaccgttttaacgggcgcattggcgaaatcgccaatcgttttatccaacaaaatccgcatcagctcaaaaagccgcttaacagtctgacggcgggcgataagaaagcggtaacgttactggatgaaaaccagctggatgccttgctggataagctttcaggatatgcgaaagaggatgagcgcattctggtgctggcgcgctaccaccatctgaagccagccagtcttgaaaaagcggcgacccgttggcctaagctgcaactggattttatgaccatccatgccagtaagggccagcaggctgactatgtgattattgtcgggctacaggaaggcagtgatggtttcccggcgcctgcgcgcgagtcgattatggaagaagcattattgccgcaggtggaggatttcccggatgcggaagagcggcgactgttgtatgtggcgctgacgcgcgcccggcatcgggtctggctgttatttaacaaagagaatccgtcgcgctttgtggacgatcttaagcatctggacgtgccggtggcgaggaagccttaa

SEQ ID NO: 75181 - DNA, 459 bp, Citrobacter koseri
atggaactgacgactcgcaccttgcctgcgcgcaaacacattgctctggtggcgcacgaccactgcaaacagatgttaatgagctgggtggaacgccaccagccgctgctggaaaagcacgagctttatgccacaggcacaaccggaaacttaattcaacgcgccacgggtatgaacgttaacgcaatgctgagcggcccgatgggcggcgatcagcaggtcggcgccctgatctctgaagggaagattgatgtgctgattttcttctgggacccgctcaatgccgttccgcacgatccagatgtgaaggcgctcctgcgtctggctacggtgtggaacattccggtcgccaccaacgcgtctacggctgactttattgtccagtctccccattttaacgatgccgtggatatcctgatcccggattatcaacgttacctggctgaacgcctgaaataa

SEQ ID NO: 75182 - DNA, 663 bp, Citrobacter koseri
atgaaaaccggcattataaccatgttattcgttctgtatttgccggtaaccgcctttgccacgacccttcgtctttcaaatgacattgaccttttagtgttagacggcaaaaaagtctccagttcattgctgcgcggcgcggacagcatcgaactggacaacggcccgcatcagcttgtgtttcgcgttgagaaaaccattcgcctgtccagccacgaggaacgactctacatttctcccccgctggtgatcagctttaacacgcaactcatcagccaggtcaattttcatcttccgcatctggaaaccgaacgagaagccgcgcatttttccaccacgccgcgtctggaactgctggacggcgacgcgatgccgattccggtcaaactggatattctggcaatcacctcgaccgccaaaatcattgattacgaaaccgaaaccgagcgctacaacaaagccgataaacgcgcctccttgccgcagttcgccacgatgatggccgatgacagcacgctgctttccgggatctctgagctggacgccgttccgccgcagtctcaggcactcacggagcaacgactcaaatactggttcaaacaagccgatccgcaaacgcgtaataacttcctgcaatgggcggaaaaacaaccgccctcctga

SEQ ID NO: 75183 - DNA, 414 bp, Citrobacter koseri
atgaaagagaccgatatcgctggcattttgacgtccacgcgtaccatcgcgctggtgggggcaagtgataagcccgagcgcccaagttaccgtgtgatgaaatatttactcgaccagggctaccacgttattcctgtctcgccgaaggtggccggaaccacgttgttggggcagaaaggctatgcgaagctgacggacataccggaaagggtcgatatggttgatgtcttccgtaattcagaagccgcatggggcgtcgcgcaggaagctatcgccattggcgcgaggaccttatggatgcaactgggcgtaattaatgagcaggccgccgtgctggcgcgaaatgcgggattgaacgtcgtgatggatcgctgtccggcaatagagattccgcgtttagggctggcgaaataa

SEQ ID NO: 75184 - DNA, 318 bp, Citrobacter koseri
atgattgccagcaaattcggtatcggccagcaggtccgccattccctgttaggttacctcggagtggtcgtggatatcgacccggaatattcgcttgatgaaccgtcacctgatgagctggcggttaacgacgaacttcgcgccgctccctggtatcacgtggtgatggaagatgatgaaggccagcctgtacatacctatctggctgaagcccagttaagcagtgaaacgcaagatgagcatcccgagcaaccctcgatggatgaactggcgcgcactattcgcaaacagctgcaagcgccgcgtctgcgcaactga

SEQ ID NO: 75185 - DNA, 1176 bp, Citrobacter koseri
gtgttagccaaagggcgcgaaaaatctttacttcgtcgccatccgtgggtcttttccggtgccgtagcccgaatggaaggtaaagccagcctcggtgaaaccatcgatattgttgaccatcagggtaaatggttagcgcgcggcgcctattctcccgcctcgcaaattcgtgcacgcgtctggacatttgatcaggcggaatccatcgacattgcgttcttcactcgtcgtctgcaccaggcgcaacagtggcgcgactggctggcgaaaaaagacgggctggacagctaccgtctgatagccggtgaatccgatggtttgccgggcatcactatcgaccgcttcggtaacttcctggttctgcaactattgagcgcaggtgcggaatatcaacgcgccgcgctgatcagcgcgttgcaaacgcagtatcccgaatgtgcgatctacgaccgcagcgacgtcgccgtgcgtaaaaaagaggggatggaactcacccaggggcccgtcaccggcgaactgccgcctgccctgctgcccatcgaagagcatagcatgaagctgctggtagatattcagggggggcataagacaggctattacctcgatcagcgtgacagccgcctggcgacgcgtcgctatgtggaaaaccagcgcgtgctgaactgcttctcctataccggcggatttgccgtgtcggcactgatgggcggttgccgtcaggtggtgagcgttgatacatcgcaggaagcgctggatatcgcgaagcaaaacgttgagctgaacaaactggatctgagcaaagccgagtttgtgcgtgacgatgtgttcaaactgctgcgcacctatcgcgatcgtggagagaaattcgacgtcatcgtgatggacccaccgaagttcgtcgaaaataaaagccagctgatgggggcctgtcgcggctataaagatatcaacatgctggctatccagttgttgaatccgggcggcgtgctgttgacgttctcctgttccggcctgatgaccacagatttatttcagaaaatcattgcagatgccgcaatagatgccggtcgtgatgtacaatttatagagcagttccgtcaggctgccgatcatccggtgatcgctacctacccggaagggctgtatctgaaagggtttgcctgtcgcgtcatgtaa

SEQ ID NO: 75186 - DNA, 282 bp, Citrobacter koseri
atgtcgaaagtttgcataatcgcctgggtacacggtcgggttcagggcgttggttttcgctataccacgcagcatgaagcgcagcgcttggggctgacgggctatgcgcgcaatctggatgatggaagcgtggaggtggtggcctgtggcgaaagtgaacaggtggataaactgatgaagtggctgaaggatggcgggccgcgtagcgccagggtagacagggttctgagtgagccacatcgccctggcgaggagttaacaggtttcagtatccgctattaa

SEQ ID NO: 75187 - DNA, 330 bp, Citrobacter koseri
atgttgatctttgaaggcaaagaaatcagtacggatagcgaaggctatttaaaagagacggcggaatggagcgagcctctggcagtcactattgctgaaaaggaaggtattaccctctctcctgaacactgggaagtggtgcgttttgtgcgtgatttctacctggagtttaatacgtctccggccatccgcatgctggtgaaagcaatggcgaataagtttggcgaagaaaaaggcaacagccgctacctgtatcgcctgtttccgaaaggcccggcaaagcaggcaacgaagattgctggcctgcctaaaccggtgaaatgtatttaa

SEQ ID NO: 75188 - DNA, 660 bp, Citrobacter koseri
atggatcgtattattacttcttcacgcgaccgcacatcgctactcagcacccataaagtgctgcgcaatacctatttcctgctgagcctgacgctggcgttctctgcgatcaccgccaccgccagtacggtgctgatgatgccgtctccgggtctcattctgacgctggtaggcatgtacggtctgatgttcctgacctataaaacggcgaataaacccaccggtatcctgtcggcgttcgcctttaccggcttcctgggctacattcttggcccgattctcaacgcctacctctcagcgggtatgggcgatgttatcggcatggcgctgggcggtacggcactggtcttcttctgctgctccgcttatgtcctgacaacgcgtaaagacatgtccttcctgggcggtatgctgatggcgggtatcgttgtggtgctgattggcatggttgcgaatatcttcctgcaactgcctgcgctgcatctggccatcagcgcggtgtttatcctgatctcttccggggcaatcctgttcgagaccagcaacatcatccgtggcggtgagacgaactacattcgcgcaacggtcagcctgtatgtctcgctgtacaatatcttcgtcagcctgctgagcattctgggcttcgccagccgcgattaa

SEQ ID NO: 75189 - DNA, 1392 bp, Citrobacter koseri
atgttatcaatatttaaaacagggccatcggcgaataaagttcctgctgagaaaattcaggcaacttatggtcgataccgtatgcaggcgctgcttagcgtatttctgggctatctggcgtactatattgtgcgcaataacttcacattatccacgccttacctgaaagaacagttagacctgagcgccacgcagatcggtttgctcagcagctgtatgctcattgcgtacggaatcagcaaaggcgtcatgagcagcctcgcagataaagccagcccgaaagtctttatggcctgcggcctggtgctgtgcgctatcgtaaacgtcggattggggttcagtaccgcattctggatcttcgctgcgctggttgtcctgaacggcctgtttcaggggatgggcgtcggcccctcttttatcactatcgctaactggttcccgcgtcgggagcgtggacgtgtgggggcgttctggaacatttcgcataacgttggcggcgggattgtcgccccgatcgtaggtgccgcgtttgcaatcctcggcagtgaacactggcagagcgccagctacattgttccggcctgcgtggcggtggttttcgccctgattgtactgctgcttggtaaaggctcgccgcgtgaggagggtctgcctgcgctggaagagatgatgccggaagagaaagtggtgctaaagaccagacacgccgtaaaagcgccggagaacatgagcgcattccagatcttctgcacgtacgtgctgcgtaacaaaaacgcctggtatgtctcccttgtggacgtgttcgtctatatggtgcgcttcggcatgatcagctggttgcctatctacctgctgacggtgaaacatttttccaaggaacagatgagcgtcgccttcctgttttttgaatgggcggccattccttctaccctgctggccggctggctctccgacaaactgttcaaaggacgtcggatgccgttagccatgatctgtatggcgctgatcttcgtctgcctgatcggttactggaaaagtgaatctctgctgatggtgacggttttcgcggcgattgttggctgcctgatttacgtcccgcagtttctggcctccgtccagacgatggaaattgttcccagctttgccgtaggttcagccgttggcttacgcggatttatgagctacatctttggcgcctcgttaggcaccagcctgtttggcgtgatggtggataaaatgggctggcacggcggtttctatctgctgatgggcgggatcgtctgctgcattctgttctgctatctctctcatcgcggcgcgctggagcttgagcaacagcgtaagaacactcagcaggaagacgcctctttaacactggccgacgcacaataa

SEQ ID NO: 75190 - DNA, 1254 bp, Citrobacter koseri
atgtttcttcgtcggggcgggatggttagcaaaacgttcgcgttgctgctgctgaccgcgttgttcagaccctgtgcggcgcaaagcaatgaactggtgatggcgacaacattttcccccagcgccaccgcgtggattatccagcgctggcagacggagccggggtcggtgatgatccgcacgctcaatcgcaccagcgcctcgctggaacagttgcttgatacggcaaatgcggaaaacgttgatctgattctgacctcgtcgccgatgttgcttcagcatcttcaggaacatcaaaaactggcgccgttcaacggtgcgccgtcagtcagtcaacatctggtgccggaatccatccgttcaacctccgttgccgtggctatctcgggattcggtttgctgattaatcgctcggcgctgactgcacggcatctgccttcgccaacggactgggacgacctgaccgatcccagatatcagggggctctgttgatgagcagcccatcgcgctcggataccaaccacctgatggtggaggcgctgttgcaacaaaaaggctgggcgcagggatgggaaacgttgttggcgagtgcgggaaacctcgtgacgatttcatcacgcagctttggcgtggcggataaaataaaaagcgggctgggcgtggccggcccggtgattgataactatgccaatctgttgctgaacgatcctcatctggcctttacctactttccgcagtcggccgtttcgcctacctatgtcgcggtactcaaaaacagccagcatgccagcgaagcgcggcgttttattcgctatctgctaagcccggaagggcagcggatcctcgctgacgccaatacggggaaatatccggttacgccgctggcggcaggaaacccacgggcagcgcaacaggcggtgctgatgaatcaaccgccgttaaattatcggctgatcctgaaacgtcagcgtctggttcagcgtatgtttgatacggcaatcagctttcgtctcgcccagttgaaagatgcctggcgagcgctgcacagcgcggaagcccgtcttaagcgtccgttgcctgaaatacgcgcgctgttaacccgtgtgccggtcgatccggcaagcagcgaagatgaagcctggctggcacagttcgacaataagagctttgctgagcagcaaatgatggagtggcagatctggtttctcaacaaccagcgtcaggcgatcaataaactggaagaactgaaatga

SEQ ID NO: 75191 - DNA, 1995 bp, Citrobacter koseri
atgctgcaacgtctgcggcaaatcagcatcagcagcagtttacggggcgctttcctgatgggcgcgttgctgacgctgatagtcagcagcgtcagcctctattcatggcatgagcaaagctcgcaaatacgctattcgctggatgaatattttccccgcatccattctgcttttctgattgaagggaatctcaatctggtggtggatcagttgaatgagtttttgctggcgcccaacactacggtgcgcctgcaactgcgcaaccagattattcagcatctggataaaatcgaacggctgagccaggggctgtcacccgcagaacgccagcagctggcggtgattttgcaggacagccgcgcgctgctggcggaactggatcgcgtgctctacaacatgtttctggtacgtgaaaaggtgggtgagctgtctgcgcgtattgactggctgcacgacgatttcaccaccgaactgaattctctggtgcaggatttcacctggcaacagggaacgctgctggatcagattgaagcccggcaaggcgatgcggcgcagtatctgaaacgctcccgtgaagtacagaacgagcagcagcaggtctatacgctggcgcgcatcgagaatcaaattgttgacgacctgcgcgacaggctcaatgaactgaagtctggaaatgatgatggcatgctggttgagacgcatatccgctatctcgaaaacctgaaaaaaacggcggatgaaaatattcgtgcgctgaatgactggccgagcacgattaccctgcgacaaaccattgatgagctgctggaaattggcatggtgaaaaataaaatgccggacaccatgcgcgactatgtcgccgcgcaaaaagcgttagtggatgccagccgcgccagagaagcgacgctggggcgcttcaggacgctgcttgaggcccagcttggcagcagtcaccagcaaatgcagatgtttaatcagcgtatggagcagattgtccgcgttagcggcgggttgattctggtggcgacgctgctggcgctgctgctggcgtgggtgttgaaccattattttatccgttcgcggctggtgaaacgctttaccgcgctgaatcaggcggtggtgcagattggtttagggcggacggatgccacgattccggtgtatgggcgggatgagctggggcgtattgcgggtttgcttcgccacacgctgggtcagcttaacgcgcaaaaacagcaacttgagcaggagatcgccgagcgaaaagcgattgaggccgatctgcgcgccacccaggacgagctgatccagacggcaaaactggcggtggtcgggcagacgatgaccacgctggcgcatgagatcaaccagccgctgaatgcgctgtcgatgtatctgtttacggcggggcgggcgattgaacaggggcagacggaacaggcgcgaacgacgttaagcaaagcggaagggctgattaaccgcattgacgcgattatccgctcgctgcgccagtttacccgtcgtgctgaactggaaacgccgctgcatccggttgatttgcgccagacgtttacggcggcgtgggaactgctggcgatgcgccataagcctcagcagggggcgctcgcgataccggatgaaaccgtttgggtcagcggtgatgaagtacgcatccagcaggtgctggtgaacgtgctggcgaatgcgctcgacgcctgcccgaacgcggcggcaattacggtgagctggcaaattcagggcgatacgctgtgcgtgttgattgccgacaatggccccggctggcctgcggccttgctaccctcattactgaagccgtttacgaccagtaaagatgtggggctgggcattgggctttcgatttgtgtttcgctgatgacgcaaatggaaggcgcgttgcgcctggcgtccacgttgacgcgaaatgcctgcgtggtgctgcaattcaatgtgacggatgtaaaagatgttgagtaa

SEQ ID NO: 75192 - DNA, 1248 bp, Citrobacter koseri
atgttgagtaatgaatgttcgattctgctgattgatgatgatgctgatgtgcttgatgcctatacacagctgcttgagcaggcgggctatcgcgtctgtgtctgcaataatccctttgatgcgcgggagtgggtgcagaaggactggcccggtatcgtgttgagtgatgtctgcatgcctggctgctccggcatcgatttgatgacgttgtttcatcaggatgacgagcaactgccgattctgcttatcaccggacatggcgacgtgcctatggcggtggatgcggtgaaaaaaggggcctgggatttcctgcaaaagccggtagacccgggcaagttactctcgctggttgaggcggcgttacgccataggcaatcggtgatagcgcgtcgccagtactgccagcagaagttgcaggttgagctaattgggcgcagccaatggacgcatcagtatcgtcagcgcttacagcaactggcagaaacggatattgcggtctggctttacggtgaaccgggaaccggccgcatgaccggcgcgcgctatttgcaccagctggggcgtaacgccgggggcccctttatttactgcgaactgacccctgccagtgcccaaaaacttaatgagcttatcgcgcaggttcagggcgggacgctggtattaagtcaccctgagaatctgacccgtgaacagcagcatcaactggtgcagttgcagagtctggagcggcggccttttcgcctgatcggtatcggcaacacttcgctggtggaactggcggccagcaaccagattgtggcggagctttattactgtttcgctatgacgcaaatcgcctgtcagcccttgtcacagcgacctgatgatatcgggccgttgttccatcattatttgcagaaagcctgtcaacggctgaatcatccggtgccggaggtggataacgacctgctgaaggggatgatgcgccgggtgtggccgaacaacgtccgtgaactggcgaacgccgccgaactgtttgccgtgggggtattgccgctcgcggaaacggcgaatccacagatgcatgtcggtgagccgacgccgcttgaccagcgggttgaagacgttgaacggcagatcatcaccgaagcgctgaatatccatcaggggcgcattaacgaagtggcagagtacctgcaaattccccgtaaaaagctctatctcagaatgaagaaatatggcctgagtaaagagcactataagttttag

SEQ ID NO: 75193 - DNA, 381 bp, Citrobacter koseri
atgctgtttattgcgcccgttatttcaaaatcaattgcccgccaggccgactgtgagcactcgtcgcactcaatggtgatgatgtcgtcaggctcgcaccatgacatggcggcttctgtgccgtgtgagccttctctttcggtcgctcaccagatgatgtccggcaaagcgatgtcgcccgtggaagagatcgtctgcgggtactgccagttgctggtacatctgccgtttgtccagtttgcgctggtgttcttgctctggctgttgctgctgtttgttatctgttgttcggtacggccattacacctttccgttatcttccgcccgtgggcgcctcagcgcgctcgcgcgccgcctgctgtatttccgttttcgttttaa

SEQ ID NO: 75194 - DNA, 2043 bp, Citrobacter koseri
atgaaacggcaatacttcgggcttactcctctggcctctctggttctgatcgcgctgaccgcaaaggcggcgtgggcaagcgaacagcacgatcatgcaaaaatggcggatgattcggtaatgattgtgaccgcgccggtcgcttctccgctggaaatcgtcacgtcgccaaaaacgcctcgtcagcccgttcccgccagcgatggctctgattatctgaaaacgatccctgggttctcgcaaattcgcaatggcgggacaaacggcgatccggtctttcgcgggatgtttggctctcgtctgcgaattttgaccgataacggcgaaatgccgggagcctgcccggcacgtatggatgcgccgagttcttatatctccccggaaagttttgatgtgctgaccctgataaaggggccggaaaccgtgctctgggggccgggcaactctgcgggaaccctccgctttgaccgggaacagccgcgttttgataaacccggtattcaggggacggccagcgtccttgccgcctcgaataaccgctgggatgaaaatgcggacatcagcctgggaagtgaggacggctatttacggcttatcggcaacaaatcacgagcgggtgactacaaagatggcaatggcgaccgcgtgccgtcgaaatgggataaatggaacggcgatatggcgctgggctggacgccagacaaagacacgctgctggaaatgacggcgggtaagggcgacggtgaagcccgctatgccgggcgcagtatggacggttcccggttcaggcgtgaaagcctggggatgcggtttgaaaaatccggcatcggcgaggtatttgataagttagaagcgaatatctactacaactatgcgaatcacgttatggataactactcgctgcgcgctcccggcatgaatatgtcaggaagcatggggtcgacaatggaacacggttctgccatgcattcgatgagtatgccaatggcaatgcagctggatcgccgtaccgttggcggacggatgatgggaacgtggttgtggtcagactatgagttacgcagcggcgttgatacgcaactgagcacgcatcgcagtaaagacgatgaccgctgggacaaagacgcccgttttcacgactatggtttattcagtgaattgacctggcttgcgacggagcaaagcaaagtgacaggcggcgcgcgtcttgatcgcgtgctggtggacaatttcactgacaccggctcctcgcagcgcactgatctactgccggccgggtttgtgcgcgttgagcataacctgacggagatgcccgtgatgttttacgcggggatcggctataccgagcgtttccccgactactgggagcttttttctcctacctatggccctggcgggtcggcagatgttttcgataacgtcaaaacggaaaagacgactcagcttgatattggcgcgcagtataccggtaagcgtcttaacggctgggtttctgcctatattggccgggttaatgattttattctgttccgttacgaccctcatcatccccgtataagtcaggttgataacgtcaatgcgactatcatggggggagaagcgggcatcggctatcaattgaccgaaacatggaaaaccgatgccagccttgcttattcctgggggcgaaataccgatgaccatcagccattgccgcagataccgccgcttgaagcgcgcctgggtctgacatgggaacgcggcgactggagcagtaccggtctgctgcgtctggtcagcagccagcatcgcgtcgcaattaacgaagggaacgtcgtgggtaaagattttgatagcagcgcggggttcgccatcttctccgcgaatgcggcctaccggctgaacaagtctgtgaaactcagcgcgggcgttgataacctgtttgataaagcctacagcgaacatctgaaccttgccggtaacagcagctttggttactccgcgaatacgtcagtgaatgaaccgggaagaacattctggggaaaagtgaacgtgacgttttga

SEQ ID NO: 75195 - DNA, 579 bp, Citrobacter koseri
atgaaaaagcttaccttgaccgaaaatgatttactggccagagggaacgatcgttacgtctttcagcatccgcacaatcatcaactactgatcaaagtcgtcatcccgagcattcccaaatataaaagtaagcttcgtgaagtctatcgggacgtcaaagagtgcaagccgcgcgacgaaactgactcgctcttcatccagaaaattgaagggctagtggagacggataaagggattgggcaggttatcgtcaaagagcatgaccaacagggcaacattgccagaacattgtatgaccttgcaaagcacaacgaactggacgcggagaaattcagtaagctcaacgcttttttagcgtggtttattcatacagacgtcattatcaactcgctgcattgcaaaaatattgtttatgcctgggacgatgctcgtcaggagtaccgcttcaaagttattgacggctttggggataagacgctctttcaactgagcaagttctggagcgttatacgggataaaaacaaacttaagtgcctcagaaggatgctgagggatctgcaaagtatcacgcaagcgtaa

SEQ ID NO: 75196 - DNA, 1140 bp, Citrobacter koseri
atgttgtctgctggcttgttaacaagaaagagtatgcaaacaacacgtaattatttttttgatattctccgcattctggctgtactgctggttgtcacctcgcattacagctacatgttcgataccagtaccgtgttgacgttcccgcgcgaatacctgaccggaggaatagggcggctgggcgtctctttcttcttcatgatatccggcgcgctggcttacctgtcgctgcgtaaatactctgtacaggagtattacctgaaacgcgtctattcgatcctgcttccctacaacatcgcttatttctcaatggcgatcctgttcctcatcctgagcgtgtttttcctctatccaggcaatccgctggctgacgtgctcgccgggaagcgtgcatttcactcgctgctgccttctgttctcgggtttgaccattatctgcacggtgtctacgacatcaataccgcgtacttcaccggagagtggtttattggctgtattatcctgctgtatgccgtttctccggtgatctactgggccattgtccgttttccggtctgtacgatgctggcggcggtcgtcgttacgctactggcatatgataaaagcatcgtgaacccttactggtcagcacaggttcgggtgagtgattttaccttcgggatgctgttcatacactttcagccgtggttcacgcgctaccgtcttcaggcggcgtcagtcagcctgctgctggtggtgaccggggtgattgtggcgcatatcgatcagctaccggttcgggaagtgctgtttcctctgaaaccctcaagcctgctgtttgctgcggcattcctcttcattctgctggcgggatacccgctgattcatcccctgtttaatctggatcgcttccggcaggggttatccagcctggcgtcgcgggcctacattattatgctgttgcagcatgtggtggtgatatttgtcagcgccaatatcgatatgtcggtactgaatgcgacccaggcggtgatgctgtattttgggattctgatttgcatcgaaaggctgtcgtctttcatgaaaccgctatcggtaaagtgtgagcaggtcttgatcgccagaacgccgtggctacgtgaaaagcaaaaagggaattaa

SEQ ID NO: 75197 - DNA, 867 bp, Citrobacter koseri
atgtcccagccaccgtacattcgtcctgaattcgaacgcgaattaccgccgctgcgcaatctgccggtggaaacgccactgcctttaaaccagcgcctgtggaatcagacgtggctgcgcaagtgtctgattgtcgccctggtgctggcgctatgggagatcgccgcgcgaatccagcaaaacgatctgatgttgcccggggtacttcagacgttgcaggcgtttagcgaagacatgcgcaatggcgaactgccggaaaaaatcgtcaactcactcagtaccctgctgaaagggtatctggcaggcagtgcgctggcgctgattgccagcgcgctggccgtgaccacccagtttggccgcgatctgctcagcacattaaccgcgatgctaaatccgctgccggcaattgcgctgctgccgctggctttgctgtggtttggtctggggaatgccagcctgatatttgtgctgatacattcagtgatgtggccaatcgcgctgaatacctggtccggctttagcagcgtaccggaaacgctacgcatggcggggcgcaactacggcctcagcgggccacgctatgtgatcacgattcttattccggcatcgttgcccgctatcctgtccgggctcaagatcggctgggcgttcgcctggcgcacgctgattgccgccgaactggtatttggcgcgtccagcggcgaaggaggcctgggctggtatatcttccagaatcgcaatgagctgttcaccgaccgggtatttgcaggactgttaacggtaatcgcgattggcctgctggtggaaggcgtggtattcgccagtctggaaaagatcacggtgaaacgctgggggatgcagcgttaa

SEQ ID NO: 75198 - DNA, 843 bp, Citrobacter koseri
atggtcactcagcaaatcgacggcccgctgctacaggtcagcaatgttgatattgaataccgtacccgtgaacggcaagtgcgcgcaacgcatgatgtcagttttgatgtctggcctggcgaccgctttattttgcttgggccgtcaggctgcgggaaatcaagcctgttgaaagctacaggcggttttctcgccccgcgcagcggccacatttcactttcgggaacgccggttagcgctcccggcccggaacgcatgatggtattccaggagttcgaccaactgccgccgtggaaaaccgtgctggaaaacgtcatgtttcctctgctggccagccggaaagccagtcgttcacaagcaaaagagacggcgctgcattttctccacaaagtcgggctggcagaatttgccgacgctatgccccatatgctctccggggggatgaagcagcgcgtcgccattgcgcgggcgctggcgatgaaaccacgcatcctgctgatggacgagccctttgccgcgctggatgcgctgacccgacgcacaatgcaggaagaactgcttgcgctctgggaagaagagcgctttaccctgctgttcgtcacccattcgattgaagaggcgctggtggtgggcagccgtatcctggtgctttcgccgcatccagggcgcgtcagggcggagcttaactgtcatcagttcacgcttaatgatttcggcagcgaggcgtttcagcacgctgcgcgtcatattcaccatctgttattcccgacaatcgggaacagtccgtctcactcatccggcgaggagccagagtatgtcccagccaccgtacattcgtcctga

SEQ ID NO: 75199 - DNA, 1008 bp, Citrobacter koseri
atgaataaaagaaacaggatatttgcctggacgctggcgttttccgcccttggcggagtcagccagtcggcatttgcggaagggaacattagtatcgcgcagcaatttggcatcggttatttaattcttgatgtggtgcgagaccagcagcttatcgaaaaagaggggcaaaaagaggggctggatatcaaagtagagtggcgcacgatttcaggcgcaaccgggatgaatgaagcgttgctctctggcgcgctggacgttgcgtcagcaggcgttcccccggtactcaccctatgggatcgcaccaaaggtaagcaaaatgtgaaagcgatagcctcgctgggatcgatgcccaattatttattgagtaataacccggcggtaaaaagcattaaagatctgaccgaaaaagaccgtattgccgttccggcggctggggtcggttttcagtctcgtacattacaaatcgagacggcgaaattatatggcgaccaggacttcaaacgcttcgataagattagcgtcagtttaccgcacccggacgccagcgcagccttaattgccggtggctcggaaattaccacgcatttttccagcccgccgtttcagtatcaggcgctggagcacggcaacgtgcataaagtgctcagttcctatgatgtgctgggtgggcaggcgacatttaatgttctctataccacccagaaattccatgatgaaaatccaaaaacctataaagcgttttatcgcgccctcagtgaagccgcaaatatcattaaccgtgacaaaaatgcggctgccgaaacgtatattcgcgtcgagaaatcacggctgcccttaccgctggtacaaaaaattgttaacgatccagaaatcagctttacggttttccctgagcgtactggcgtatatgccgaaaaactccatgagcttggcgtactgaaaaataaggccgactcctggaaagactatttctttaacgaagcatgggaaaacccaggcagttaa

SEQ ID NO: 75200 - DNA, 1023 bp, Citrobacter koseri
atgccattattttcacatcatcacttacgttcgcttttacaacgctatctggtgcgggcgggtacgggatctgatatcgcgcaaaaagtagcggataacctggtcgaatcctcattaaaaggccacgactcgcatggcgtgaccctgttgcctcgctatattcgggccattctggcgggagatttgaaccctggcgccacgctgaccaccttgtctgatgccgggccgattgtctcttttgatgggggacatggcttcggccaggcgttgggcgaacaggccatgaacgtgggtattgagcgtgtgcgccagtttggggtggcaataattggcttgtctaatacccaccatctcgggcggatcggcgcatgggcagagcaggtggcgagcgccgggctggtctcgatccattttgccaacgtggcggcgccgtcggccgtgttgccgttcgatgggctgcgcgccaggcttggtacaaaccccttttgcgtgggcgtaccgttacagaaccgccctccggttatccttgatttcgcgaccagcgccattgcgggcaataaagcgcgcatcgcctggaatgaagggcgcgccatcccggcaggatgcgcggtagatgcgaacgggcaatccacgaccgaccctgccgtattaatgactgagccgctcggcgctttgctgccttttggcggccataaaggtgcgggattgtcgctaatatgtagcttacttggcgctgcgctgaccggcggcgagaccgaaagccagcagattccgccgcgtgccggaatcatcaacaatatgctgtcgattctatttgaccccgcgcgactgggcgcggaggaacattactcacaggcgctgttagcgcaggttgactgggttcgtagcgggcaggaagggcacgatgtgcagatccccggagaaccggaattgcgcgcgtatgcccggcgccaggaagagggcgtctggattgatgacgtcagctggcaggcgtttgtcgccctggaagcattaaatacctga

SEQ ID NO: 75201 - DNA, 1014 bp, Citrobacter koseri
atgcatctggcgcgttttccccggcttcattttggccatttcccgactccactggagcccctcactcaactttcacgcttgctgggggggccaaatatctggataaaacgagacgattgcaccggccttgccactggcggcaataaaacccgcaaacttgagtttttgctcggcgacgcccaggcgaaacaggcggatattatcattacccagggcgccacgcagtctaaccatgtgcgtcagaccgtcgcggcggcggccagactgggtctggaagcgcatgtttttctcgaacaacgcgtcacgacgctgggtgatgagtatcagcaatccggcaatgtgctgctggacggtttgctcggcggcaaaattattgcccatttgcccggcggtacggatatgcagcaggcaatggagcatcatgcggaaagcctgcgtgcgcaaggccataccccttatgtcatccccggtggcggttcgaacgcaatcggggcgctgggttacgtatcctgcgcggaagagttgctttggcagtccagccagttacggctgcgtatcgatcatatcgtccatgccaccggcagcgcaggcacgcaggctggcctgattgcgggtttaaccgccacgcacagcggcattcctctcctcgggattagcgtacgcgccccgcgtgataaacaggaacacaacgtctggcgtctggcgcagcagacccgggaactgctcggcgtgcagggtgaattgccgcgtgaggcggtggtcgccaacagtgattatgtgggcgaaggctatggtctgcccaccgaggggatgcttgaagcgctgcaattgctggcgcagcacgaggggattctgctcgaccctgtctattccggtaaaggtatggccggattgattgatctgatccgtcaaggccatttccgcaaggatgagaatgtggtgtttatccatacgggaggaagcgcaggtctgtttggctatcgtcaggtcatcgcagattctttgtcatcatga

SEQ ID NO: 75202 - DNA, 720 bp, Citrobacter koseri
atgagcacaccttttctgctggggattcttggcggcatggggccgctggcgacgcttgatttgatgcataaattgctgcgcgcaacgcccgccagcagcgatcagcagcaaatcccccatgtggtgtggaatgtgccgcaaattgcggatcgccaacaggcgctggcgggaacagggccttcgccgttgccgcagctcttgctcggtgtggaacagctgaaccgcgcgggcgccagccacattgtgatcgcctgtaatacggcgcaccactggtatgaggcgttggcgcagcacagcgacgcgccgttgctgcatattgtggacgccacgctggcggtatttgaagggaaagagaagccccgccgggtcgggcttatcgccacgcagggtacgctggatgccggttggttccagcacggtttcgcctctatggggattgaaagcgtgcagccgacgccagaggagctgcggcagtggtttgtgccggggtgctatgcggtaaaacgcggcgaactgcgtaccggcggtgagctgctgagtttacaggctcaggcattgcgcgatcgcggcgcagagaggctggtgctggcctgcacggaagtgccggttgcgctggcggaggtgacatccccgcatttagccgtgtcgattgatcccgcagaagcgctggcgcaacagtgtgcccggttatggctaacgcagcgcgaagcatggcattaa

SEQ ID NO: 75203 - DNA, 1008 bp, Citrobacter koseri
atgaaaaaaagtctctgcgtattacttgcagcgggtggcctgtgggtcaataccagcgttgccgaaacacccgcagaagtccgcgtggcatacagcggcggttctcaggtactgatgctggcaaaagccgatggttctctggataacgctttacacagcaaggtcaaatgggtgcaatttgcgtccggtgcggacgcgttaaattattttgccagcaacgcgattgatattgccaatttcggctccagcccggcaacggcaggcattgtcagaaaactgccggtggagattgtcggcgtctccggggtgattgccagctacgagcgtttaattggtaaagacggcattacccgtattaacgatatcgaaggcaaacgcgtagcctatccgccaaactcgacggcgcaatatgcgcttgaagccgccatcagcgttaaccatctcgatcgcagcaaaataaccttattgccgctgcgcccggcggaaatggtcgcggcctggaaacgcggcgatatcgacgcgggctatgtctgggcgccgtttgctcaggaacttgaagcctccggcgggcatcaggtattcgcgaccaaagatctgcaaaaggacggctacctgatttacaacaactacgtcgtgcgtaaagcctttgccgaacagtatccgcaaaccgtcagcgcgttcctgcgcgttcatcaggaaaaagttgatgagtttaagaaagacccggaacgcgcggcggcgattgtggcgaaagaggtgggcgcgccggtgacgactgccgtgaatacgttgggtgggctggaatacccaaccctgacgcagcagggtacggcggactggcttggcaatggaacccagacgactgacagcggtattggtaaagcgctgaccaaaacctctgacttcctggcggggattggcgagatccgcaaacgtgatatcccggcgaactgggacagcgccattaactcccgctacatccgtgacgcggcggtagcagcgcaatga

SEQ ID NO: 75204 - DNA, 771 bp, Citrobacter koseri
atgagattgagttatcacatcgccatcagcgtcgtttcggtggctattttctttatcatctggcaagtggcgacgatgcggcaatgggtggacccgctgctgctgccgtcgctacaggatatcggtctgacaaccgaagagctgttggctgatggttatcgtcaggtgccgttgtgggagcatgtcgcagtcagcctggcccgggccttaagcgctttttctgtggcaattatcatcggcatccccctggggttgctgatggggttgtcggaaggtctggcggcggtactgaatccgttcgtgcagtttttgcgcccgctacccaagattgcgcttattccgctggctgtcgtctggctggggatcggtgaggcgtcgaagttctttctgatcttcatcgccaccttcctgagcgtggtcgtgggggcatctgctgcggtcgatcgtattggccgctcgcgcattcgtgtggcgcaaacgctcggcgcgtcgcgcaaacagatttttctgcgcgtggtgttgccggatgcgctgccggaactgtttaccaccgtcaggctgtcgatagggatcggctggacatcgctcatcgcggcggaaatggtggcggccagttcgggtctcggctggatggtgattaacgccagctcgtatctgcgaaccgatatcgtgatgctggggattctgctgctcggcggtatcggctatttactggatttattgctgctggggctgcaacgcttttttgtgccctgggcggggaaagagtaa

SEQ ID NO: 75205 - DNA, 153 bp, Citrobacter koseri
atgagtgccatcacactggaaaacgtatcgctctcttttgcggcaaaaccgcagccgttcacggtgctggacgatatcagcctgtctctctggagaaaggagaatttgttgtactgctggggccgtccggctgcgggaagtccacgatcctga

SEQ ID NO: 75206 - DNA, 540 bp, Citrobacter koseri
atgatcttccagcagccaaatttgtttccctggctgtcggtactggaaaacgtcacctttggcccacggctggggaaataccacaaaaatgaggtcaacgcccaggcgctggactggctgacgcgggtagggctgaaaggctttgaacatcatgcgccctggcaactctccggcgggatgaaacagcgcgtggcgctggcccgcgcatggctgccggagccggaggtgttgctactcgatgaaccgttcggcgcgctggatgcgcaaacgcgtctgatgatgcaggaactcctgcgcgatgcctggcttgctaccggcaccacgctgctgtttgtgactcacgacgtagaagaagcgctgttcctggccgatcgtattctgattatgtcggcgaagcccggaaaaatcgttgaggaggtcatcctgccttttggccgcgaacgcgatatcgaaactctggctgaacacccggcttacagtgggatcaaacatcatgtactgcaccgggtgcgtcaggaggcaaagcgccatttaggatga

SEQ ID NO: 75207 - DNA, 1107 bp, Citrobacter koseri
atgggtgggatgaaaagaacgcgctggcagcgtcgaccaggcaccatcggcggtaaattgccgtggaatgactggcgaaatgcatcgacctggcgcagggcgacacaatttctgctcctgctgatcaatatttatattggcatcacattctatttttgggtccggtattacgaaactgccgccgccagcgtttacgtccccagacccggtggtattgaaggctggcttcctgtcgccggtttgatgaacatccgatacacctgggaaaccggtctgctccctcctgttcacgccgcctccatgctgcttctggttgcatttatcgtcatcagcctgctgctaaaaaaatctttttgctcatggctgtgccctgttggcgcgttgtcagagctgatcggcaaactcggagaaacgctctttgggccgccgattaccctgccccgctggctggatattcccctgcgcggtctgaaatatctgttattgagcttttttctttatatcgcgttatccatgcctgctcagggtattcagatgttcctgatgtcagcttatggcattattatcgacgttaaaatgctcgattttttccgcaatattggaacaaccacgcttatctgcgtcatatttttcgccgtcgccagcttatttattcgtcatttctggtgtcgttatctgtgcccctacggcgctctgcttggtctgttttcgtttttttctccctttaaaatccgccgcaatgccgacagctgtattaattgtggaaagtgcgctcaaaattgtccctcccgtatcccggtagacacgctgattcaggtcagaaccgttgaatgcacaggctgcatgacctgcgtggagtcctgcccggttgcctcaacgctcaacttttcactacgcacgccttctggcgcgccggaaggaaaacgcgaggcaataaaaccgttatggcgacaggccgcgctctcgggcgtcgccatgacaatattgatactcgggatactttttgccgctatcgcgattgcgatgtatgccggcgcctgggatagcccggtgccggagcatctttacttccgcttaattccccaggcgaggatgattgggcattag

SEQ ID NO: 75208 - DNA, 306 bp, Citrobacter koseri
atgccaaagaaacttgtcagtattgaagacttccgtgaccagtggctggatgatttttttatgtactctgcaccacataagaaaattcccccggatatacattcagcattggcccgtaagctcgatatcataaacgcggcagtgagctacaaggatttgaagtcaccgccgggtaacagatacgaagaactggaaggtaaattgcaggaatattcttcgataagagttaacaagcaatatcgtttgatattcaaatgggtgaacggcaaggcacaagacctctaccttgatccacatgagtattaa

SEQ ID NO: 75209 - DNA, 342 bp, Citrobacter koseri
atgaaccaggcaaccagaaaacccacgacagttggtgatatccttctgtatgaatacctggaaccgcttgacctcaaaattaatgatctcgcggaaatgttgcaggtgcatcgtaataccgccagcgcattggttaacaacaatcgtaaactcacgactgacatggcttttcgcctgtctaaagttttcgatacctctgtagagttctggatgaacctacagactgctgtagatgtatgggaaactgaaaacaatgcccgccttcaggtagagatgagcagggtgattacggcgagcgattttcttgcggaacgtcagaaacaagaaaagaaagtcgcgtga

SEQ ID NO: 75210 - DNA, 306 bp, Citrobacter koseri
atggctaacgtaaccgtcacctttacaattaccgaattttgcctgcataccggggtttcggaggaagagcttaacgaaattgtcgggcttggggtgatcgagccctgcgagaacgaaaccgcatcctggttatttgacgatcatgcggcgatcgtcgtgcagcgtgctttacgtttgcgccaggagctggcgctggactggccgggcatcgcaatgacgctgaccttgctggaagaaaatgaccggctacgccaggaaaaccgcttgctgatacagcgtctttcccgctttatcaaacacccataa

SEQ ID NO: 75211 - DNA, 921 bp, Citrobacter koseri
atggaattaaaggattattacgctattatgggcgtgaaaccgacggacgatctcaagactatcaagaccgcctaccgccgactggcccgcaaataccatcctgatgtcagcaaagagcctgatgccgaagcccgctttaaagaggtggcggaagcatgggaagtgctgagtgatgaacagcgtcgcgccgaatacgaccagttgtggcaacaccgcaacgatccgcagttcaaccgacagttccagcagggcgaaggccagagttataacgccgaagattttgacgacattttctcgtccatctttgggcaacacggccgacaatcccgccagcgtcaggcgacgcgcggccacgatattgagattgaagtggcggtgttcctggaggaaacccttgccgaacacagccgtacaatcagctataacttgccggtgtataacgcgttcggtcttgtggagcgtgagatccctaaaacgctgaatgtgaagattcccgcaggcgttggcaacggacagcgtattcgtctgaaaggccagggaacgccgggggaaaacggcgggccgaatggcgatctgtggttagtgattcatatcgcgccgcatcctctgtttgatatcgtcaatcaggatctggagattgtggttcctctcgccccgtgggaggccgcgctgggcgcgaaggtcgccgtaccaacgctaaaagagaagattctgctgaccatcccgccaggcagtcaggccgggcagcgcctgcgcatcagaggcaaaggcctggtcagcaaaaaacacacgggcgatctgtacgctgtgatcaaaatcgtgatgccgccgaaacccgacgacagtgccacagccctgtggcagcaactggcggacgcgcagtcctcctttgatccacgcaaagagtgggggaaagcataa

SEQ ID NO: 75212 - DNA, 366 bp, Citrobacter koseri
atggcgaaacgtcaacaactgggatggtggttcctctgcctggcatgtgttgtggtgatagtgtgcaccgcgcagcgcatggcgggtctgcacgccttgcagatggcgccagccgcgacggcggtcgtcactcaggcggatagctcgtctgctgatgatgcctcgcccgtgacgccatgcgaactcagcgcgaaatcattgcttgccgcgccgcccgtgctgtttgaaggggcgattctcgcgctgtgtctgttattgtccctgctggcgcccgtacgcgccgtacgcctgccattctttccaccgcgagcaatctcgcctcccacactcagagtccatctacgcttctgcgtattccgtgaatga

SEQ ID NO: 75213 - DNA, 1887 bp, Citrobacter koseri
atgatcactgttttcaggcagactttgtgctgtctgttattgctatggctgcccgtctcgtgggcggcagaaagcggctggctgcgctcgccggataacgaccatgccagcgtccgcctgcgcgcggacacgtccccggaaggcgaaacccggttactgttggatgtaaaactggaaaacggctggaaaacctactggcgttcgccgggggaagggggcgtggcgcccgccattgcctggaaagaaaatatgcctgcggttgactggttctggccgacgccgtcgcgctttgacgtcgccggtatgaccactcagggttatcaccaccgcgtgaccttcccgatgacggttcgcggtccgtcacccgcgatgctcagcggtgtgctgaccttgtccacttgcagcaatgtctgcctgttgaccgattacccctttaccctcaaaccttcggcgcatgacccggcattcgcgcatgactatgcccaggcgatggggcagatcccgctctcccgggggctgacgcagacgctcagcgtgggcgctcgtcctggtgcgctggtggttgaagccacgcgtgccggaggctggtcatcgccagcattgtttctcgacgctgttgataacgctgattttggcaagccgcaactgcgtgttgagggtgaaaaactgctggcgacggttcctgtcagcgacggctggggagaaggggcgcccgatttgcgtggtcaaacggtcacgctggtactggcgaatgacggcgtggctcaggaaagcaccctggcgatcggcagtacgacggcaaaaatggccgatagcgccgaactgccgctctggcaggtgatgttgatggcgctggcgggtgggttaattctcaacctgatgccctgcgtgctgcccgtgctggggatgaagctcggctcgattctgctcgtcgaagagaaaagtcgtcagcggatacggcggcagtttctggcgtcggttgccgggattattgcctcttttatggcgctggcgatgctaatgaccgttctgcggctgacccatcaggcgctcgggtggggcattcagttccagagtccgtggtttatcgggtttatggtgctggtgatgttgatcttcagcgccagcctgttcgggctgtttgaattccgactgccttccgcgatgacgacccgacttgccacccacggcggcaacgggatggccggtcatttctggcagggcgcgtttgccacgctgctggcgacgccgtgcagcgcgccgtttctcgggacggccgttgcggtggcgttgacggcctccttcccggtgttatgggggctgtttctcgcgctcggggtggggatgagcctgccgtggctgtttgtcgcgctacgccctggtctggcgcagcgcctgccgcgtcccggacgctggatgaacggattgcggcgcgtactgggcgttatgatgctcggttcggcaatctggctggcgacgctcctgctgccgcatctgggatacgcgacaagcagcccggcgaaagagcgcgtcgtctggcagccgttgagcgaacaggcgatccaggatgcgcttgcgcagcacaaacgcgtattcattgacgttaccgctgagtggtgcattacctgcaaggtcaataagtacaacgtgttacagcgagaagagatacaggatgcgctgcaacagccggatgttgtcgcattgcgcggcgactggacgctgcctgcggatgacatcaccaactttttgaaaaaacgcggccaggtggctgtgccgtttaaccagatttatggccccggtttaccgcagggtcagtcattgcccacgctgctgacgcgcgatgcggtgctgcaaacgttgcgcgatgcgaaaggagttacgccatga

SEQ ID NO: 75214 - DNA, 624 bp, Citrobacter koseri
atgaaatatctgatgattatgctgttagcgctgtttaccggtctgagcgcggcgaaagaacctgcgccgtttacgccggagcaggaaaagcaaattgaagcgctgatccaggaagcgctgtttaacgatcctgccagcccacggataggcgcggagaaggcgacgctgacgctcgtcaattttacggactacaactgcccgtactgcaagcagctcgatccgttgctggagaagatcgtgcaaaagtatccgcaggtcgcggtagtgattaagccactgccgtttaagggcgaaagctcggtactgtcggcgcgtaccgcgttaaccacctggcgtgagcacccgcagcagtttttagcgctgcatgagaaactgatgcagaaaaagggctaccacaccgccgccagtattaaacaggcgcaggaaaagtccgccgccacgccggttatgctggatgagaaaagcatggagacgttgagcaccaatctgcaactcgcccggctggttggcgttcaggggacgccggcaaccatcattggcgacgagatgatccccggcgcggtatcgtgggagacccttgaggcggtggtgaaagaaaaactggcggtggctcatgctcagtaa

SEQ ID NO: 75215 - DNA, 507 bp, Citrobacter koseri
atgctcagtaaactgcgccgctggctgcgtgaaggcgcgatcttactggttctgctggctggcgtgataatcctgcaggatgtctggcgttctccgcagatgccggccatgtttgacagcacgccgctgcatacgctggacggggaaaccgtaacgctggcgtcgatcagtgaagaacgcccggtgctgctctacttctgggcgagctggtgcggtatctgccgtttcaccacgccggatgtcgcccgtttgcagtcggaaggggagaacgtcatgaccatcgcgctgcgttccggtaatgatggggaggtttcccgctggttatcgcgtaaaggggtgacgttccccgtcgtgaatgatagcggcggtgagatatcacgaaactgggaaatcagcgtcacgccaacattggtagtggtgtcgaaggggcaggtggtaaccacgaccagcggctggaccagctactggggcatgaagttacgtctgtggcgggcagccatgttttga

SEQ ID NO: 75216 - DNA, 762 bp, Citrobacter koseri
atgcgcaagggtaaaattattgttgcatcaatgatggtgctttgtgtccttatttttgttgcggcggcggcatggtttatgctgttccagggagaaatgacggagccgacaggggaggaaaaacaggcggcgattttacacgctgcgggcctgatgaaatcagagacccaggataaaaaatcagtcgaaacgctctatcatcgttatattattcaacgccatgttaatttagattccggcgagctggtggctgacagcagcgcggacgccgcgcgccagaagtgtgaaaaacttgcccctgaacgcgacccagcgcaggttcgtcagcgctgtacggtggcggatgtgttctttgtgaaagataaaaataatgaaattcagcaggttatcattccagttaccggtaagggcgcgaaatccatgatgcatgcgtttcttgctctggggctggacggtcgtacggtgagaaatctgtattattatcagcaacgggaaacgccgtttctgggggcccgggtggaagacgccagctggcgcaaacagtggccagggaaacgattattagataacagcggacatcctgcattgaaaatagtacaggataaacctgaacatgccgatgaatataccgttgacggtatttccggcgcgacgttgacatcaaccggcgttgagaaaagtattaactactggatggggccgcagggatatggtcaattcttacagcgtcttgctagcgatcgaaatagccttaatctttga

SEQ ID NO: 75217 - DNA, 1941 bp, Citrobacter koseri
gtgcgtaacttccgtaactctttgttggttactctctttggcttgtttataagcatgagtgtctgggcgtcgacgaattatgcgcctttgattgaagatatcgagcaacgtcttgataaaacagcggaactttatcagcaacagcataccgacgaggcgcgccgcacggtacaaatggcctatttcgaggtattcgagaacctggaagggccgatccgcatcaacatttccgcgcgcaaaagttacgagatggagagcgcattcggcgagatccgtcgaatgattggcgagaaaaaaccgctcgctgacgttcaggcgcgcattgactggctgaaagccgcactgcgcgaagtggaaccggtgctggatggcggacatcgtctggtggccgaagagcagcacaacgcgctgtccagagacgacattgccgttcactggcaggagagtttcaggacgatcgacgatctgctggcgcaggcggtcactgaatatcaggccgggaattacagcgttgccagtcagcacgttcaacaggcgcactatcagggctttaaaaactctgagatggagatgtccctcagacaaaaccgttctgcaaaagatgccgccgccattaaccaacaattctcatccctgattgcgctgaccgcgcaacctgaccatctcaacgatgtctcctatcaggtcactacgctgctacaggatatcgaggatatcttacccggcttgccaaccacccgtgacgatcagcaggttgccgcagcgcaaagcgcagacaacattccggcggcggacgagggaaataaccgcaccgactgggctgaggtgacgacgggaattaaccagagcattcaggacgcgatagcgcgctatcagggcggcgatgcgaagaatgcgattctggatatccaggatacctacttcgaccgcttcgaagccagcggcatggaaaacaaaatcggctctcgcgattcggcatttaaaaccacgctggaggcgtattttacccgcctggtcagtctgatgaaggccggtcagccggttgagcgcctgaatgcggaggccagcgcgctggcgcaggatctgcaaaaagccgtgacgatgctgggcgaaggcgaagaaacccagtggagtctgctgctctatagtctgatgatcatcgtgcgcgaggggctggaagcgctgctgattgtggcggcaatcgtggcttacatggtgaaaaacaaccatcaggataagctgccgcttattcgtcagtcggtaattgtggcgctgatcgccagcgtcatcaccgccgctatcttccagatgctgtttactaactccggcgccagccgtgaactgctggaaggcataacgatgctgattgccgtcgtgatgctgttctttatgagctactggctgctgtccaaagtggaagcgcgccactggaaagcctggctggaaggcaaactgtctcattccctgtcacgaggctccctggtcggactatggctgaccagcttcctggcggtgtaccgcgaaggggcggaaacggtgctgttctattacgctctgattggcgatgcaaacacggtatccggccatatggcgattggcgccggttttgtgattggctgcgtggtgctgctgctcgcctggctggtaatgcgttactcagtggtgcgcctgccgctgaaacccttctttatgtttaccggcagtttcatgtatctgatggccttcgtctttgcgggcaaaggtgttctggaactggtggaaggcaaactgttccagcctacgttgattaacggcttccctgaaatcagctggctggggatttatccctacgtggaaacgttgttaccgcaggtcgtattgctgctcgcggcgctggtggcgctgtgggtgatgcggcgcaaaagcgcggttcccggggagacgataaaaaataacccataa

SEQ ID NO: 75218 - DNA, 528 bp, Citrobacter koseri
atgaccatgaagaaaaccctgattgccagcgcagtgatggccagcattttcactgcgccagccgcgtttgcttttaaagagtacccggcaggcgagcctgtcaccatgaatgaaatggagctggcggccgtttacctgcaaccgattgatatggaaccgcgcggcatgggcttaccggcagcaaaagccgatgttcaccttgaagcggatatccacgctgtagaaggcaataaaaacggctttggcgcaggggaatggatcccgtacctgaccatcagctacaccctggtcaacaacgacacgggcgaaaaacaggaaggcaccttcatgccgatggttgccagcgacggcccgcactatggcgcgaacatcaaaatgatgggcgtgggcaactataaagtgacctaccacattgaaccgccgtcaaaagccgggatgcatcgccatactgacagcgaaacaggcgtaggccgctggtggaaaccgtttgatgtgagctacgagtttaaatatgtcggtctgaactaa

SEQ ID NO: 75219 - DNA, 1380 bp, Citrobacter koseri
atgagttactttttcgtcacgacgctacaggtctttttctgcattgcgcttctttccggtgttctctggagtcgaaacgatcctccctctttacgtccactgacctggacgctgctgaccgggctgattgccggcgtgctggcgggactgtttattcacggcagccaaccggtacaactgctgctggttggggcggaggtcatggtatcgctgctgtttgtcctcagtttctggtgggcttcaacgcgtatccgctatctgtggcaggggattctgattttcggcgctgcccgccattgggcgctggaccctaatctgggcgggttgaccagtacgcatgtgctgaatactgacctgctgttaaacctgacggccgtcgttctcgcttttgcgatcctctgtctggcgggcgtactctgcgcgatgctgctgcggcgtattcgcggcctgtactggccgttaacgctgattctgctggtgatgatctggctgccgctgagcggcaacctgctgttgttgctgatgaaattacaggttgttccgctgggtaaatcactgctgagcttcgtggcgaaagtcacaaataacacggcgctgtataactgggcgggagccgcgctgctgctggccctggcgctgtgctggcttccggcgctgttgcgggcttttcgacagacgcgggaaaccgaagaaccgatcgctcaccgtctggcgctggcgcagcgtcgcaacgctttacggctgtggctggtcacaatcggctgcgcggtggtcgttattgcaggccagctgtggtgggataaagtggcctcgcagccgccgcaactctctgaagccgtgcccgtaacgctggggagcgatggcatggtgcgcctgccggtcgaacagcttcgtgacggtaaactgcatcgtttcgtctgggtggcggacgatggcaaagcggtgcgcttcttcgtgattaaccgctatcccgacaagctgcgttttggcgtggtgttcgacgcctgcctgctgtgcggcgatcagggttatgtcatggagggcaatcaggttatctgcgtcgcctgcggagtgcatatttttattccgtctatcggcaaggccggtggctgtaacccggtgccgattgaaaactggcacaatgatgaaaaagagctggtgatccccggtaaagaactggcgacaggggtgaactacttctcgacggtcatgaccattaaagtgaccgatccggtcgatggttcaacgttgaccaatacctcagccgattacaaatacagctatggcggcaagacctggttcttctcgtcagaggctaactatgaacgcttccgtgaaacgccggagcagtttgttcctgccgacatgagggaggaataa

SEQ ID NO: 75220 - DNA, 1284 bp, Citrobacter koseri
atgctgtggcggatgttacgacaatcctgggggcgcaatttacgccgcaaagtgctggcgataattaccgtttttctggcctccagcctgatttcggcgctgctggcggtgtccattgatatcggcgacaaaatgtccagagagctgaagtcttatggcgcgaacattttgattgaacccgccggacaggctgcgctgcccgcgctgtttagtgagagcagtaatccgctttccggtcaggattttcttgatgaatccgaactgccgaacatcaaagatatcttctggcgaaacaacattgtcgggtttgcgccgatgctcggcggcgaagccagcgtggagggagaaccggtgcggattctgggcactttcttcagtcagccagtggatattcctgatgaagaaggatatgagacggggcagaaaacggtcagcccttactggcaggtgaccggcgactggccgcaggaacccgcaggcgcagagccgcagaccttagtcgggcacgcgctggcgcggcaaatgggctggaaacccggtgataagctgacattacgtaccgaaggcgaagcggtgcaggtcaccgtcagcggtatcctctccagcggcggcgatgaagataaccaactggtgatgccgctaagtacggtacagcacctgctggggctccccggaaaagtgcaggcgattcgcgtctcggcgctgacggtgccggaaaacgaactgtcccgccgcgcgcgggaaaacctagacgcgctcaatgccgaagagtacgacctctggtattgcacggcctatgtgtcgtcgatcgcgcatcagctggaagaggcgatttccggcgcggaagtgcgcccggtatggcaggtcgcggcgtccgaaggggtggtgatcgataaaattcagctgctgatggcggtcgttaccgtcgcggcgctagcggcttccgcaatggggatcgcctcgctgatgaccagcaccattatggaacgcgccaaagagatcggtttgatgaaggcgctgggtgcgcgacagtggcaaattatgctgctgttctacctggaagcggcgtccagcgggctggctggtggtgcgctgggatgtattgccgggtgggggctggcgaaagcgattggcgtcatgctcttcgacgcgccgcttaattttgcctggatcgtggtgccgtgcgtactggtgattgcggtactgattgcgttgatcggcacctggttcccggcccggcggatcgcccgactgtatcctgtggaggtgctgtatggccgctaa

SEQ ID NO: 75221 - DNA, 1131 bp, Citrobacter koseri
atggccgctaaacgtaccatgctctggctgctggtgtggcgggcgctgcgtctgcgttttcagcgggtcagcgtggtgtttgccgcgctgatggtgggggcgaccatcgtgacggcgctttctgccgtctggttcgacattaacaccaaaatgagcgaagaactgcgcaccttcggcgcgaatttttacatcgggccggggcacggttccagtatgccgcagcaggagttgcagagcattctcgatcaggcgccgcaggggctggtgcatggcgccagtccgtggttgtacggcatggcgcgcaccgagctggaaaaagtggtgatggttggcgtgtggttcgagtcgctgcaaaaactggtaccgtactggcaggtcaccggtagctggattggcgtcagttttgacgaccgtaacgcgatgatcggcgtcaaactggcggaacgcctcaacgtgcagccgggcgacagcatcacgctggtggatcacaatcagcgtaagaatttgcagattaaaggcattgtggagtctggcgatgcgacggacaacatgctgatcgtcagcctcgacgtggcgcaggcctggctgcatcagccgggcaaaatcagccacggcttgcttagcgtcagtaacgatgtcggccaggtggagaactacgccagccggttgcaggcgcagtatcctgacctggagattcgtccggtgcgtaaggtctctgcttccgaagggcaggtgctggataaaattaaaggtctgatggggctggtctcgatcgtgattctggcgctctcttcgctgtgcgtgaataccacgctgatggcgattgtcggcgagcgggcgcgcgagtttgcgctgcaaaaagcgcttggttccagcaacggcgatatcgtgcggcaaattctgctggaaaccagcatcatcgcgctggcggcggtggcgtgcggctgggtgctgggatatttgctggcgcaactgttggggttaacggtgtttaatgccgccatttcgctgcgtctgccggtattgcccataactctggtgttgtctttactggtcgccattctggcggcgattgttccggtgcgacgcgcggtaagcgtcgagcctgctaaagtgctgaaaggagagtag

SEQ ID NO: 75222 - DNA, 696 bp, Citrobacter koseri
atgtccgttacgcatatccctcaggtggcgatcgaaacccgccacttatacaaacggttcggtgacgttaccgccctggatgacattaatctgcgcattgcgcagggtgaatttgtcgccattatgggcgcttctggttctggtaaaaccacgctgatgaatattctgacgtgccttgatacggcgacggaagggcaggtgtttcttgacggcaccgatgccgccgcgctggatgaagaggggcgccgtcgctttcgcgccgagaaaatcggcctggtatttcagcagttccatttgatcccgttcttaactgcgctggaaaacatcatgctcgcccagcattaccacagcgtggtggatgaagcggcggcgaggaaggtgctggaacaggtagggcttgggcatcgtgtgacgcatctgccgagccagctttccggtggtgagcagcagcgtgtgtgtatcgcccgggcgctggtcaacgaaccgccggttattttcgcggatgaaccgacgggcaacctggatgaagagaatgagcagcgggtgctggatctgctcaccgacctgcatcgtcaggggcgcacgattgtgatggtgacgcacaaccctgcgcttgggcagtttgccgaccgtattctgcggctgcaacacggtaaatatctgggggaggaggccaatcaacatgcgctggcataa

SEQ ID NO: 75223 - DNA, 486 bp, Citrobacter koseri
atgcgctggcataatgtgctgttactcgcggcggcgatcctgataagcgggtgtaaagaagaaaagctggtggtcggggcaccggccccggcgctggcggcgtttgatctgcaaggccaggagtcaggccttgaacgctggcaaggaaaggcggtgtacctgaatttttggtctgcgggatgcggggggtgtctggcggaaatggacacgctggaagcgctgagcaaaaaatggggcgataaagtggtggttgtggcggtcaataccgaccctgaaacggtcaggatcaacgatctgctggcaaagcatcagataacctatccggtggtgcgcgatcagctcaacattacccaggaacgttatcaggtgatcggcacgccgacctccgtactgattgaccccgaaggacgcgttctggagctacaccagggtatgcgtaagccgccagagttagaggccacgtttgcgcgcctggcggcgcgatga

SEQ ID NO: 75224 - DNA, 486 bp, Citrobacter koseri
atggcatttatctggaacgacgaaagccttgcgattctgcgggaaaacgcgggcatcctcacaaccgagcagatagcgcaactgcttcacaccaatattaccgccgtgcggaatatggcctatcggctgaaactgagccttcgggtgacggcgtataatcaccgacgcatagcgcaggttcaggcgctttatgcctctgagacgttgagtctcaaagagatcgcggcgaaaacggggctgacggccagtaccgtgcaatatatcgtgtacgtgaaatcaaaaaataagccctacgccaccacggaatatgtctcttttgaaacggagaacgccgttcattaccgtgtgcaaaaagaatttgtcgatacggagcgttccctgctggacaacatctctgataacacgcgatttcgtgaactgtatctgacggacggcactttttattgcgcccgcaatattaagtatgaggtttttatctcggaataa

SEQ ID NO: 75225 - DNA, 1242 bp, Citrobacter koseri
atgaaaaaattgatactcgccgccgctgtggcaggggctgttttattgtcgtccgccgcgcaagcgcagacaacgccggaaggttatcaactgcaacaagtgttgatgatgagccgacacaacttgcgcgcgccgttggccaataatggcagcgtgctggagcagtccacgccgaatcagtggccggagtgggatgtgcccggcgggcagctcaccacgaaaggcggtgtgctggaaatttatatgggccactacatgcgagaatggctggcggagcaggggatggtcacgtcaggtgaatgcccgacgacggacacggtatatacctatgccaacagtctgcaacgcaccgttgcgacggcacaattctttatcaccggcgctttccctgggtgcgacattccggtacatcatcaggaaaaaatgggcacgatggacccaacgtttaatccggtgatcaccgatgactctgcggcgtttagccagaaagcggtgcaggcgatggaaaaagagcgcagccagatgcagcttgacgacagctatcaactgctggcgcagatgacggactacaaagattcaccgtcctgcaaagaaaaacagcagtgttcgctgaccgaagccaaagacgcctttagcgcgaagtatcaggaggagcctggcgtttcggggccgctgaaagttggcaattcgctggtggatgcgtttacgctgcaatactacgaaggcttcccgatggatcaggtcgcctggggcgagattaaatccgatcagcagtggaaagtcctgtcaaagctgaagaacgggtatcaggacagcctgtttacctcgggtgaagtggcgcgcaacgtcgccaaaccgctggtcaaatatattgataaagcgctggtgactgaccgtagcagcgcgccgaaaattaccgttctggtggggcatgactcgaatattgcttcgctgctgacggcgctggatttcaaaccctaccagctgcacgatcagtacgaacgcaccccgattggcggcaagattgtgttccagcgctggcatgacagcaaaggcaatcgcgacctgatgaaaatcgaatatgtgtatcagagctcgcagcagttgcgtaacgcggacgtcctgacgctgaaatcaccggcgcagcgcgtcacgctggaactggcgggatgcccgatagacgcaaacggcttctgtcctcttgataagttcgataacgtgttgaacagcgcggcaaaatag

SEQ ID NO: 75226 - DNA, 228 bp, Citrobacter koseri
atgccaactcaagaagcgaaggctcatcacgtcggcgaatgggcaagtctgcgtaatacatcaccagaaatagccgaagccatttttgaagtcgcgaagtatgacgagaaactggctgaaaaaatttgggaggaaggcagcgacgaagtgttgcttaaagcctttgagaagacggataaagattcgctattttggggcgaacaaaccatcgaacgtaaaaatgtctga

SEQ ID NO: 75227 - DNA, 597 bp, Citrobacter koseri
atggcaaaaattctggtgctttattattccatgtacggacacatcgaaactatggcgcatgcggtggcggaaggggcaaacaaagtggacggcgcagaagtcgttatcaaacgcgtaccggaaacgatgcagcctgaaatcttcgcaaaggccggaggtaaaacacaaaacgcaccagtcgcaaccccgcaggaactgcctgattacgacgccatcatttttggtacgccgacgcgctttggcaatatgtcaggccagatgcgcaccttcctggaccagacgggcggtttgtgggcatccggcgcgttgtatggaaaactcgccagcgtattcagctcgacaggcaccggcggcggtcaggaacaaaccattacctcaacctggaccacgctggctcaccacggcatggtgattgtccctatcggttacgccgcgcaggaactgtttgacgtctcgcaggttcgcggcggtacgccatacggcgccaccacaattgccgggggcgatggttcacgccagccaagccaggaagaactttctatcgctcgctatcagggtgaatatgttgcaggtctggcagtaaaactcaacggctaa

SEQ ID NO: 75228 - DNA, 174 bp, Citrobacter koseri
atggcaaaccatcggggcggttccggtaattttgcggaagaccgcgaaagagcatcagaagcaggtcgtaaaggtggccagcacagcgggggcaactttaagaatgacccgcagcgtgcatcagaagcaggcaaaaaagggggcaaaagcagccacggtaaccgtaacagctag

SEQ ID NO: 75229 - DNA, 639 bp, Citrobacter koseri
atggttcaacgcgcagagaaaaaaacaggtaaacgttcacaggccgtcagcgccaagcgccaggcgattttaaccgctgcattaaacacgttttcccagtacggtattcatggttcacgtctggagcaggtggctgagcaggcgggagtgtccaaaaccaatttgctctattattacccgtcgaaagaggcgctttatgtcgccgtactgcggcaaatccttgatatctggctggcgccgttaaaggcctttcgtgaagattttgcgccgctggtggcgatcaaagagtacatccgtcttaaactggaggtctcccgtgattatccgcaggcttcccggcttttttgcatggagatgctggcgggcgcgccgttgctgatggaagaactgaccggggatttgaaggcgctgattgacgaaaaatcggcattgattgccggatgggtaaacagtggaaaactggcgcccgtcgatccgcatcacctgatctttatgatttgggcttcaacgcagcattacgccgattttgcgcctcaggtcgaagcggtaacgggcgcaacgctgcgtgatgaagcctttttcaatcaaacggttgaaagcgtacagcggatgattattgaaggcattcgcgtacgttaa

SEQ ID NO: 75230 - DNA, 396 bp, Citrobacter koseri
atgaagcgaattatattcacatgcgctgcgctgctactcagcgctcaggcactggccgatgactgcgccaacgccagcacgcaaatggagatgaacacctgcgccgccgcgcaatttcaaaccgccgataaaaaactcaatgagacgtaccagaatgcgctaaaacgcgccgaaccgccgcagcgtgacttgctgaaaaaagcgcaaatcgcctggattgccctgcgggacgccgactgcgcgctggtcagttccggcacggaaggcggcagtatacagccgatgatcgccagccagtgcatgacggacaaaacggacgaacgcgaagcgtttttagcttcgctgctgcaatgtgaggaaggcgatttgagctgtccgttgccacctgccggttaa

SEQ ID NO: 75231 - DNA, 3963 bp, Citrobacter koseri
atgggaaccaccacgatgggggttaagctggacgacgcgacgcgcgaacgtattaaaacagcagcaacacgaattgatcgcaccccacactggctgatcaaacaggcaatctttaattatctggaaaaactggaaagcgacgaggcgttaccggagttgcccgccctgctggctggcgccgccaatgaaggcgatgagtcaaccgcacagcaggaagaaaaccaccagcctttccttgagtttgccgagcagatcctgcctcagtcggtctcccgcgccgcgattaccgcagcttaccgtcgcgccgaaaccgatgcggtgccgatgttaatggagcaggcgcgtctgccgcagccggtggctgagcaggcccacaagctggcctatcaactggcggagaaactgcgtaaccagaaaacggccagcggtcgcgccgggatggtgcaggggctgttgcaggagttctccctctcctcacaggaaggcgtcgcgctgatgtgccttgcggaagcgctgctgcgtatcccggataaagcgacgcgtgatgcgctcatccgcgacaaaatcagcaacggcaactggcagtcgcatattggccgcagcccgtcgctgtttgttaatgccgccacctggggtctgttgtttaccggcaagctggtctctacccataacgaagccagtctctctcgctcgctgaaccggattatcggtaagagcggcgagccgctgatccgcaaaggcgtggacatggcaatgcgcctgatgggcgagcagttcgtcaccggcgaaaccatcgccgaagcgctggcaaatgcgcgtaagctggaagacaagggctttcgctactcctacgatatgttaggcgaagcggcgctgaccgctgccgatgcgcaggcttatatggtctcgtatcagcaggctattcacgccattggcaaagcgtctaacggacgcggaatttatgaaggaccggggatctccatcaagctttccgccctgcacccgcgctacagccgcgcgcagtatgaccgcgtgatggaggagctgtatccgcgcctgaaatccctgacgctgctggcgcgtcagtacgatatcggcatcaacatcgacgccgaagaagccgaccgtctggaaatctccctcgacctgctggaaaaactttgttttgagccggaactggctggctggaacggcatcggtttcgtaattcaggcttatcaaaaacgctgcccgtttgtgattgattatctgatcgatctcgccacgcgtagccgtcgtcgcctgatgatccgcctggtgaaaggcgcatactgggacagtgaaatcaaacgcgcccaaatggacggactggagggatacccggtttacacccgcaaggtctataccgacgtttcttatctggcctgcgcgaaaaaactgctcgccgtaccgaatctgatttacccgcagtttgcgacccataacgcccatactctggcggcgatttatcaactggcggggcagaactactatccgggccagtatgaattccagtgtctgcacggcatgggcgaaccgctgtacgagcaggtcacaggtaaagtggcggatggcaaactcaaccgtccgtgtcgtatttatgccccggtcggcacgcatgaaacgctgctggcgtatctggtgcgccgcctgctggaaaacggcgccaacacctctttcgttaaccgtattgccgacgccacgctgccgctggatgaactggtcgccgatccggtggaggccgtggaaaaactggcgcagcaagaagggcaaaccggcttgccgcatccgaaaatcccgctgcctcgcgacctctacggacaaggccgggaaaactccggcgggttggatctggctaacgaacaccgcctggcttccctctcctccgccctgttgaacaatgcgctgcaaaaatggcaggccaaaccgatgctggaacagccggtcgctgacggagagatgacgccagtgatcaacccggcagagccgaaagacatcgtcggctacgtgcgcgaagccagcgctgcggacgttgaacaagcgctgcaaaacgcggttaacaacgcccctatctggttcgcgacgccaccgcaggaacgcgccgccatcctgcaacgcgcggcggtattaatggaaggccaaatgcagcagctgattggcattctggtacgcgaagccgggaaaaccttcagtaatgccattgcagaagtacgcgaagcggtggatttcctccactactacgccgggcaggtacgcgatgactttgataacgaaacgcatcgtcctttaggcccggtcgtctgtatcagcccgtggaacttcccgctggccatcttcaccggacaaattgccgctgcgctggcggcgggcaacagcgtcctcgcgaaaccggcggaacaaacgccgctgattgccgcccagggcatcgccatcttactggaagccggtgttccgccgggcgtagtgcagttgctacccggccagggggaaaccgttggggcgcagttaacctccgatgagcgcgtacgcggcgtgatgtttaccggctcgaccgaagtcgccagcttattgcagcgtaacatcgccacccgtctggatgcgcagggccgcccgattccgctgattgcggaaaccggcgggatgaacgccatgatcgtggactcctccgcccttaccgaacaggtggttgtggatgtgctggcatctgcgtttgacagcgccgggcaacgctgctcggcgctgcgcatactgtgcttgcaggatgatatcgccgaccacaccctgaaaatgctgcgcggggcaatggcggaatgccgcatgggcaatccgggccgtctgaccaccgacattggcccggttatcgataacgaagccaaaaccaatatcgagcgccatattcaggcgatgcgtacgaaaggtcgtccggtattccaggccgtacgtgagaacagcgatgatgcgcgcgaatggcaaaccggcacctttgttccgccaacgctgattgagctggaaagttttgatgagttgcaaaaagagatcttcgggccggtgctgcatgtggtgcgttacacgcgtaatcaccttcccgaactgattgcgcagatcaacgcctccggctacggtctgacgctgggcgtacatacccgaattgacgagaccattgcgcaggtcaccggttcagcgcacgcaggcaacctgtacgtcaaccgtaatatggtcggcgcggtcgtgggcgtccagccattcggcggcgaaggcttgtccggcaccgggccgaaagcgggcggtccgctctatctctaccgtctgttggcaaatcgcccggaaaacgcgctgggcattacgcttgcccgtcaggatgcggactacccggtagatgcccagcttaaagccgcgctgactcagccgcttgacgcgctgatcgggtgggcggcggatcgcccggccttgcatacgctctgtcagcagtttagcgagctggcgcaggccggaacccagcgtctgctgcctggccctaccggtgagcgcaatacctggacgttactgccgcgtgaacgcgtattgtgtctggctgatgacgagcaggacgctctggtgcaggtcgccgccgtgacagcggtcgggagtctgattttgtggccggacgatgccttccaccgcgaactggcgaagcgcctgcccgctgcggtttgtgaacgtattcagtttgcgaaagcggacacgctgacttcgcagccgttcgatgcggtgatcttccacggcgattccgatcagctacgggcgctgtgcgaggcggtagccgcccgtgacggcgcgatcgtgtcggtacagggctttgcccgtggtgaaaccaatatcctgctggagcgtctgtatatcgagcgctcgctcagcgttaacaccgctgcggcaggtggtaacgccagcctgatgacaattggttaa

SEQ ID NO: 75232 - DNA, 207 bp, Citrobacter koseri
atgttgcaactttgtgcaacctcgttaaatgtgacctgccttgcaagcttaaaaatgaatgaaatgttaaaagaagagacgcttctggatgggataaaaacaataaccaaatctttttctctgcggcagttaacacttttgaaaggtgcaaccttaaaaaatgtgagagagtgcaacctggagaaaaatagtatcccacccgaataa

SEQ ID NO: 75233 - DNA, 1509 bp, Citrobacter koseri
atggctattagcacaccgatgttggtgacgttttgtgtctatatctttggcatgatattgatagggtttattgcatggcgttcgaccaaaaactttgatgactatattctcggcggccgcagtcttgggccgtttgtgacggcattatccgctggcgcatctgatatgagcggctggctgctgatgggtctgccgggggcgattttcctgtcggggatttctgaaagctggatcgcgattggtctgacgttaggggcatggattaactggaaactggtggcgggacgtttacgcgtccacactgaatttaatgataacgccctgactctgccggattattttaccgggcgctttgaagataaaagtcgcgttctgcgcattatctctgccctggttatcctgctgtttttcaccatttattgcgcatcggggattgtggcaggggcgcgtctgtttgaaagcacctttggcatgagctatgaaaccgcgctgtgggcgggggcggcagccaccattatctacacctttattggcggcttcctggctgtgagctggaccgacaccgtccaggccagcctgatgattttcgccctgattctgacgcctgttatggtgatcatcagcgtcggcggttttggtgactccctggaagtgatcaaacaaaagagcattgagaatgtggatatgctcaagggactgaactttgtcgccatcatctccctgatgggctgggggctgggctactttggtcaaccgcatattctggcgcgctttatggcggcggattctcaccacagcatcgtgcacgcgcgtcgcatcagtatgagctggatgatcctgtgtctggcgggggcggtggctgtcggcttcttcggcattgcttactttaacaataacccggcactggccggagcggtgaatcagaactcggaacgcgtgttcattgaactggcgcaaatcctgttcaacccgtggattgccggtattctgctgtccgctattctcgcggcggtgatgtcgacgttaagctgccagctgctggtgtgctccagcgcgattaccgaagatttgtataaagccttcttgcgtaaaggcgcgagccagaaagagctggtatgggtagggcgcattatggtgctggtggttgcgctggtgtctatcgcgctggctgctaaccctgaaaaccgcgtgctcggtctggtgagctatgcgtgggcgggcttcggcgcggcgtttggcccggtcgtgctgttctcggtgatgtggtcgcgtatgacccgtaacggcgcgctggccggaatggttatcggggcgctgacggttattgtctggaaacagtttggctggctggatctgtacgaaatcatccctggcttcatcttcggcagcatcgggattgtggtctttagcctgctgggcaaagcgccgtcgtcagctatgcaagaacgttttgcgaaagcggatgcgtattaccactccgcaccgccgtcgcgtttacaggcagagtaa

SEQ ID NO: 75234 - DNA, 297 bp, Citrobacter koseri
atggtaaggtcctgtactggacacgtttttcgcagtaacagcaataacttatgcggatgcctctcctccggtagccctgtcgtcaccgctaaattcctctcacttcctctttttatccctgttactgacgccgtattcggtgcgcgtagccgtgtagggcgtcttttcaaaaagcaagcaatggcttacaaggaagccaaccctcagatgtttgtgcgcataatcgtgccgccaacggcgcgtgtgatgtataccaacaactcaaggtgctatccatgggaagacaaaaagcagtga

SEQ ID NO: 75235 - DNA, 789 bp, Citrobacter koseri
atgggaagacaaaaagcagtgatcaaagctcgtcgtgaagcaaaacgtgtgctgagacgggattcgcgtagccacaaacaacgtgaagaagaatcggtcacctcgcttgtgcagatgagcggcgtagaagcgataggcatggcgcgtgatagccgtgacgccacaccaatcgtagcgcgaaatgaggctcaggagcactacctgaatgctatcgagagtaaacaactgatcttcgccactggcgaagccgggtgtggaaaaacctggatcagtgcggcaaaagcagcagaggccctgatacataaagatgtagacaggattattgttacccgtccggttttgcaggccgatgaagatctcggcttcttaccaggcgatatatccgagaagttcgcgccttatttccggcccgtctatgacgtgctggtgaaacgcctgggcgcgtcttttatgcaatactgcctgcggcctgagattggtaaggtggaaatcgcgccgttcgcctatatgcgcggacgtacatttgaaaatgcagtcgtcattcttgacgaggctcagaatgtgactgctgcgcaaatgaagatgttcttaacgcgcctcggggagaacgtgacggttatcgtaaatggcgacattacccagtgcgatttaccggctcatgttcaatcagggttaagtgatgcgttagctcgctttgaagaagatgagatgataggtattgtccgtttccataaagacgactgcgtgcgttcggcattgtgccaacgaacccttcatgcctacaactga

SEQ ID NO: 75236 - DNA, 852 bp, Citrobacter koseri
atggctaccaaactgcaggacgagagtactacttgtctggcagctacaccttctgatccacgtcccaccgtgctggtgtttgattccggcgtcggtgggttgtcggtctacgatgaaattcggcatctcctgccgaatctccactatatatatgctttcgataacgtcgcgtttccttacggggaaaagagcgaagcgtttattgtcgagcgcgtcgtcgagatcgttaccgcagtgcagcagcgttatcctctctcacttgcggtaatcgcctgtaatacggccagtacggtttctcttcctgcattgcgtgaaaaattcgcgttcccggttgtgggcgtcgttcctgcgattaaacccgctgcgaggctgaccgccaacggcatcgtcgggttgctggcaacgcgtggcacggtaaaacgcccttatacccatgagctgatagcgcgattcgcgaatgaatgtcagatagcgatgttgggatcggcagaactggtggagctggcggaagccaaactgcacggtgaacccgtatcgctggaggaactacgccgtatcctgagaccctggctgcggatgccggaaccgcccgacacggttgttctgggatgcacccatttccctctattacaggaagaactattgcaggtccttcctgaagggacaaggctggtggattccggggcggcgattgcgcgtcgcacggcctggttgttagagcatgaagcgccggatgccaaatcagcggatgctaatattgctttctgcatggcaatgacgccagagaccgagcaattaatacccgttttacagcgttacggtttcgaaacgctcgaaaaactggcggtttga

SEQ ID NO: 75237 - DNA, 1869 bp, Citrobacter koseri
atgattaaaaaatcttcgctgctgacggcgctctccgtcacggcattttctggctgggcgcaggatactaacccagacaccctgatcgtcaccgcaaatcgttttcaacaacctgttaataccgtactggcgcctgctgatgttgtgacgcgtgaggatatcgaccgctggcaagcgaagaatttgaatgatgtgatgcgccgcctgccgggcgttgatatcaatcaaaacggcggcatggggcagtcttcttctttgtttattcgtggtacggaagccaaacaggtattggttctggtcgatggtgttcccatgacccgccctggcattacgaataaccccgatctgaatcagattccaatatcgctggtgcaacgcgtggaatacattcgtggaccacgttccgcgatttatggttccggcgcaatgggtggggtcattaacgttattacgcactccgatcaagaacagtcaaaaattactgcgggtgttggttcaaaaggttatcagcaatatgacggtacgttgcgccatcgctttggcgacactgtcgccacggtagcgggttcttatgagggcaataaaggctttaacgtacagcccggctcaacctgggatcacgatcgcgaccgcgatggttttcgcagcaaggcattctggggcagcctcgaacataaatttaatgataatttcgatggttttttccgtggtcacagttataccaacaactctgattacgatctgggaaacccgccgtctattccggcctacagtgctgatgaatcgcaactctacaatcagagctgggacgcaggtctgaaattcaactccgggatttactcttcacaacttctcgccagctaccagaaggtgaaggactataactacagcagtatttatggtcgctatcatgacggtacgacgctcgatcgcatgacccagcgtaacctgcaatggggtaataaccttatcgtggggcacggttccgttagcgctggcgtagactggcagcagcagcgtttgacctcatccgataccgcgctttcggacacatataaacgcgataacaccggtttatacctgaccggtcagcaacaattcggtgatgtaacgctggaggcttcagggcgtgaagatcatgatgaacagtttggctggcatggcacctggcagacgacggctggatgggagtttatcgacaactatcgagtaactatcggctatggtaccgggttcctgtctccatctctggggcagcagtttggttctacccgttttggcatcaacgcgaatcctaacctgaaaccggaagagtctaaacagtgggaggccgggctggaagggctcactggtccgctggactggcgcctgtctgcctaccattacaagattactaacctgatcacttactactttgatccagacacctaccagggtgagtatgacaatattgatgcggcaaccattaaaggcgtggagtggacgggcagctttgataccggcatctttagccatcgtgttacgttgcaatatgtcgatccgcgtaatgacgacaacggtgaagtgttagcccgacgctcgaagcgccaggcgaagtatcaactggactggacgatgtttaacgtcgatatggatgtatcgtggcagtattacggcaagcgctacgataacaacacctcccagtacaataacacccagcaaatcttgccgagctatagcactgttgatgtttctgcatcgtatccgatcaccgatcgcctgacagttcgtggtaaaatcgccaacctgttcgataaagattacgagacagcttatggctaccaaactgcaggacgagagtactacttgtctggcagctacaccttctga

SEQ ID NO: 75238 - DNA, 1101 bp, Citrobacter koseri
atgacccccgaacaccttccgacagaacagtatgacgcgcagctagccgaaaaagtggtgcgcttgcagagtatgatggcgccgttttctgacctggtcccggaagtgtttcgctcgccagtcagccattatcggatgcgcgccgaatttcgcctgtggcatgacggcgacgacctgtatcacatcatttttgatcagcagacgaaaagccgtatccgcgtcgacagcttcccggcggccagcgagctgattaaccagctgatgacggcgatgattgaaggcgtgcgccataatcgcgtcctgcgccataagctgttccagattgattacctcaccacgatgagcaatcaggcggtggtttcgctgctgtaccataaaaagctggatgatgagtggcgccaggaagcggaaacgctgcgggatgcgctgcgagcgcaaaacctgaatgtgcatctgattggccgggcgaccaaaaccaaaatcgagctggatcaggattacattgacgaacgtctgcccgtggcgggaaaagagatgatctaccgtcaggtagagaacagcttcacgcagcccaatgccgcaatgaatattcagatgctggagtgggcgctggatgcaaccaaagcgtcgaaaggcgacctgcttgaactgtactgcggcaacggcaacttctcattggctctggcgcgtaacttcgaccgggtgctggcaacggaaatcgccaaaccgtcagtcgccgcagcgcagtacaacattgccgctaaccatattgataacgtgcagattatccgtatggccgccgaagagtttacgcaggcgatgaacggagtacgcgagtttaaccgtttgcagggcatcgacctgaagagctatcagtgtgaaacgatttttgtcgatccgccgcgtagcgggctggacagtgaaaccgagaaaatggtgcaggcatatccgcgtattttgtacatttcctgcaacccggagacgctgtgtaagaacctggaaacattaagccagacgcacaatgtgtcacgtctggctctgttcgatcagttcccgtatacgcaccatatggaatgcggcgtgttactcactgccaggtaa

SEQ ID NO: 75239 - DNA, 360 bp, Citrobacter koseri
atgaaacagtcaggtcaagataaaggtacgctgttgctggcgctggtcgctggcttatcgatcaatggcacattcgcggcgctgtttagctccatcgtgccgttttctgtattcccgattatcgcgctggtgctggcggtttattgcctgcatcaacgttatcaaaaccgcactatgcctgtcggcttgccggggctggctgccgcctgttttatcctcggcgtgttgttgtacagcaccgtggtacgtgcggaatacccggatatcggttctaacttcttcccggcggtgctgtcggtgattctggtattctggattggctttaagatgcgtaaccgcaagcaggaagtcacggaataa

SEQ ID NO: 75240 - DNA, 636 bp, Citrobacter koseri
gtgatgggcgttagagcgcaacaaaaagaaaaaacccggcgttcgctggtagaagccgcattcagtcaactgagcgccgaacggagtttcgccagtctcagtttacgcgaagtagcgcgtgaagcgggcattgcgccaacctcattttatcgccatttccgcgatgtggatgagcttggcctgacgatggtggatgagagcggtttaatgctgcgccaactgatgcgccaggcgcgtcagcgtattgccaaaggcggcagtgtgatccgtacctcggtctccacatttatggagttcatcggcaacaatcctaacgccttccgtttattattgcgtgaacgttccggcacctcggccgcgtttcgcgccgcagtcgcgcgtgagattcagcatttcatcgcggaacttgcggactatctggaactcgaaaaccatatgccgcgcgcgttcactgaagcgcaagccgaagcgatggtgacgattgtgtttagtgcaggtgccgaggcgctggatgttggtgcggaacaacgccgacagctggaagagcggctggtactgcaactgcgcatgattgcgaaaggggcatattactggtaccgccgtgaacaagagaagatggcacatcactccgagtaa

SEQ ID NO: 75241 - DNA, 1401 bp, Citrobacter koseri
atgccacattcctgggattatgatgcaatcgtcataggttcaggccccggcggcgaaggcgccgcaatgggtctggttaagcaaggagcgcgcgtcgccgttattgagcgttatcacaacgttggcggcggttgtacccactggggcaccatcccgtcgaaagcgctccgccatgccgtcagccgtatcatcgaattcaaccagaaccccctctacagcgaccactcccgactacttcgttcttcctttgccgatattctcaaccatgccgataacgtcattaatcaacaaacgcgcatgcggcagggcttttatgagcgcaaccactgtgaaatattgcagggtaatgcgcattttgttgacgaaaacaccctcgcgctggagtgccacgacggcacggtcgaaaccctgacggcggagaaattcgtgattgcctgcgggtcgcgtccttatcacccggccgacgttgatttcgcgcatccacgtatttacgacagcgactcaatccttagcctgcatcacgaacctcgtcacgtcatcatctatggcgccggggtgatcggctgcgaatatgcgtcaatcttccggggaatggacgtcaaagttgatttgattaacacccgcgaccgtctgctggcgtttcttgatcaggagatgtccgactctctctcttaccacttctggaacagcggcgtggttattcgccataacgaagagtacgagaagattgaaggctgcgacgacggcgtcattatgcacctgaaatccggtaaaaagctgaaggccgactgtctgctgtacgccaacggacgcactggtaacaccgattcactggcgctgggaaatatcggtctggaaaccgacagccgtgggcaactcaaggtcaacagcatgtaccagaccgcactgccgcacatttacgcggtgggcgatgtgattggctatccgagtctggcttccgccgcttacgaccagggtcgtattgccgcgcaggcgctggtgaaaggcgaagcgaccgcccatcttattgaagatatccctaccgggatttacaccatcccggaaatcagctccgtcggcaaaaccgagcagcaattgacggcgatgaaagtgccttacgaagtcggacgtgcgcagtttaagcacctggcgcgcgcgcaaatcgtcgggatgaacgtgggaacgctgaagatcctgttccatcgggaaacaaaagagattctggggattcactgctttggcgaacgcgcggccgaaattattcacatcggccaggcgattatggaacagaaaggcggcggtaacaccattgagtacttcgttaacaccacctttaactacccgacaatggcggaagcctatcgggtagcggcgctaaacggcttaaaccgcctgttttaa

SEQ ID NO: 75242 - DNA, 918 bp, Citrobacter koseri
atgaatattcgtgatcttgaatacctggtggcattagccgaacaccgccatttccggcgtgcggcggactcctgtcacgtcagccagccgacgctcagcgggcaaatccgtaagctggaagatgaactgggcgtaatgctgctggagcgtacgagtcgtaaagttctgttcacccaggcgggtttactgctggtggatcaggcgcgcaccgtgctgcgtgaggtcaaagtgctcaaggagatggcaagccagcaaggtgagacgatgtctggcccattgcatatcggcctgatcccaacggttggcccttatctgctgccgcatattattccgatgctgcatcagaccttcccgaagctggaaatgtatctgcatgaagcgcagacgcaccagctgctggcgcaactggacagcggcaagcttgactgcgtgatcctggcgctggtgaaagagagcgaggcgtttatcgaagtgccgctgtttgatgaacccatgatgctggcgatctatgaggatcacccgtgggcgaatcgcgatcgtgtgccgatgtccgatctggcgggtgaaaaactgctgatgctggaagacgggcactgcctgcgcgatcaggcgatgggcttctgcttcgaggcgggcgcggatgaagacacccatttccgggcgaccagtctggaaacgctgcgcaacatggttgcggcggggagcggtattaccttactgcctgcgctggcggttccgcaggagcgtaagcgtgatggcgtagtctacctgccgtgcattaagccggagcctaagcgtacggttgggttggtttatcgtccgggatcgccgctgcgcagtcgctatgagcaactggcggaggccatccgtgcggagatggatggccatttcgacaaagcgttaaaacaggcggtttaa

SEQ ID NO: 75243 - DNA, 1374 bp, Citrobacter koseri
atggcactttggggtgggcgttttacacaggcagcggatcaacggttcaaacagtttaatgactcattgcgctttgattaccgcctggccgagcaggatatcgtcggctctgtggcctggtccaaagctctggtcacggttggggtgttgactgcggatgagcaactgcaactggaagaggcgctgagcgcgctgctggaagaggttcgggtgaatccgcagcagattctggaaagcgacgcggaagatattcacagctgggtggaaggcaaactgatcgataaagtcggccagttgggtaaaaagctgcacaccgggcgcagtcgtaacgaccaggttgcgaccgacctgaagctatggtgcaaagatacggtcaccgagctgctgtctgctaaccgtcagttacaaagcgcgctggtagagacggcgcagaataatcaggatgccgtcatgccggggtacacccatctgcaacgtgcgcagccggtgacgtttgcccactggtgcctggcgtatgtggaaatgctggcgcgtgatgagagccgcttgcaggatgcgctcaagcgcctggacgtcagcccgttaggctgcggcgcgctggcgggtacggcgtatgaaatcgaccgtgaacagctggcaggctggctgggctttgcctcggcgacgcgtaacagtctggacagcgtgtccgatcgtgaccatgtgctggaactgctgtccgacgcgtctatcggcatggttcacctgtcgcgctttgcggaagatctgattttctttaataccggtgaagcgggctttgtggaactctccgatcgcgtgacgtcgggttcatcgctgatgccgcagaagaaaaacccggatgcgctggaactgatccgtggcaagtgcggtcgtgtgcagggggcattaacggcgatgatgatgacgctgaaaggcctgccgctggcgtacaacaaagacatgcaggaagacaaagaagggctgtttgatgcgctcgacacctggctggactgcctgcacatggcggcgctggtgctggacggcattcaggtaaaacgtccgcgctgccaggaagcggcgcagcagggctatgcgaatgcgactgagctggcggattatctggttgccaaaggcgtgccgttccgtgaagcgcaccatattgtgggcgaaacggtggtggaagcgattcgacagggaaaaccgctggaagatctgtcgctggctgacctgcaaaaatttagcgctgtgattggcgatgatgtgtatccgattctgtcgctgcaatcatgcctggataaacgtgcggcgaaaggcggtgtttcaccgcagcaggttgcgcaggcgatcgactacgcgaaggcgcgtctggcgtaa

SEQ ID NO: 75244 - DNA, 777 bp, Citrobacter koseri
atgatgaatccattaattatcaagctgggcggcgtattactggatagcgaagaggcgctggagcgtctgtttaccgcgctggtcaattatcgcgagtcgcatcagcgtccgctgattatcgtgcacggcggcggctgcgttgtggatgagctgatgaaacagttaaatttgccggtgaaaaagaaaaatggcctgcgcgtgacgcccgccgatcagattgacatcatcaccggcgcgctggcgggaaccgccaataaaaccttgctggcgtgggcgaaaaaacaccatatcgcgtccgttggcctgtatctcggcgacggcgatagcgtaaaagtgacccaactcgatgaagagctgggccacgttggactggcgcagccaggttcgcctaagctgattaactcgctgctggaaggcggcttcttgccggtggtcagttccattggcgtgaccgaagaagggcaactgatgaacgtcaatgccgatcaggcggcgacggcgctggcggcaacgctgggggcggatctgatcctgctttctgatgtaagcggtattctggatggcaaaggtcagcgcattgccgagatgacggcggccaaagcggaacagctgatcgatcagggcatcattaccgacggcatgattgtgaaggtgaacgcggcgctggatgccgcccgcacgctggggcgcccggtggatatcgcctcctggcgtcatgctgagcagcttccggcgttgtttaacggtacgccgatcggtacgcgtattctggcttaa

SEQ ID NO: 75245 - DNA, 1005 bp, Citrobacter koseri
atgttgaatacgctaattgtgggtgccagcggttacgctggcgcagagcttgtgacctatgtaaatcgtcatcctgatatgaccataaccgctttaaccgtctcagcgcaaagcaatgatgcaggaaagctaatctctgatttacatccgcagttaaaaggcattgtcgatctgccattgcagccaatgtctgatattagcgagttcagcggcggggtggatgtggtgtttctcgccaccgcgcatgaagtgagccacgacctggccccgcagttcctgaatgcgggctgcgttgtgtttgatctctccggtgcgttccgggttaatgatagcgccttctacgaaaaatattatggctttacccatcagcaccctgagctgctggaacaggcggtgtatggcctggcggagtggagcgcggacaaactaaaagaagcgaatctgattgcggtgccgggatgctatccgacggcggcgcaattgtcgttaaaaccgctgattgacgcaggtctgctggatctcaaccagtggccggtcattaacgcaaccagcggcgtgagcggcgccgggcgtaaggcggcgctttcgaacagtttctgtgaagtcagcctgcaaccgtatggcgtctttacccatcgtcatcagccggaaatcgccacccatctgggggcagaggttattttcacgccgcatctggggaacttcccgcgcgggattctggaaacgatcacctgccgcctgaacgctggcgttacccatactcaggtggcgcaggcgttgcagcaggcgtatggcgacaagccgctggtgcggctatatgacaagggcgttccggcgctgaagaatgtggtcgggctgccgttctgcgatattggttttgccgttcagggcgagcacctgatcgtggtggcgaccgaagataacctgttgaaaggcgcagcggcgcaggctgtgcagtgcgcaaatatccgtttcggctttgctgaaacgcagtctcttatttaa

SEQ ID NO: 75246 - DNA, 1152 bp, Citrobacter koseri
atgaaaaacactttaccgccatttatcgagatttaccgcgctctgattgccacaccgtcgattagcgctaccgaagaagcgctcgatcaaagtaatgcgtctttaatcactctgctggcagactggtttaaagatctgggcttcaaggttgaggttcaggcagtccccggtacgcgcaataaattcaatatgctggccagcaccggacagggtgctggcggtttgttgctggcgggccataccgataccgttccctttgacgacggacgctggacgcgcgatccgttcacgctgaccgagcacgataacaagctctacgggctgggtacggcggacatgaaaggcttctttgcttttatcctcgatgccctgcgtgacgtggatgtgacgacgctgaaaaaaccgctgtatattctggctaccgccgatgaagagaccagcatggcgggcgcgcgctatttcgctgaaaccaccgccctgcgcccggactgcgcgatcatcggtgaaccaacgtccctgcaaccggtgcgtgcgcacaaaggccacatttcaaacgccatccgcattctggggcaatcgggccactccagcgatccggcgcgcggggttaacgccattgagctgatgcacgacgccattggccgcatcatgcagctgcgcgatgacctgaaagaacgttatcactacgcggcgtttaccgttccctatccgacattaaacctgggccacattcacggtggcgacgccgcgaaccgtatctgcgcctgttgcgagttgcatatggatattcgcccgctgccgggcatgacgctgaacgatctcaacggattgctcaacgatgcgctggcgcccgtgagcgaacgctggccgggccgtctgacggtgtccgaactgcatccgccgattcccggctacgaatgcccgcctgaccatcaactggtggaagtggtcgagaaactgctgggcgcgcaaaccgaagtggtgaactactgcaccgaagcgccgtttatccagaccttgtgcccgacgctggtgcttggcccgggttcgattaatcaggcgcaccagccggatgaatatctggaaacgcgttttatcaagccaacccgcgagctgattacgcaggttgtccatcatttctgctggcattaa

SEQ ID NO: 75247 - DNA, 2652 bp, Citrobacter koseri
atgaacgaacaatattccgcgttgcgtagtaatgtcagtatgctcggcaaagtgctgggagaaaccatcaaggatgcgctgggagagaacattcttgatcgcgtagaaacaatccgtaagctgtctaaatcatctcgcgctggcaatgaagcgaatcgccaggagttgctcaccacgctacagaatctgtccaacgacgagctgctgcctgttgcccgcgcgtttagtcagttcctgaacctggccaataccgccgagcagtaccacagcatttcgccgcagggcgaagctgccagcaacccggaagtgattgcccgcaccctgcgtaaactgaaagatcaacccaatctcgacgaagccaccatcaaaaacgcggtggagtcgttatctctggaactggtactgaccgcacaccctaccgagatcactcgccgcacgctgattcacaaaatgggcgaagtcaacgcctgtctgaagcagctcgataacaaagagatcgcggattacgaacgtaatcagctcatgcgccgtctgcgccagctgatcgcccagtcctggcatacggatgaaatccgtaaaaaccgcccaagtccggtcgacgaagccaaatggggctttgcggtggttgaaaacagcctgtgggaaggggtgccaaattatctacgtgagttgaatgaacaactggaagagcatctgggctacaaactgccggtggattttgttccggtgcgtttcacctcctggatgggcggcgaccgtgacggcaacccgaacgtaacggctgatgtcacccgccacgttctcctgttgagccgctggaaagccaccgatctgttcctgaaagatattcaggttctgatttctgagctgtcgatggtcgacgccacgccggaactgctggcgctggtcggcgaagaaggcgcatcagaaccttaccgctacctgatgaaaagcctgcgttcccgcctgatggcaacgcaagcctggctggaagcgcgtctgaaaggcgagaaactgccgaaacccgctggcctgctgacgcaaaacgagcagttgtgggagccgctgtacgcctgttatcagtctctgcaagcgtgcggcatgggcatcatcgccaatggcgaactgcttgataccctgcgccgggtgaaatgctttggcgtgccgctggtgcgcattgatattcgccaggagagcacccgccataccgaagcgctgggcgagctgacgcgttatctgggcatcggcgattatgaaagctggtccgaagccgataaacaggctttcctgatccgcgaactcaactccaagcgtccgctgctgcctcgtcagtgggaaccgagcgacgacacccgcgaagtgcttgagacctgtcaagtgattgccgaagcgccgctgggttccatcgccgcttacgttatctctatggcgaaaacgccgtccgacgtgctggccgtgcatctgttgttgaaagaagccgggattagctttgccatgccggttgcgccgctgttcgaaacgctggacgacctgaacaacgccgacgcggtaatgactcagttgctgaatatcgactggtatcgcggctttattcagggcaaacagatggtcatgattggctactctgactcggcgaaagacgcaggcgtaatggccgcctcctgggcgcagtatcaggctcaggacgcgctgatcaaaacctgtgaaaaagccggaattgagctgacgctgttccacggtcgcggcggttccattggccgtggcggcgcgcctgctcatgccgcgctgctttcccaaccgccgggcagcctgaaaggcggcctgcgcgtgaccgaacagggtgagatgatccgctttaagtacggcctgcctgaagtcaccatcagcagcctgtccctgtacaccggcgcgattctggaagccaacctgctgccgccgccggagccgaaaaattcgtggcgtcatatcatggacgagctgtccgtgatctcctgcgacctgtatcgcggctatgtccgcgagaataaagacttcgtcccgtacttccgttccgcaacgccagaacaggaactgggcaagctgccgctcggttcgcgcccggcaaaacgtcgcccgacaggcggggttgaatccctgcgcgccattccctggatcttcgcctggacgcaaaaccgcctgatgctcccggcctggctgggtgcgggcaccgcgctgcaaaaagtcgttgaagatggcaagcaaagcgaactggaggccatgtgccgcgactggccgttcttctccacgcgcctcggcatgctggagatggtgttctctaaagccgacctgtggctggcggaatactacgatcaacgcctggtcaaaaaagcgctgtggccactgggtgaagagttacgcaacctgctggcagaggacatcaaagtggtgctggcgattgccaacgattcccatctgatggccgacctgccgtggattgccgagtctatccagttaaggaatgtgtataccgacccgctgaacgtattgcaggcggagcttttacaccgttcccgtcttgcagaagagcaaggtaaagatccagacccgcgcgtcgagcaggcgctgatggtcacgattgcgggcgtggctgcggggatgcgtaataccggctaa

SEQ ID NO: 75248 - DNA, 1734 bp, Citrobacter koseri
atgttcttcacacacacatctgctaaaccttcgtttagctggaaagcccttggctgggcgctactctatttttggttcttctctacattacttcaggccgttatttgcatcagcggctatagcggcaccaacgggctgcgtgactcactgcttttcagttcgctctggctgatcccggtatttttatttccccgtcatacccgcgcgattgccgccgttattggcgttgtactctgggcctcttcgctggcggcgctcagttattatgtcatttacgggcaggaattctcgcaaagcgttctgtatgtcatgtttgaaacaaacgcgaacgaagccagcgagtacttgagccagtatttcagtctgaagattatccttatcgccctggcctataccgccgtggcaatcctgctgtggacgcgtttaaagccaatatatattcccgcgccgtggcgctggttagtctcctttgcattgttatacggccttattctgcatccgatcgccgtcgggacgtttatcaaacataagccgtttgagcagacattaggcggcctcgcctcgcgtatggaacccgctgcgccgtggcagtttatcaatggctattatcaatataatcagcaactcacgtcgctgaatagtctgcttaacgagaacaacgcgctgcctccgttaacgaattttaaagataactccggtgatgcgccgcgtacgttagtgctggttatcggcgagtcaacccagcgtggtcgcatgagtctgtacggttatccgcgagaaaccacgccagagctggacgcgttgcataaaagcgatccgggtctgaccgtattcaataacgtcgtcacctcccggccatatacgattgaaattctgcaacaggcgctgaccttcgccaatgaaaagaacccggatctgtatctaacgaaaccgtcgctgatgaacatgatgaaacaggcaggttataagacgttctggatcaccaatcagcagacgatgaccgcgcgtaatacgatgctgaccgtattctcgaaacagaccgacaagcagttttatatgaatcagcagcgtactcaaagcgcgcgggaatatgacaccaacgttctggcgccctttaaagacgtaatggccgacccggcaccgaagaaatttattatcgttcacctgctgggaacacatatcaaatacaaattccgctacccagagaatcagggaaaatttgacggtcaaaccgatcatatccctgcgggcgtgggcgaagacgaacaggatatttataacgattacgataacgcgaatctgtataacgaccatgtcgtcgccagcctgattcaggactataaaacgactgacccgaacggttttctgctctacttctccgatcacggtgaagaagtgtatgacacgccgccgcacaaaacgcagggacgtaacgaagacaaccctacgcgtcatatgtatacggtgccgttcctgttatggacgtcagaaaagtggcaggccgcacacccgcgcgatctctcggcatatgttgaccgcaagtacagcagctctgaacttatccatacctggtccgacttagcggggctgacctacgacgggttcgacccgacgcgctccatcaccagcccgcagttcaaagcgatcacgcgctggattggcaacccgtataagaaaaacgcgttgattgattacgataccctgccttacggggatcatgtagggaatcagtaa

SEQ ID NO: 75249 - DNA, 861 bp, Citrobacter koseri
atgtaccatgacgtcagccaccttctctcccgtctgattaacggccctatggcgctacggcaggtttttttcgccaataccagcggtacggcgcccgaactggcgtatcaggttgattttccacgcctggagatggtgctggagggggagttcaccgatacaggcatcccggccgcgcccgtgacgctcatcgctggcgacgttctgtatgttccggcaggcagctggaacttcccgcagtggcaaacgcccgtcaccacgctcagcatcctgtttggcaagcagcaattaggtttcagcgttgttcactgggacggcaaacaatatcagaatcttgcgaagcagcatgtcgcacgtcgaggcccacgtattggctccttcctgctgcaaacgctcaatgaaatgcagatgcagccgcaggaacagcagacggcccgattaattgtcgccagcctgttgagccactgccgcgatctgctgggcagccaaatccagacggcgtcacggagtcaggcgctttttgaagcgattcgcaactatatcgatgagcgttacgcttccccgctcacccgcgaatcggtggcgcaggcgttttatatttcgccaaactacctttctcatctgtttcaaaaaacaggcgctatcggctttaacgaatatctgaatcacacacggctggaacacgcgaaaacgctgctgaagggttacgatctgaaagtcaaagaagtggctcacacctgtggatttgtcgacagcaactatttctgccgcctgtttcgtaaaaatacggagcgttctccgtcagaatatcgtcggcagtaccacagccagttgacggaaaagaaggctactccagaataa

SEQ ID NO: 75250 - DNA, 357 bp, Citrobacter koseri
atgacagtctcaactgtacgttatctggttgccgttaccgcctgcgtcagcggcgtggcgcatacctatatggccgccgaacgcctggagaagctctgccagcaggaaaaatggaacattaaaattgaaacccagggggcgctgggcacggaaaatcgcttaacggaggaggatatcaaccgggcggatgttgtgttgctgattacggatattgaactggcgggcgcggagcgttttattcagagtcggtatgttcagtcaggaattaacgcctttcttcgcgaacctcagcgggtgatgagcgccgtgcgtaaactgctcaccgcgccgcagcatacgcatcttattctggagtag

SEQ ID NO: 75251 - DNA, 879 bp, Citrobacter koseri
atgacatcattcgccgcaccgcgcatcagctgtaagaatctggaaacgagcgctgatgatgtcgcacgtattttcaacattcagcgttattcgttgaatgacgggcagggaatccgtacggtggtcttttttaaaggctgcccgcatacctgtccgtggtgcgccaatccagaatctatttctccacgcatcgaaacggtgcggcgggagagtaaatgtctgcactgctcgccctgcttgcgtgatgcggatgagtgtccttccggggcgtttgaacgtatcgggcgcgatattacgctggatgaactggaacgcgaggtgatgaaagacgaactcttttttcgcacctccggcggcggcgtcacgctttctggcggtgaagtattaatgcaggcggcgtttgccacgcggtttttgcaacgtctgcgacgtttcggcatttcctgcgcgattgaaaccgcaggcgacgcgcctgccagtcggttgctaccgctggctaaagcgtgtgatgaagtgctgtttgatttaaagattatggagccgcgccaggcgcatgaggtggtcaaaatgaatttaccacgcgtgctggataacctgcgtttactggtaaacgaggggattacggtcatcccccgtttgccgttgattccgggctacacgctcaacgttgagaatatgcagcgagcgttggcggtgttgctatcgtcagggattaatcaggtgcacctgctaccgtttcatcagtatggtgaagcgaaataccgtctgcttgggcagccgtgggcaatgaaagatgtgcctgtaccctcgccgcaagaggtggcggaaatgcaggcgttggcagagcgagccgggtttctggttactgtgggaggttaa

SEQ ID NO: 75252 - DNA, 2298 bp, Citrobacter koseri
atgacgaatcgtacccagcgccttaaagccgcacttttccagaataaccgtgaaatttcgcttgagcgcgcgcagctgtataccgccagctatcagcagacagagggagagccggtcatattgcgtcgcgctaaagcgacggcgtatatccttgagcatgttgaaatttcgattcgtgatgaggagttgattgccgggaaccgtacggtgaaaccgcgggcggggattatgtcgccggaaatggatccgtactggttacttaacgagttagatcagttcccgacgcgtccacaggaccgttttgacatcagcgaggacgataagcgcctctaccgcgaggtgctgttcccgtactgggaaaaacggtcgatgaaggatttcatcaacggccagatgaccgatgacgtgaaagccgccgtcagcacgcagatttttagcgttaaccagacggataaagggcaggggcacattattattgattacccgcggctgttgaatcacggtctgggtgaactggtggcgcaagtgcggcaacactgccagcagcagccggacaatcacttttaccaggcggcgttgctgctgctggaggcttcgcaaggccacattctgcgttacgcgacgctggcggagaaaatggcggaaagttgcctggatgcgcgtcggcgtcaggagttgctcaccattgccgcgaactcccgacataacatgcagcacaagccgcaaaccttctggcaggcgtgccagctgttctggtacatgaacatcattctgcaatatgagtctaacgccagctcgctctcgctggggcgttttgaccagtatatgctgccgttttatcaggcatcgctgagccagggcgaagacccggcatttttaaaagaactcctcgaatcgctgtgggtaaaatgtaacgacatcgtgctgttacgttcgaccagcagcgcacgctatttcgccggattcccgaccggttacaccgcattgcttgggggattgacggagaacggacgcagtgcggtgaacgtgctctcttttctctgtcttgacgcgtaccagaatgtgcagttgccgcagccgaaccttggcgtgcgtaccaatgcgctgattgacacgcccttcctgatgaaaacggcggagacgattcgcctcggcaccggtattccgcagatctttaatgatgaagtggttgtgcccgcgttcctgaaccggggtgtttcgctggaggacgcccgtgattacgcggtagtggggtgtgtggagctgtcgattccgggcagaacctacggcctgcatgacatcgccatgttcaacctgctgaaagtgatggaaatcagcctgtatgagaatgaaggaaaccgcacgctgacgtacgaagatctgttggcgcatattcgcgccaaaatcagccattacattacgctgatggtggaaggcagtaatatttgcgatatcggccaccgtgactgggcgccggtaccgctgctttcctcgtttatcagcgactgcctggataaaggccgtgatattaccgatggcggcgcgcgttataacttctctggcgtacaggggattggcattgctaatctgagcgactccctgcacgcgttaaaagggctggtatttgatcagcaacgtttacgtttcgatgaactgctggcggtgttaaaggcgaactttgcgacgccggaaggtgagagaattcgtgcccggctgattaaccgcttcgagaaatacggtaatgatattgatgatgtggataacatcagcgctgaactgctgcgccattactgtaaagaggtggagaaataccagaacccgcgcggtgggcaatttacaccgggttcatacaccgtctccgcgcatgtgccgctgggttcggtggtgggggcgacgccggatggccgttttgccggggaacagctggcagacggcgggttgtcgccaatgctcggccaggatatgcaggggccgacggcggtgctgaaatcagtaagtaaactggataacacgctgctttctaacggtacgctgctcaacgtgaagtttacgcccgcgacgctggaaggtgaggccggcttgcgcaaactggcggattttctgcgcgcctttacccagcttaagctacagcatattcagtttaacgtgttgaatgcggatacgttgcgtgaagcgcaattgcgcccgcaggatttcgccgggctggtggtgcgcgtggcgggttacagtgccttctttgtcgagctgtcgaaggagatccaggatgacatcattcgccgcaccgcgcatcagctgtaa

SEQ ID NO: 75253 - DNA, 321 bp, Citrobacter koseri
atgacgaagattatcgcagtaacagcatgtccttctggtgtcgcacacacctatatggcggccgaagcgctggaaagcgcggccaaagcgaaaggctgggaagtcaaagtcgagacccagggctcgattggtctggaaaacgaactgactgcggcggatgtggcggatgcggatatggtgattctgaccaaagatatcggcatcaagtttgaggaacgctttgcgggtaaaaccattgtccgcgtcaacatcagcgatgcggtaaaacgcgccgatgccattatgaacaaaattgacgcgcatctttcgcaaattgcttaa

SEQ ID NO: 75254 - DNA, 1080 bp, Citrobacter koseri
atgaaagagttggtgcagatcctgaaaaacacccgtcaacatctgatgaccggtgtttcgcatatgatccccttcgtcgtagcgggtgggatcttgctggcggtttccgtcatgctgtatggcaaaggcgctgttcccgatgccgcgaccgatcctaatctcaagaagctttttgatattggcgtcgcagggctgacgctgatggtgccttttctcgccgcctatatcggttactccattgctgaacgttccgcgctggcgccttgcgcgatcggcgcctgggtgggcaacagctttggcgccgggttctttggcgcgctcattgccgggattatcggcggtatcgtcgtgcattatctgaagaaaatcccggtgcataaggtattgcgctcggtgatgcctatcttcgttatccctatcgtcggcaccttcattaccgcaggcatcatgatgtgggggctgggcgaaccggttggcgcgttaaccaccagcctgacccaatggctgcaaggaatgcagcagggcagcatcgtgctgctggcggtcatcatggggttgatgctggccttcgatatgggcggcccgattaacaaagtggcctacgccttcatgctgatttgcgtggcgcagggcgtatacagcgtggtggcgattgctgcggtgggtatctgcgttccgccgctgggtctgggcctggcaacgctggttggtcgtaaaaacttctcttctgaagaacgtgaagccggtaaagccgcgttggtaatgggctgcgttggggtcacggaaggcgcgattcccttcgccgccgccgatccgctgcgcgtgatcccatccattatggttggctctgcctgtggtgcagtaacggctgcgctgtttggcgcgcagtgttatgccggctggggtgggctgattgttctgccggttgtggaaggcaagctgggttatatcgcggcagtcgctgtcggggcggtagtgacggcaatctgcgttaacgtgctgaaaagtctggcgcgtaagaaagtgtctcaggttgatgagaaagaagacgacctggatttagagtttgagatgaattaa

SEQ ID NO: 75255 - DNA, 2502 bp, Citrobacter koseri
atggccctgattgtggaatttacctgtgagctgcccaatggcgtacacgcccgcccggcaagccacgttgagacgctgtgcaatacctttacctcacacattgagtggcataacctgcgcaccgaccgtaaaggcaacgccaaaagcgcgctggcgctgattggcaccgacacgctggcaggcgacgcctgtcagttattaatttcaggtacggacgaacaggatgcccaccagcgcctgagccaatggctgcgcgatgaattccccctttgcgatgcgcctctggcggagatcaaaaacagtgagctggagccgcttccggcatcgctgacaaacctgaacccgctgttttttcgcgcccgcgccgtctgcaccggcagcgcgggcggcgttctgacgcagctctcctcgctggatctcaatacgctcggcgaacttcctgctgccagtgatatagagaccgaacaatctgcgctggataacggcttaacgctgctgataaagaatattgcgttccgccagctcgacagcgacggcgccaccagcgcgattctggaagcccaccgttcgctggcaggcgacacctccctgcgccaacatttgctggcaggcgttgcgcgcggtttaagctgtgcgcaggcgatagtcgaaagcgccgggcacttttgtgatgagttcgcccgttccagcagccgctatttacaggaacgcgcgctggacgtacgcgacgtctgcttccagctcctgcaacaaatttatggcgaacaacgcttcccggcgccaggcaaactgacccaacccaccgtctgtatggccgatgaactcaccccaagccagttcctcgaactggataaaacgttcctcaaaggcttgttgttaaaaagcggcggtacgacttcacacacggttattcttgcccgctcattcaacattcccacgctggttggcgtggatattgaggcgctaacgccgtggctgcaccagacggtctatatcgacggcaacgccggtgcgattgtcgttgtgccagatgaacccgtcacccgttactaccaacaggaagcccgtgtgcaggacgctttacgcgagcaacagcgtatctggctgacccaacaagcgcgcactgccgacggtatccgtatggaagtggccgccaacattgcgcactccgtcgaagcgcaagcggcattcggcaacggcgcggaagcggttggtctgttccgtacagaaatgctgtatatggacagaaccagcgcaccttgcgagaacgagctgtacaacattttttgccaggcgctggagtccgcacagggccgtagcattattgtgcgcacgatggatatcggcggtgacaagcccgttgattatctgaacattcctgcggaagccaacccgttcctcggctatcgcgccgtacgcatttatgaagagtacgccacgctgtttaccacgcagttgcgatcgatcctccgcgcttccgcacacggcagcctgaaaatcatgatcccgatgatctcctcaatggaagagatcctgtgggtcaaagagaagctggcggaggctaaacagcagttacgcaatgagcacgtcccatttgatgagaagatccccctcggcatcatgctggaagtgccatcggtgatgttcatcatcgaccagtgctgtgaagaaattgatttcttcagtattggcagcaatgacctgacgcaatacctgctggcggtcgatcgcgacaacgccaaagtcactcgtcactacaacagcctgaatccggccttcctgcgcgcgctggatttcgccgtacaggcggtacatcgtcaggggaaatggattggcctgtgcggtgaactcggcgcgaaagggtcagtgttgccgctgctggtcggactggggctggacgagatcagcatgagcgcgccgtcaattcctgccgctaaagcgcggatggcgcagctcgacagtcgtgcctgccgccagttgctgaatcaggcgatggcctgtcgcacctcgctggaagtggagcatctgctggcgcaattccgcatgacccagcaggacgcgccgctggtcaccgcccagtgcatcacgcttgatagcgactggcgcagcaaagaagaggtgatcaaggggatgaccgacaacctgctgctggcaagccgctgtcgctacccgcgcaagctggaggccgacctgtgggcgcgtgaagccgtgttctccaccgggttagggtttagcttcgccattccacacagcaaatctgaacacattgagcagtccaccatcagcgtggcgcgtctgaaagcgccggtacgctggggcgatgacgatgcgcagttcatcatcatgctgacactcaacaaacacgccgcaggcgaccagcatatgcgcattttctcacgcctggcccgccgcattatgcacgaagaattccgcaatgcgctggtcaacgccgcatctgccgaggcaattgccagcctgttgcaacatgaacttgaactctaa

SEQ ID NO: 75256 - DNA, 663 bp, Citrobacter koseri
atggaactctatctggataccgcgaacgtcgcggaagtcgaacgtctggcgcgcatcttccctgttgctggcgtcaccaccaacccaagcattgtggcggcgagtaaagaatccatctgggatgtactgcctcgcctgcaaaaagccatcggcgaagagggaacgctatttgcccagacgatgagccgcgatgcgcaaggaatggtggaagaagccaaacgcctgagcaatgccattcctggtattgtggtgaagattccggtcactgccgaaggtctggcggcgatcaaacagctcaaaaaagaaggtattacgacgctgggaacggctgtctacagcgcagcgcagggcttgctggcggcgctggcaggcgcaaaatacgtcgccccgtatgtcaatcgggttgatgcccagggcggcgacggcatccgtatggtgcaggaactgcaaaccttgctggagatgcatgcgccgggcagcatggtactggccgccagctttaaaacgccgcgtcaggcgctggattgcttactcgcaggatgcgaagcaatcacccttcctttagatgtagctcaacaaatgctcaatacccctgcggtagagtcagctatagggaagtttgagcaagactggaataacgcatttggccacatcaacctgtga

SEQ ID NO: 75257 - DNA, 1104 bp, Citrobacter koseri
atggaccacattattcaatctcctggtaaatacatccagggtgcagatgtcatcacacgtcttggagaatatctcaaacccctggccgaacgctggctggtggtcggagacaagtttgtcttaaattttgcccagtccgcgctggagaaaagtttccaggatgccggactggctctggaaatcgcgccatttggcggcgaatgttcgcaaaatgaaatcgatcgtctgcgtatcgtcgcagataaagcgcagtgcggcgccgttctcggcatcggcggcggcaaaacgctggataccgcgaaagcgctggcccactttatggatgtcccggtcgctatcgcgccgaccatcgcctctaccgatgccccctgtagcgcgctttccgtgatctacaccgatgcaggcgagtttgaacgctatctgatgctgccgcgtaacccgaatatggtgattgttgataccaaaattgtcgcgggcgcgcccgcacgtctgctggctgccggtatcggcgatgcgctggcgacctggtttgaagcgcgcgcctgttcacgcagcggcgcgaccacgatggcgggcggcaagtgtacacaggcggcgctcgcgctggcggagttgtgctataacacgctgatcgaagagggtgagaaggccatgctggcggctgagcagcatgtcgtcacgccggcgctggaacgcgtgattgaagccaacacttacctgagcggcgtcggttttgaaagcggcggtctggcggcggcgcatgccatacataacggcctgacggcgattccagacgcgcatcactactatcacggtgagaaagtggcgttcggcacgctgacgcaactggtactggaaaacgcgccggttgaagagatcgaaaccgctgcggcgttgtgccattccgttggcctgccgatcacgctggcgcaactggatattaagcaggacattccggcgaagatgcgcacggtggcggaagcctcctgcgcggaaggcgaaaccattcacaacatgcctggcggcgccacgccggatcaggtttacgccgccctgctggttgccgaccagtacggtcaacgtttcctgcaagagtgggaataa

SEQ ID NO: 75258 - DNA, 2181 bp, Citrobacter koseri
atgagcatgtctgacgatacccataattcattgtctaccgggaagtgccctttccatcagggcagccacgaccgtagcgcgggtgctggcaccagcagccacgactggtggcctaaccaactccgtgtagatcttctgaatcaacactccaaccgttcgaacccgctgggtgaggacttcgactaccgcaaagaatttagcaaactcgactattccgccctgaaaggggatcttaaagctctcctgtccgattctcagccgtggtggcctgcggactggggtagctatgccggtctgtttattcgtatggcatggcatggcgcgggcacttatcgttccgtcgacgggcgcggcggcgccggacgcgggcagcagcgttttgcaccgctgaactcctggccggacaacgtcagcctggataaggcgcgtcgtctgctgtggcctatcaagcagaaatatggccagaaaatctcctgggccgacctgtttattctggcgggtaacgtggcgctggagaactccggtttccgtacgttcggttttggcgccgggcgtgaagatgtgtgggaaccggatcttgatgtgaactggggggatgagaaagcctggctgacgcaccgtcatcccgaagcgctggcgaaagcgccgttgggcgccaccgaaatggggcttatctacgttaacccggaagggccggatcacagcggtgaaccactttccgccgctgcggctatccgcgcgacgttcggcaatatgggcatgaacgacgaagaaaccgtggcgctgattggcggcggtcacacattgggtaaaacccacggtgcggcggcggcgtcccatgttggcgttgatccagaagccgcgccgattgaattgcaggggctgggctggagcagtgactacggcagcggcgtaggcggcgatgcgattacctcgggtctggaagtggtctggtcgcagacgccgacccagtggagtaattacttcttcgaaaacctgttcaaatacgagtgggtgcagacgcgcagcccggcgggcgcgatccagttcgaagcggttgatgcgccagaaatcattcccgatccgttcgatccgtcgaagaaacgtaaacccaccatgctggtgactgacctgacgctgcgtttcgatccagaattcgagaaaatttcccgtcgtttcctcaacgatccgcaggcgtttaacgaagcgttcgcccgcgcatggttcaaactgacgcacagggatatggggccaaaagcgcgctatatcgggccggaagtaccgaaagaagatctgatttggcaggacccgctgccgcagccggtatttaatccgagccaggaagacatcgtcaacctgaaggccgcgattgccgcatccgggctttccgtcagcgaactggtgtcggttgcatgggcatctgcgtcaaccttccgtggcggcgataaacgtggcggcgccaacggcgctcgcctggctttagcgccgcagcgagactgggatgtgaacgccgctgcggcgcgcgttctgccggttctggaagagattcagaaatcgtccgggaaggcatctctggccgatatcatcgtccttgcgggcgtcgtcggtgtggagcaggcagcaagtgcggcgggcgtcagcatcagcgtgccgttcgcgccgggccgtgtggatgcacgtcaggatcagacggatatcgagatgtttgagcttctcgaaccgatcgcagacggcttccgtaactatcgcgcacggcttgatgtgtcgaccaccgagtcactgctgattgataaagcgcagcagctgacgctgaccgcgccggagatgacggcgctggtgggtgggatgcgcgttctgggcgctaactttgatggcagccagaatggcgtgtttaccgaccgcccgggcgtactcagcaatgatttctttgtgaatctgctggatatgcgtaacgagtggaaagcggcggacgaatcgaaagagctgttcgaaggccgcgatcgcctgagcggtgaggtgaaattcacggcgacccgcgcagacctggtattcggttctaactcggtactgcgagccctggcggaagtttacgccagcagcgatgcgcgtgagaaattcgtgaaggatttcgtcgcggcatgggtgaaagtgatgaacctggatcgtttcgatctgctgtaa

SEQ ID NO: 75259 - DNA, 891 bp, Citrobacter koseri
atgagcttttttcacgccaaccagcgggaagccctgaatcagagcctggcggaagttcagggtcagattaatgtttcgttcgagtttttcccgccgcgcaccagtgaaatggagcaaaccctgtggaactctatcgatcgactgagcagcctgaaaccgaagtttgtctccgtgacctacggcgccaactccggtgagcgcgaccgtacgcatagcatcatcaaaggcattaaagagcgtacgggcctggaagccgcgccgcacctgacctgcatcgacgccacccgcgatgaactgcgtaccattgcccaggattactggaataacggtatccgccatattgttgccctgcgcggcgacctgccgccggggagcggcaagccggatatgtatgccgctgacctggtcagcttactgaaagaggttgccgattttgatatctccgtcgccgcttacccggaagtccacccggaagcgaaaagcgcgcaggcggatctgctcaacctgaaacgcaaagtcgatgctggcgctaaccgcgcaattacccagtttttcttcgatgtggaaagctacctgcgttttcgcgatcgctgcgtctctgcgggcattgatgtcgaaattattccgggcattctgccggtctccaactttaagcaggcgaagaaattcgctgatatgactaacgtgcgcattccggcgtggatgtcacagatgtttgacggcctggatgacgatgcggaaacccgtaagctggttggggcgaatatcgcgatggacatggtgaagatcttaagccgtgaaggcgtgaaagatttccacttctacaccctgaaccgcgctgaaatgagttacgccatttgccacacgttgggtgtgcggcccggcctgtaa

SEQ ID NO: 75260 - DNA, 909 bp, Citrobacter koseri
atgacaacatcccctctgcactctctggatatccgcctgctacgctactttgccgtggtggcggaagagaacaatatgagccgcgcggcacagcgactgtttatgtcgcaaccgccgctgagccgccatattcgccagcttgaagaacgtctgggggtgacgctttttgtccgtcatactcgtggacttacgctgacggatgagggtctgcgcgcgctggaaatcgtccgcccgctgctggcgcagcaggacaaaacgtatgctgcgctgaatcaactggcgcaaaccggcgcgcaatcgctgcgtttagggctgagcaccgcgtttgagcaggggatttttgcccccctggaggcgcagctgaacacgcgtgtggagaggctgcatattgtgcgtcatggttcgcctgaactggtacgccaggtgcgtcgggggaaactggatgcggcgctggtggcgctgccgcttgaggccacagggttaagcgtcacgccgctcgactggcaagaaccgttgattgccgcattaccctccgtctggccggaagctagcctgacgtcgctctccttaactgcgcttaaccaccgcccgctgttctggttcaaacgggaacgtaatccggccttttttgactacacccgacacattttccgtcgcgctggttacgccccctcctgccttgaagaaccgctggaacatgatgtgctgctcgcgcgaatcgcccacggcgatggcctgagtttgctcccgggctcgtttgccgctattcagcgccagggcgtgatattccgcgcacttagcgacactgaattacgtattcgtgccgggctggtgatgcagcctgagaacgctgtacggttgcggtggttaaatacgcttgcgatgcaatccttcatcatttcggactga

SEQ ID NO: 75261 - DNA, 372 bp, Citrobacter koseri
atgcattcagaacgctttattaccggtcagaaaatgctgcaacaggtggatggcaagggtggcgatgcggtgatcgaaagtttgcaagacattgcgccagattttgcccgctatctgatcgaatttccgtttggcgatatctattcccggccagggctggatttacgcagtcgggaaatcgcaaccgtcgccgcgttaaccgcgctgggcaacgctacgccgcagttgaaggtacatattgccgccgcgcgacatgtggggttaacgcaggaggaaattatcgaagtgataatgcagatggcggtttatgccggttttccggctgcgctgaacggtctgttcgccgcaaaagaggtgtttgcaactcggtga

SEQ ID NO: 75262 - DNA, 2433 bp, Citrobacter koseri
atgagtgtgattgcgcaggcaggggcgaagggtcgtcaactgcataaatttggtggcagtagtctggcagacgtgaaatgttatctgcgtgtcgcaggcattatggcggagtactcgcagcctgacgatatgatggttgtttccgccgccggtagtaccaccaaccagttgattagctggctgaagttaagccagaccgaccgcctctccgcgcatcaggtgcaacagacgttacgccgctatcagagcgatctgatcagcgggctgcttcccgccgacgttgcggatggtctgatcagcgctttcattagcgatctggagcgtcttgccgcgctgctcgacagcggcgtgaccgatgccgtttatgccgaagtcgtcgggcacggcgaaatctggtctgcgcgtctgatgtccgcagtgctgaatgagcaaggactggcgtcggcatggctggacgcgcgtgagtttttacgcgctgaacgcgccgcgcagccgcaggtagatgaaggtctctcttacccgttactgcaacagctgctggtgcagcatccgggcaaacgtctggtcgttaccggttttatcagtcgcagcaatgcgggcgaaacggtgctactgggccgtaacggttctgactattccgccacgcaaattggcgcgctggcgggggtttcccgtgtcaccatctggagcgatgtggccggggtttacagcgccgacccgcgtaaagtgaaagatgcctgcctgctgccgctgctgcgtctggatgaagccagcgagctggcgcgtctggccgcgccggttctgcacgcccgtaccctacagccggtttccggcagcgatatcgatttgcagttgcgctgtagctacacgccggatcaggggtccacgcgcattgaacgcgtgctggcgtccggcaccggggcgcgtatcgtcaccagtcatgatgacgtttgcctgattgaatttcaggtgcccgccagccaggactttaaactggcctggagagacgtcgaccagattctgaaacgggcgcaggtgcgtccgctggcggttggcgtgcataacgatcgccatctgctgcaattctgctacacctctgaagtcgctgatagcgcattaaaaattcttgatgaagcgggcctgccgggcgaattgcgcctgcgtcaggggctggcgctggtcgcgatggttggcgctggcgtcacccgtaacccgctgcactgccaccgcttctggcaacagctgaaaggccagccggttgaatttacctggcagtcggaagaggggatcagcctggtggccgtactgcgcaccggcccgaccgaaagcctgattcaggggctgcaccagtctattttccgcgcggaaaaacgcatcggcctggtgctgttcggcaaaggcaacatcggttcccgctggctggagctgtttgcccgcgagcagagcacgctctccgcgcgtaccgggtttgaatttgtcctggcgggcgtggtggatagccgtcgcagcctgctgaactacgaagggctggatgccagccgtgcgctggcgttcttcaacgacgaagcgattgagcaggatgaagagtcgctgttcctgtggatgcgcgctcacccgtatgacgatctggtggtgctggatgtcaccgccagcgagcaactggccgatcagtatcttgatttcgccagccacggcttccacgtcatcagcgccaataaactggcgggggcgagcaccagcgataaatatcgccagatccacgacgcgttcgaaaaaaccgggcgtcactggctgtataacgcgaccgtcggcgcgggcctgccgatcaactatacggtgcgcgatctgattgacagcggcgatgccattctgtcgatcagcgggatcttctccggcacgctgtcgtggctgttcctgcaatttgacggttccataccgtttaccgatctggtggatcaggcctggcagcaggggctgaccgagccggacccgcgtgttgacctttctggtaaagatgtgatgcgcaagctggtgattctggcgcgtgaagcgggttacgacatcgaaccggaccaggtgcgcgttgaatcgctggtgcccacacactgcgaagagggatctgtcgatcacttctttgaaaatggcgatgagctgaatgagcagatggtacagcgtctggaagccgctcgtgaaatggggctggtgctgcgctacgtggcgcgtttcgacgccaacggtaaagcgcgcgttggcgttgaagcggtgcgcccggaacatccgctggcggcgctgctgccgtgcgataacgtctttgccatcgaaagccgctggtatcgcgacaatccgctggtgatccgcgggccgggagccggtcgtgacgtcaccgccggggcgattcagtcggatatcaaccgcctggcgcagctgctgtag

SEQ ID NO: 75263 - DNA, 1161 bp, Citrobacter koseri
atgacgcgtaaacaggccaccatcgcagtgcgtagcgggttaaatgacgacgagcagtacggttgcgttgtcccgccgattcacctttccagcacctataacttcactggttttaatgaacctcgcgcccatgactattcgcgacgtggaaatccgacgcgtgatgtagttcagcgcgcgctggcggagctggagggcggtacgggcgcggtgctgaccaataccgggatgtcggccattctgctggtgacgaccgtgttcctgaagccgggcgatctgctggtggcgccgcacgactgctacggcggcagctatcgcctgtttgacagcctggcgaagcggggctgttatcgcgtgctgtttgtcgatcaaggcgatgagcaggcgctgaaagcggcgctggcggaaaaaccgaagctggtgctggtggaaagccccagtaatccgttgttacgcgtggtagatattgcgaaaatctgccagctgtcgcgagaagcgggcgcggtgagcgttgtggacaacacgtttttaagccctgcactgcaaaatccgctggcgttgggcgccgatctggtgttgcattcatgcacgaaatatttaaacggccattcggatgtggtggctggcgtggtgattgcgaaagatccagagattgtcaccgaactggcatggtgggccaataatattggcgtcaccggcggcgcgtttgatagctatctgctgctacgtgggctgcgtactctggcgccgcgaatggacgtggctcagcgcaatgcccaggccattgtggactatctgcaaacccaaccgctggtgaaaaaactgtaccatccgtcgctgccggataatcaagggcacgagattgccgcgcgccagcaaaaaggctttggcgcaatgttgagttttgaactggatggcgatgagcagacgctgcgtcgtttcctgggcgggctgtcgttgtttacgctggcggaatccttagggggtgttgaaagcctgatctcccacgccgcaacgatgacacatgcaggcatggcgccagaagcgcgtgctgccgccggaatttcagagacgctgctgcgtatctccaccggtattgaagatggcgaagatttaattgccgacctggaaaatggcttccgggctgcaaacaaggggtaa

SEQ ID NO: 75264 - DNA, 318 bp, Citrobacter koseri
atggctgaatggagcggcgaatatatcagcccatacgctgagcacggtaagaagagtgagcaagtcaaaaagattacggtttccattcctctgaaggtgttaaaaatcctcaccgatgaacgcacgcgtcgtcaggtgaacaacctgcgtcacgccaccaacagcgaactgctgtgtgaagcgtttctgcatgcctttaccgggcaaccattgccgaacgatgaagacttgcgtaaagagcgcagtgatgaaataccggaagaggccaaaatcatcatgcgtgaactggggatcgacccggatacgtgggagtattga

SEQ ID NO: 75265 - DNA, 213 bp, Citrobacter koseri
atgaaaaaagatattcacccgaaatacgaagaaattactgcaaactgctcttgcggtaatgtcatcaaaatccgctctactgcaggtcacgacctgaacctggacgtgtgcggtaaatgccacccgttctacactggcaaacagcgtgatgttgctaccggtggccgtgttgaccgcttcaacaagcgtttcagcatcccgggcagcaaataa

SEQ ID NO: 75266 - DNA, 2199 bp, Citrobacter koseri
atgcccgtcgcgcacgttgccttgcccgttccgctaccccgcacctttgactatctcttgccagaaggcatgaccgtcaaagccgggtgtcgggtgcgcgtgccgtttggcaaacagcaggaacgtgtcgggattgtggtgtcggtcagcgaacaaagcgaactgccgcttaacgaactgaaagcggtcgttgaggtactggacagcgagccggtcttttccccctccgtctggcgtttgctgctttgggcggcggattactaccaccatccaatgggtgacattctgtttcacgctctgccgattttgctgcgccaggggaaacccgccagcaacgcgccgatgtggtactggttcgccaccgaagacggccacgctatcgatctcaatagcctgaagcgctcgcctaaacagcaacaggcgctggccgcgctgcggcaggggaaaatctggcgcgaccaggtggcggatcttgaatttaatgacgcggcgctccaggcgctacgtaaaaaaggactgtgcgagctggcgagcgaaacgcccggctttagcgactggcgcacccattacgccgtctgtggcgatcggctgcgtctcaataccgaacaggccaccgccgttggcgccatccacagcgcgtcggacagcttttctgcctggctgctggcgggcgttacgggttccggtaaaacagaggtctatctcagcgtactggaaaacgtcctcgctcagggcaaacaggcgctggtgatggtgccggaaattggcctgacgccgcaaaccatcgcccgctttcgcgagcgcttcaacgcccccgtcgaagttctgcactccgggttaaatgacagcgaacgtctctcagcctggctgaaagccaaaaacggcgaggcagcgattgtcatcggcacccgctcatcgttgtttacgccgtttaaaaacctcggcgtcattgtgatcgacgaagagcatgacagctcctataagcagcaggaaggctggcgttatcacgcccgcgacctggcggtgtaccgcgctcacagcgaacaaatcccgattattctcggctcggcaacaccggcgctggagacgttatgcaacgtgcgacaaaaaaagtaccgcatgctgcgcctgacgcgccgggcaggcaacgcacgccctgccctccagcatgtgctggatttaaaaggccagaagatccaggccgggctggctcccgcgcttatcgcccgtatgcatcagcacctgctggcagataaccaggtcattctcttccttaaccgtcggggatttgctcctgcgctgttatgccacgactgcggctggattgccgaatgtccgcgctgcgatcactattacacgttgcaccaggcgcaacaccacctgcgctgtcaccattgcgacagccagcgcccgataccgcatcagtgcccttcctgcggctccacgcatatggtgccggtcgggttagggacagaacagcttgagcaggcgttggcgcccttctttcccggcgtgccggtctcgcgcatcgaccgcgacaccaccagccgtaaaggcgcgctggagcagcatctggcggaagtccatcgcggcggcgcgcgcattttgatcggcacgcaaatgctggcgaaagggcaccatttcccggacgtcaccctggtagcgctgctggacgttgacggcgcgctgttctcagcggatttccgttcggcggaacgttttgcccagctttacactcaggtttccggccgcgccggacgtgccggaaaacagggcgaggtggtattgcagacccaccatccagagcaccctttgctgcaaaccttgctgcacaaaggctatgacgcttttgctgaacaggcgctggccgagcggcaaacgctgcaacttccgccgtggaccagccatgtgattgtgcgggcggaagatcataacaaccagcaggcgccggtgttcctgcaacagctgcgtaatctgattcaggccagcccgcttgcggatgacaagctctgggtattaggcccggtgcctgcgctcgcgccaaaacgcggcggccgctaccgttggcaaattttgttgcagcatccgtcgcgaattcgtctgcaacatatcgtcagcggcacgctggcgctcatcaatacgctacccgaatcccgcaaggttaaatgggtgctggatgtcgatcccattgagggataa

SEQ ID NO: 75267 - DNA, 1026 bp, Citrobacter koseri
gtgaaaccgaagaaacaggttgctgccgctacaatgaaagatgttgctatgaaggcgaaagtctcaacagcaaccgtgtcccgtgcgttaatgaacccggataaagtctcccagtcgacccgtaaccgggttgaacaggcggcgatggaggtgggatatttaccgcaatcaatggggcgaaatagcaaacgaaatgaatcacgcaccatcctggtgatcgtcccggatatttgtgatccctttttcagtgaaatcatccggggcattgaggttaccgccgcaagccacggatatctggtgttgattggtgactgcgcgcaccagaatcagcaagagaagacctttatcaatttgatcatcaccaaacaaattgatggcatgttattgctcggttcacgtctgccgttcgacgccagcattgaagagcaacggaatctgccgccgatggtgatggccaacgaattcgcgccggagttggagctgcctaccgttcatattgataacctgactgcggcctttaacgccgtgaattatctgcatgaacagggccaccagcgtatcggatgcattgccgggccggaggagatgccgctgtgccactaccgtctgcaaggctatgtgcaggcgctgcgtcgctgcggcattaccgtcgacccgcattatatcgcccggggcgatttcacctacgaggcgggcggtcacgcgctgcaacagctgcttgcgcttccgcagcctccgaccgccgtgttctgtcacagcgacgttatggcgctcggcgcgctctcctgggccaagcgtcatggtctgaaagtccctgacgatctgtccatcattggctttgataacattgcgctggcggaattttgcgacccgcctctgacgacagtttcacagccgcgcttcgatatcgggcgcgaagcaatgctgctcttgctcgaccagctacaggggcaaaatgtcagcagcggctcgcgcttgctggactgcgagttaattattcgtggttcgacgcgagccttaacttaa

SEQ ID NO: 75268 - DNA, 900 bp, Citrobacter koseri
atggtcgctattgcggcggctgtccttgtggcctttatcgggggtctgtacttcattactcatcacaaaaaagaagagtccgaaacgctgcaaagccagaaagtgaccggcaacgggctgccgccgaagccggaagagcgctggcgctacattaaagagctggaaagccgccagccgggcgtgcgtgcgccaaccgagccttctgcgggcggcgaagtgatgaacccggagcagctcaccagcgagcagcgtcagctactggcgcaaatgcaggcggatatgcgccagcagccgacccagcttaacgaagtgccgtggaacgaacagacgcctgaacagcgtcagcagacattgcagcgccagcgtcaggcacagcagcaggtacaacagcagcagtgggctaacacccagccggttcaacagccgcgtacgcagccacgcgtgacggagcaaccgtaccaacagccacagcagcaaccgcgtacggcgcagactgcacctgcacagcagccacgccagacgcagcagccgaaacagacgacatcccagcagccttatcaggacctgttgcagacgcctgcgcacaccacgacttctcagcctaaaacgcagcaggccgcgccgatcgcgcgtgaacctgaagcgccaaaacagacggcagagaaaaaagatgaacgtcgctggatggtgcaatgcggctccttcaaaggcgccgagcaagcggaaaccgtgcgcgcccagttggcttttgaaggctttgactccaaaatcaccaccaacaacgggtggaatcgtgtggtcatcggccctgtcaaaggcaaagagaatgcagacagcacccttaaccgcctgaagatggcgggccacacaaactgcattcgactcgcctccgggggttga

SEQ ID NO: 75269 - DNA, 531 bp, Citrobacter koseri
gtgacaacaatagtaagcgtacgccgtaacggccatgtggtaatcgccggtgatggtcaggccacactgggcaataccgtaatgaaaggcaacgtgaagaaagttcgccgtctgtacaacgataaagtcattgcgggctttgcagggggaacggcagacgcattcacgctgttcgaactgtttgagcgtaaactggaaatgcatcagggccacctggtcaaagccgccgttgaactggcgaaagactggcgtaccgaccgtatgctacgcaagctcgaagcgctgctggccgtcgcagatgaaaccgcttcactgatcatcacgggtaatggcgatgtcatacagccggaaaatgatctgattgctatcggctccggtggtccctacgcccaggctgcggcacgcgcactgctagaaaataccgaactgggcgcccgcgaaattgctgaaaaggcgttggatattgcaggcgatatctgcatttacaccaaccacttccacaccattgaagaattaccgtctaaagcgtaa

SEQ ID NO: 75270 - DNA, 1332 bp, Citrobacter koseri
atgtctgaaatgaccccacgcgaaatcgtcagcgaactgaacaagcacatcattggccaggacaacgccaagcgttccgtggcgattgcactgcgtaaccgctggcgccgcatgcagctcaacgaagagctgcgccatgaagtgacgccaaaaaatattctgatgatcggcccgaccggcgtaggtaaaaccgaaatcgcgcgtcgcctggcaaaactggccaacgcgccgttcatcaaagttgaagcgacaaaattcaccgaagtcggttatgtgggtaaagaagtggattccattatccgcgacctgaccgactccgcgatcaagatggtgcgcgttcagtctattgagaaaaaccgctaccgcgcagaagaaatggcggaagagcgtattctcgacgcgctgatccctccagcgaaaaataactggggtcaggctgagcaacagcaagagccgtccgccgcgcgccaggcattccgcaaaaaactgcgtgaaggccagctcgacgataaagaaattgagatcaatctcgcagccgcaccgatgggcgttgaaattatggcgcctccgggaatggaagagatgaccagccagttgcagtccatgttccagaacctgggcggccagaaacaaaaaccgcgtaagctgaaaatcaaagacgcgatgaagctgttgattgaagaagaagcggccaaactggtgaacccggaagagctgaaacaggaagccatcgacgccgttgaacagcacgggatcgtgtttatcgacgaaatcgacaaaatctgtaaacgcggcgaatcctctggcccggacgtttcccgcgaaggcgtacagcgcgacctgctgccgctggtagaaggctgcaccgtctctaccaagcacggtatggtgaaaaccgaccacatcctgtttatcgcctccggcgcgttccaggtggcgaaaccgtctgatctgatccctgagttgcaggggcgtctgccgattcgcgttgagctgaaagcgctgacgacggaagatttcgaacgcattctcaccgagccgaacgcatccgttaccgttcagtacaaagcgctgatggcgactgaaggcgtggacatcgagtttaccgaatccggcatcaaacgcattgccgaagcggcatggcaggtaaacgaaaccaccgaaaacatcggtgcgcgtcgtctgcataccgttctggaacgtctgatggaagatatctcctatgacgccagcgatctgaatggtcagagcataacaattgatgcggaatatgtgagcaaacatctggatgcgctggtcgcagatgaagatctgagtcgttttatcctataa

SEQ ID NO: 75271 - DNA, 930 bp, Citrobacter koseri
atgactgaacaacaacaaattagccgctcccaggcctggctggaaagtttacgaccgaaaacgctgccgctcgcgtttgcggcaatcatcgtcggtacagcgctggcatggtggcaagggtacttcgatcccctggttgcgctgctggcgttgatcaccgccgggctgctgcaaatcttatcgaaccttgccaacgattatggcgacgccgtcaaaggcagtgataagcctgaccgcatcgggccgctgcgcgggatgcaaaaaggggtgatcacccggcaggagatgaagcgagcgctgatcattaccgtggcgctgatttgcctctccggtctggcgctggtggctgtcgcatgtcatacgctggcggattttgtcggatttctggtgctgggcggcctgtcgattatcgccgcgattacctacaccgtcgggaaccgtccttacggctatattggtctgggcgacatttccgtgctggtgttcttcggctggctcagcgtaatgggcagctggtatctacaggcgcatacgctcattcctgcgcttatcttacctgctaccgcctgcggactgctggcgaccgccgtgctcaatatcaacaatctgcgcgatatcaacagcgataaagaaaacggtaaaaacacgctggtggtacgtttaggcgcggttaacgcacgtcgttatcacgcctgcctgttgatgggttcactggtctgcctggcgctgtttaacctgatttcactgcaaagcctgtggggatggctgttcatcctggccgcaccgttactgattaaacaggcgcgttatgtgatgcgtgaaatggaacccgctgcgatgcgcccgatgctggaacgcaccgttaaagccgcgctgttgactaacctgctgtttgtcgtcgggattttcttaagccagtgggcggtttaa

SEQ ID NO: 75272 - DNA, 486 bp, Citrobacter koseri
atgaaatacgatacttccgagctttgtgacatctaccaggaagatgtcaacgtcgtggaaccactgttctctaactttggagggcggtcgtcgtttggcggacaaatcatcacggtaaaatgtttcgaggacaacgggttgctctacgatctgctcgaacagaatggccgtggtcgcattctgctggtcgatggcggtggttctgtccgtcgcgcgctggtcgacgccgaactggcgcgtctggctacgcagaatgaatgggaagggctggtcatctacggcgcggtgcgtcaggtagacgacctggaagagctggatatcggcatccaggcgcttgccgcgattccggtaggcgccgcaggtgaaggaatcggggaaagcgacgtccgcgtcaattttggcggcgtgaccttcttctccggcgatcatctctacgccgacaataccgggataatcctctccgaagacccacttgatatcgagtga

SEQ ID NO: 75273 - DNA, 240 bp, Citrobacter koseri
atgtcattagaagtgtttgagaaactggaagcaaaagtacagcaggcgattgataccattacgcttttgcagatggaaatcgaagagctgaaagaaaagaacaacagtctggcgcaggatgtacagtctgctcagcatcagcgtgaagagctggagcgtgagaacaaccatctgaaagaacagcagagcgggtggcaggatcgtttgcaggcgctgctgggtcgtatggaagaagtctga

SEQ ID NO: 75274 - DNA, 846 bp, Citrobacter koseri
atgagtcaaacatcaaccttaaaaggccagtgcattgctgaatttctcggtactgggttgttgattttcttcggtgtgggttgtgtcgctgctcttaaagtagcaggtgctactttcggtcagtgggaaatcagtatcatctggggtctgggggtggcgatggctatctacctgacagcaggtgtctccggcgcacatttaaatccagccgtaacaatcgcactgtggctgtttgcctgtttcgacaaacgcaaagttgttccttttatcatttctcaagttgccggcgcgttttgcgcagcggcattagtttacgggctttactacaatcttttcgctgattttgaacaaacgcaccacatcgtccgtggcagtatcgaaagtgttgatctggctggcactttctcaacatatccaaatccacatatcaattttgtgcaagccttcgcggttgagatggtaattaccgctattctgatggggcttattctggcgctgaccgatgatggtaacggcgtgccgcgcggcccactggctcctctgctcattggtttactgatcgcagtaattggcgcttctatggggccgctgaccgggtttgcgatgaacccggcgcgtgacttcggcccgaaactgttcgcctggctcgctggctgggggaacgttgccttgactggcggtaaggatattccttacttcctggtgccgatgttcggcccgattgcgggcgccattctgggcgcattcgcctatcgtaaactgattggccgccatttgccgtgtgatacttgcgtggttgaagagaaggacaccaccactaccgcacaacaaaaagcttcgctgtaa

SEQ ID NO: 75275 - DNA, 1509 bp, Citrobacter koseri
atgactgagaaaaaatatatcgttgcgctcgaccagggcaccaccagttcccgcgccgtcgtgatggatcacgatgcgaatatcgttagcgtgtcgcaacgtgaatttgagcaaatctacccgaaagcaggctgggtagaacacgacccaatggaaatctgggccacccaaagctcaacgctggttgaagtgctggcgaaagcagacatcagttccgatcagatcgcagcaatcggtattactaaccagcgtgaaaccaccatcgtctgggaacgtgaaaccggcaaaccgatttataacgcgattgtctggcagtgccgccgtaccgccgaaatctgcgaacgcctgaagcgtgacggcatggaagattacatccgcaacaacaccggtctggtgattgacccgtacttctccggcaccaaagtgaagtggattctcgatcacgtagaaggctcccgtgagcgcgcacgtcgcggtgaactgctgttcggtacggtggatacctggcttatctggaaaatgacgcagggacgcgtacacgtcacggattacaccaacgcttcacgtaccatgctgttcaacatccataccctggactgggatgacaaaatgctggatgcgctggatatcccgcgcgccatgctgccggaagtgcgtcgttcttcagaagtgtacggccagacgaacatcgggggtaaaggcggcacgcgtattccaatcgccgggatcgccggtgaccagcaggcggcgctgttcggccagctgtgcgtcaaagaggggatggcaaaaaacacttacggcaccggctgctttatgctgatgaacaccggcgagaaagcggttaagtccgaaaacggacttttgaccaccatcgcctgtggcccgaccggcgaagtgaactatgcgctggaaggggcggtgtttatggctggcgcatccattcagtggctgcgtgatgagatgaaactcatcagcgacgcattcgactctgaatatttcgccaccaaagtgaaagacaccaacggcgtatacgttgtaccggcctttaccggtctgggcgcgccgtactgggacccgtatgcgcgcggcgccatcttcggtctgacccgtggcgtaaactccaaccacatcatccgtgcaacgctggaatcgatcgcttaccagacgcgcgacgtgctggaagcgatgcaggcagactccggtattcgcctgcacgccctgcgcgttgacggcggcgcggttgccaacaacttcctgatgcagttccagtcagacattcttggtacgcgcgttgagcgcccggaagtgcgcgaagtgacggcactgggtgcggcgtatctggcaggtctggcggtgggttactggcagaacctggatgagttgcaggaaaaagcggtcatcgagcgtgaattccgtccaggcatcgaaaccaccgagcgtaacttccgttacagcggctggaaaaaagcggtcaaacgcgccctggcgtgggaagaccacgaagagtaa

SEQ ID NO: 75276 - DNA, 1011 bp, Citrobacter koseri
atgagacgagaacttgccatcgaattttcccgcgtaacggaagcggcggcgctggctggctataaatggctgggacgcggcgacaaaaataccgctgacggcgcggcggtaaacgccatgcgtattatgctcagccaggtcaatattgacggcaccattgtcatcggcgaaggcgagattgatgaagcgcccatgctgtttatcggtgagaaagtcggcaccggccgtggcgatgcggtagatatcgccgtcgaccctatcgaaggcacccgtatgacggcgatgggccaggcgaacgcgctggcggttctggcggtcggcgataaaggctgtttcctcaacgcgccggatatgtacatggaaaaactgatcgtcgggccgggcgctaaaggatctatcgacctgaatctgccgctggcggacaacctgcgcaacatcgcagccgccctcagcaaaccactcagcgaactgacggttacgattctggccaaaccgcgtcatgacgcggtgattgcagagatgcagcagcttggcgtgcgcgtattcgccattcctgatggcgacgtggcggcctctattctgacctgtatgccggacagtgaagtggacgtgctgtacggcattggcggcgcgccggaaggcgttgtctccgcagcggtaatccgtgcgctggatggcgacatgcagggccgtctgctggcgcgtcacgacgtcaaaggcgacagcgaagagaaccgccgcattggcgagcaggagctggcacgctgtaaagctatgggcattgacgccggtaaagcgctgcgtctggacgaaatggcgcgcagcgataacgtcatcttctccgccaccgggatcaccaaaggcgatctgctggaggggattagccgcaaaggcaatatcgctaccaccgaaacgctgctgattcgcggcaaatcgcgcactatccgccgtattcagtccatccactatctggatcgcaaagacccggatgtgcaggcgcatatcctgtaa

SEQ ID NO: 75277 - DNA, 747 bp, Citrobacter koseri
atggcagattgggtaacaggaaaagtcacgaaggtacagtactggaccgacgccctgtttagtctgaccgttcacgcccccgttcatcccttcaccgcaggccagtttaccaaactcggactggagatcgatggcgaacgcgtacaacgcgcctattcctatgtgaatgcgcccgataatcccgatttagagttttacctggtgacggttcccgaaggcaaactcagcccacgtctggcggcgcttaaacctggcgatgaagtacaggtggtgagtgaagcggcggggttctttgttctggatgaagtgcctgactgcgacaccctgtggatgctggcgaccggaacggccattggcccttatttgtcgattctgcaactcggtaaagacctggagcgctttaacaacctggtactggtgcatgccgcgcgttacgccgctgatttaagttacctgccgttaatgctggaattgcaaaagcgctacgaaggcaagctgcgcattcaaactgtcgtcagtcgggaaaccatcgcaggctcgcttaccgggcgcgtccccgcgctgattgaaagcggcgcgctggaagcggcggtcggtttaccgatgaacaccgagaccagccatgtgatgctgtgcggaaatccgcagatggtgcgcgatacgcagcagctgctgaaggagacccggcacatgaccaaacacctgcgtcgtcgtcctgggcacatgaccgctgagcactactggtaa

SEQ ID NO: 75278 - DNA, 447 bp, Citrobacter koseri
atgaccatacagcagtggttattctcatttaaagggcgtattggacgccgtgatttctggatctggctcggtttctggtttgtcggcatgctggtgctgttttcgctggcgagcaagaatttactcgatatccagacggcggcattttgtctggtgtgtctgctctggcccacggcggcggtcatggttaagcgtctgcatgaccgggggcgctccggcctgtgggcgttattgatgattctggcgtggatgctgctggccggaaattgggtgatgttgccgggaatgtggcagtgggtcgtggggcgctttgtcccgacgctcattctggtcatgatgtttatcgatctgggggcgtttgtcggtactcagggcgagaataagttcggcaaagaaacgcaggatgtgaagtttaaagcagagcctcaggcaggcgataaaccgtag

SEQ ID NO: 75279 - DNA, 597 bp, Citrobacter koseri
atgaagccagggtgtacactgtttttattattgttttccgccataactgcgagcacaacggtgctggcggaggcatcgccgtctgcgacgaccgcgccctacctgctggctggcgcgccgacgtttgatctctccatcagccagtttcgcgaaaactttaatcagcaaaatccccggcttccactgaacgaatttcgtgctatcgacagcagccgcgacagggcgaacctgacccgcgccgccagcaagatcaatgaaaatctgtacgcctcaacggcgctggagcgcggtacgttaaaaatcaaaagcatgcagattacctggcttcccattcaggggcccgagcaaaaagccgccaaagccaaagcgcaggaatacatggcggcggtgatccgcaccgtcgccccgcttctgacaaaagagcaaagccagcaaaaactgcaaaaattactcacagcgggcaagaataagcactactacgccgaaacggaaggcgcgattcgctatgttgtcgcagacaacggggaaaaagggctgaccttcgctgttgaaccgattaagctagcgctatcggagaatctggaagggctgaattaa

SEQ ID NO: 75280 - DNA, 768 bp, Citrobacter koseri
atgcgacatcctttagtgatgggtaactggaaactgaacggcagccgccacatggtaaacgagctggtggctaacctgcgtaaagaactggctggagttgctggctgtgcagttgcgattgcaccgccggaaatgtatatcgacatggcgaaacacgccgctgccggtagccacatcattctgggcgcgcagaacgttgaccagaacctgtctggcgcattcaccggtgaaacttctgctgaaatgctgaaggatatcggcgcgcagtacatcatcatcggccactctgagcgtcgtacttaccacaaagagtctgacgagctgatcgcgaagaaattcgccgtgctgaaagagcagggtctgactccggttctgtgcatcggtgaaaccgaagcagaaaacgaagccggcaaaactgaagaagtctgtgctcgtcagatcgacgcggtactgaaaactcagggcgctgcggcgtttgaaggcgtggttatcgcttacgaacctgtatgggcgatcggtactggcaaatccgccactccggcgcaggcgcaggctgttcacaaattcatccgtgaccacatcgccaaagctgacgcgaaaatcgctgagcaagtgatcatccagtacggcggttccgtaaacgcagctaacgcggcagaactgttcgctcagccggacatcgacggcgcgctggttggcggtgcttccctgaaagctgacgcgttcgcggtgatcgttaaagcagcggaagcggctaaacaagcttaa

SEQ ID NO: 75281 - DNA, 1305 bp, Citrobacter koseri
atgtcgctctggcttacacaccctctgttcattccttcgctggtggtcggcgtgaccattctgctctgggcaacctcgctgttgccggagtttattaccgctctgctgttctttaccgtggcgatggtggcgaagatcgcgccgccggacgtcatttttggcggttttgcctcgtcggctttctggctggtttttagcggttttgtgctgggggtggcgattcgcaaaacagggctggcagacagggcggcgcgcgccttatccgccagactgaccgactcatggccgctgatggtggcgagcgtggtgctgctcagctatgcgctggcgtttgtgatgccgtccaatatggggcgtatcgcgctgctgatgcccattgtcgcggcgatggcgaaacgtgccgggattgccgatggcacgcgcgcctggtacggactggcgcttgcggtgggctttggaaccttccagctctccgcgaccatcctgcctgctaatgtacctaacctggtgatgagcggggcggcggaaggctcgtacggcatccacctgaactatctgccgtatcttctgctgcatacgcctgttctgggctggttgaaaggcgcgctgttaatcgtcctgatttgttggctgtttcccggtaaaccgcatgcgcctcgcgacctgacgccgcctgcgccgatgagccgtgcggagaaacggctggcgtggatgctggcggtggtgctggcgatgtgggtcagcgaaagctggcacggtattggcccggcgtggaccgggctggcggcggcggtgatcacgctgttgccacgcgtagggtttatcaacggggaagagttttccagcggcgtgaatatccgcacctgtatttatgtggcaggcattctggggctggcgatcaccgtgacgcaaaccggcattggcaatgcggtgggcgaggcgctgctgcatgtcatgccgctggacccggaaaagcccttcaccagtttcctggcgctgaccggcattaccaccgcgctgaattttattatgacggcgaacggcgttccggcgctgtataccacgctggcgcagagtttttccgacgcaaccggttttccgctgctgtcggtgattatgattcaggtattggggtactccacgccgctgttgccgtatcaggcgtcgccgattgtggtggcgatggcattagggaaagtcccggcaaaaccaggcatgacgctgtgtctggcactggcgctggcaacgtatctggtgctgttgccgctggattacgtgtggtttagtttactggggcgtttgtaa

SEQ ID NO: 75282 - DNA, 750 bp, Citrobacter koseri
atgaaaaaaacaggttattttttgctggcggttgtgattgttgccgccgtcgcgggcattggctactggaagctggccgctaatccgaacgcattgcgggatattgttctgcaacaatgcgtaccgaaccaactgcaacagcaaaatcctgcgccatgcgccgaagtgaaaccggatgccgggtatgtcgtgtttaaagatcgtaatggcccgttgcagtatctgctgatgccgacgtaccgcatcaacggtacggaaagcccgctgctggtggagccctacacgccgaacttcttctggctagcctggcaggcgcgcagctttatgagccaaaagtacggcaaagatattccagacagcgccatttcgctggcgattaactcacgctccgggcggacgcaaaaccactttcatatccacatctcctgcctgcgccctgatgtgcgagcgcaactggatgataatctggcgaaagtgagtacccgctggctgccactgccgggcggattgcgcgggaatgaatatctggcgcgtcgggtgacggaaagcgagctggcgcaacgcagcccgttcatgatgctggcggaagaggtgccggatgcgcgtgagcacatgggcagctatgcgctggcggtggtacgccagagcgacgactcttttgttttgctggcgacgcagcgcaacctgctggcgtttaacctcgcttccgctgaggaaattcaggatcatcaatgtgagattttgcagtaa

SEQ ID NO: 75283 - DNA, 990 bp, Citrobacter koseri
atgaataaatggggcgtggggttaacattattgctggcatcgaccagcgttctggcgaaggatattcagttacttaacgtgtcttacgatccaacgcgcgagctgtacgatcagtacaacaaagcgtttagcgcgcactggaaacaagaaacgggcgacaacgtggtgatccgtcagtcacatggcggttctggtaagcaggcgacgtcagtcattaacggtattgaggccgatgtggtgacgctggcgctggcttatgacgttgatgccattgcagagcgcggccgtatcgacaaaaactggatcaaacgtctgccggacaactccgcgccgtacacgtccaccatcgtcttcctggtacgtaaaggcaatccgaagcaaatccatgactggaacgacctggtaaaaccgggcgtgtcggtgattacgccgaacccgaaaagctctggcggcgcacgctggaactatctggctgcgtggggatacgccctgcaccacaacaacaacgatcaggccaaagcgcaggacttcgtaaaagcgttatttaagaacgtggaagtgctggattctggcgcgcgcggttcaaccaacacctttgttgagcgtgggattggcgacgtgctgatcgcctgggagaacgaagcgctgttggcgacgaacgaactgggcaaagataaattcgaaatcgtgacgccgagcgaatcaattctcgcagaaccgaccgtctccgtggtggataaagtcgtggagaaaaaagggacgcaagccgtggcggaagcctatctgaagtatctctactcgccggaagggcaggaaattgcggcgaaaaacttctatcgcccacgcgaccctgaagtggcgaagaaatatgaaaatgcatttccgaagctgaaactcttcaccattgacgaggagtttggcgggtgggcgaaagcgcagaaagagcatttctctaatggcggtacgttcgaccaaatcagcaaacgctaa

SEQ ID NO: 75284 - DNA, 963 bp, Citrobacter koseri
atgattaagaaaatcggtgtgttgacaagcggcggtgatgcgcctggcatgaacgcagcaatccgtggtgttgtacgcgcagcgttgacggaaggactggaagtaatgggtatttatgatggctacctgggtctgtatgaagaccgtatggttcagctcgaccgttacagcgtgtccgacatgatcaaccgtggcggtactttcctcggttccgcgcgcttcccggaattccgcgatgaaaatgttcgcgcagtggctatcgaaaacctgaaaaaacgtggcatcgacgcgctggttgttatcggcggtgacggttcctatatgggtgcaaaacgtctgactgaaatgggcttcccgtgcatcggtctgccgggcacgatcgacaacgacatcaaaggcactgactacaccatcggttatttcaccgcgctgggtacggtagtggaagcgattgaccgtctgcgtgacacctcttcctctcaccagcgtatttccatcgttgaagtgatggggcgttactgcggcgacctgaccctggcggcggctatcgctgggggctgtgagtttgttgtggtgccggaagtggaattcagccgtgacgatctggttgcggaaatcaaagcgggcatcgcgaaaggtaaaaaacacgcgattgtcgcgatcaccgaacatatgtgtgacgttgatgaactggcgcactacatcgagaaagagactggccgtgaaacgcgtgcgaccgtactgggtcacatccagcgtggcggctctccggtgccttacgaccgtattctggcttcccgtatgggctcatatgccattgaactgctgctggaaggttttggcggacgttgtgtgggcatccagaacgaacaactggttcaccatgacatcatcgacgctatcgaaaacatgaagcgtccgttcaaaggtgactggctggattgcgctaaaaagctgtactga

SEQ ID NO: 75285 - DNA, 903 bp, Citrobacter koseri
atgaatcaaacctatgggcgactggtcagccgggcggcaattgccgcgacagtgatggcgtcactgttacttttgatcaaaatttttgcgtggtggtacaccgggtcggtgagtattctggctgcgttggttgactcgctggtggatattgccgcgtcgctgactaacctgttagtggtgcgctattcgctgcaaccggcggatgatgaacacacctttggacacggcaaagcggagtcgctggcggcgctggcgcagagcatgtttatttccggctcggcgctgtttctgtttttgaccggtattcagcatctgattacccctacgccaatgaacgaaccgggcgtcggggtcgtggtgacgcttatcgccctggtttgtacgatcattctggtcacgtttcagcgttgggttgtgcgcaagacgcaaagtcaggcagtacgggcagatatgcttcattatcagtctgatgttatgatgaacggagcgattctcgttgcgcttgggctggcctggtatggctggcatcgcgcggacgccttgtttgcgttgggaatcggcatctatattctatacagcgcactacgtatgggatatgaggcagtgcagtcgttactggatcgcgcgctgcccgatgaggaacgtcaggaaattattgatatcgtgacatcgtggccgggcgtcaacggtgctcacgatcttcgcacgcggcagtcagggccgacccgctttattcagattcatttggaaatggaagataatctgccgctcgttcaggcgcatctggtggctgaacaggtagagcaggcgattttgcggcgttttccgggttcggatgtcattatccaccaggacccctgttcagtcgtacccagggaaggcaagaggtttgagctttcgtaa

SEQ ID NO: 75286 - DNA, 501 bp, Citrobacter koseri
atgcgcaaagttaccgctgccgtcatggcctcaacgctggcactcagtcctttaagccacgctgctgaagtcgttacaggcgataactggcatcaaggtgaaggacttacgcagcgcagtacgcagagccatatgttcgacggcataagtttaaccgaacatcagcgtcaacagatgcgagatctgatgcagcaggcaagacacgaacagcctcctgttaatgttagcgaaatggagacaatgcatcgccttgtcatcgcagaaaaatttgatgaaaacgctgtgcgcgctcaggcagaaaaaatggcgcaagaacaggttgcccgtcaggtcgaaatggccagggttcgcaaccagatgtatcgcctgttaacgccggagcagcaagcggttttaaatgagaagcatcaacaacgaatggagcaactgcgcgatgtggcgcaatggcaaaacggctcctcgttgaagttattgagtagtagcaactcacgttcccagtaa

SEQ ID NO: 75287 - DNA, 699 bp, Citrobacter koseri
atgaataaaatcctgttagttgatgatgaccgagagctaacttccctgttaaaggagctgctcgaaatggaaggcttcaatgtgctggttgcccatgacggggagcaggcgcttgagcttctggacgacagcattgatttacttttgctcgatgtcatgatgccgaagaaaaacggtattgatacgttgaaagcgcttcgccagacacaccagacccctgtcattatgctgaccgcgcgcggcagcgaactggatcgcgtactcggccttgagctgggcgcggatgattatttacctaaaccgtttaacgaccgcgaactggtcgcgcgtatccgtgcgattctgcgccgctcacactggagcgaacagcagcagaataacgacaacggctcgccgacgctggaagtggatgcgttaagcctcaatccgggtcgccaggaggccagcttcgatggtcaaaccctggagttaaccggcaccgaatttaccctgctctatttgctggcgcagcatctcggccaggtggtttcgcgtgaacatttgagccaggaagtgctgggtaaacgcctgacgccgttcgaccgcgcaatcgacatgcatatctccaacctgcgtcgtaagctgccggagcgtaaagacgggcacccgtggtttaaaaccctgcgtggtcgcggttatttgatggtttccgcttcatga

SEQ ID NO: 75288 - DNA, 1374 bp, Citrobacter koseri
atgataggcagtttaaccgcgcgcatctttgccatcttctggttgacgctggcgctggtgctaatgttggtattgatgttacccaagctcgactcacgccagatgaccgagctactggacagcgaacagcgccaggggttgatgattgagcaacatgtagaagctgaactcgcgaacgatccacccaacgatttaatgtggtggcgtcgcctgttccgtgcgatcgacaagtgggcgccgccaggacagcggttattgcttgtgaccactgaaggacgcgtgatcggcgcagaacgcagcgaaatgcagatcattcgtaactttattggtcaggcggataacgccgatcatccgcagaagaagaaatatggccgcgttgagatggtaggcccgttctctgtcagagacggggaagataactaccagctttatctgattcgaccggccagcagctcccaatccgattttattaatctgctgtttgaccgcccgctcttgttgctgatcgtcaccatgctggtcagttcgcctctgttgctttggctggcctggagcctggcgaaaccggcgcgtaagttgaaaaacgcggcggacgaagtggctcagggtaatctgcgacaacatccagaactggaagcaggcccgcaggaatttcttgcggctggcgccagctttaaccagatggtaactgcgctggaacgtatgatgaccacgcagcagcgtctgctgtcggatatctcgcacgagctacgcactccgcttacgcgtctgcaactgggcaccgcgctgctgcgtcgccgtagcggcgagagtaaagagctggagcgcatcgagaccgaagcgcagcggctggacagcatgatcaacgacctgttggtgatgtcgcgtaatcaacagaaaaacgcgctggtcagcgaaacgatgaaagccaatcatctgtggggagacgtgctggataacgccgccttcgaagccgagcagatgggcaaatcgttaacggtgaacttcccgccggggccgtggccgttatacggcaatcctagcaccctggaaagcgcgctggagaacattgtccgtaacgccctgcgctattcgcacacgaagattgaagtcggcttcgcggtggataaagacggcattacgataacggttgatgacgatggcccgggcgttagccctgaagaccgcgaacagatcttccgcccgttttatcgtaccgatgaagcgcgcgatcgggagtccggcggaacagggttggggctggccatcgttgagaccgcgatccagcagcatcgcggttgggtgaaagccgaagacagcccgctgggcggcttacggctggtgatctggctgccgttgtataagcgttcttaa

SEQ ID NO: 75289 - DNA, 672 bp, Citrobacter koseri
atgcgatatccggtcgaggtgtttacgggcaaaattcgggactatgcgggaagtcgtcccagcgccattgcgaaaatccaggttgatggcgagctgatgcttaacgatctgggccttgccggtgatgagcaggcagagacgaaaattcacggcgggcccgatcgcgcgctgtgccattatccccgtgaacactatctgcactgggcgcgtcaattcccggcgcaggcggatctgtttgtcgcgcccgcgtttggcgaaaacctttcgaccgacggtctgaccgagcaaaatgtttttatcggcgatatttttcagtggggagaggcgctgattcaggtgactcagccacgttcgccgtgctttaagctcaacttccatttcggcattagcgatatggcgacgcaaatgcagaacgccgggaaaaccggctggctgtacagcgttatcgcgccggggcaggtatcggcggatgcgccgttaattctggcgtcgcgcgtcagcgatgtgagcgtacaggaggcgattgcgatagcctggcatatgccgtttgacgacggccagtatcatcgtttgctgtcggcggcggggttatcgaaaagctggaccagaacgatgcagaagcgccgtttgagcggcaaaattgaagatcagtcacgacgtttacgtggatga

SEQ ID NO: 75290 - DNA, 891 bp, Citrobacter koseri
gtgacagtacaatcgcagtttgctggcgtctggtgtccttccattacgccgatggacaatgacggaaaagtcgatctcaacggcctgagccagcatctcaaacgccttaccgaggccaacattgatgttattttgctgatgggcagcattggcgaatttgcgtctttcacgctggaagagcggctgatgctgatccgcgaggcccgcgcgatgagttcgctgaagatggttgccaatgtctcctccacctgcaccagcgacatcctgcttatggcgcaggaagcgtaccgcgtcgggtacgatgcggtgatgattctgccgccgtattactacgggcagacgtcgaagcagcttctgagctacttccgccagcttggtaacgccctgagcggcaaatggtttgcctacaatttcccggcacgcaccggctgcgatttaacgccggatctggtggcgacccttgccgccgaattcccgaattttgccgggattaaagataccgtcgactgccagtcccatacccgcagcatgattcagaccacccgcgcggtacgcgacgattttgccgtgctctccggctatgacgagtattacatccccaacctgctggcgggcggcgcaggcattatttccggcttaaacaacgtgatgccggagctgtttgtcagcgcgcgggaggcgtttaagcagggtgatttgcaaacgttgcgcgatatccaggagaaaatcggcacgtttatgtccatttacgcgattggcgaggattttgtaaccacgattaaaaccgtggtatcgcgtaagttcggctattgtaccggcgtgtcgcgtaatgcgggaggagaactgaacgagcacgagcgtcgcacaattgatgaggtgtttggccgttaa

SEQ ID NO: 75291 - DNA, 984 bp, Citrobacter koseri
atgcagattaaacgcacgatagaaaaagtcccgggtgggatgatgctcgttccgttgttcctcggcgcgctatgccacaccttcgcgcccggcgcagggaaatacttcggctcattcacaaacggtatgatcaccggtacggtgccgattctggcggtctggttcttttgtatgggcgcgtcgatcaaactgagcgccacaggcaccgtgctgcgtaaatccgggacgctggtggtgaccaaaattgcggttgcctgggtggtggccgctattgcgtcacgcgttatcccggaacatggggtggaagcgggcttcttcgccgggctgtcgacgctggcgctggtggcctctatggacatgaccaacggcgggctgtatgcctccatcatgcagcagtacggcaccaaagaagaggccggggcatttgtcctgatgtcgctggagtcagggccgctgatgacgatggttattctgggaaccgccgggattgcctcgtttgaaccgcatgtatttgtgggggcggtattgccgttcctgattggtttcgcgctggggaatctcgacccggaactgcgggaattcttcagcaaagcggtacagacgctgattccgttcttcgccttcgcgctgggcaacaccattgatttgagcgtgattgcacagacgggcgtgctggggattctactgggtgtggcggtcattattatcaccggcatcccgttaatcatcgctgacaagtttatcggcggcggtgacggtacggcaggtattgccgcctcaagttctgcgggcgccgcagtagccacgcccgtgctgatcgcagagatggttccggcgtttaaaccgatggcgcccgccgcgacctcgctggttgccacatcggttatcgtaacttcgattctggtgccgatcattacctcagtctggtcgcggaaggtgaaggccagagcggcggaaatcgatattcgcggtacggtgaaataa

SEQ ID NO: 75292 - DNA, 621 bp, Citrobacter koseri
atgagttatacactgccatccctgccgtacgcttatgatgcgctggaaccgcacttcgataagcagacgatggaaatccaccataccaaacaccatcaaacttatgtcaacaacgctaacgcggcgctggaaaatctacctgaattcgcgaacctgccggttgaagaactgatcaccaaactggatcagcttccggcggacaaaaaaaccgtactgcgcaacaatgcgggcggccacgctaaccatagcctgttctggaaaggcctgaaaaaaggcaccgctttgcagggcgacctgaaagcggctatcgaacgtgatttcggttccgttgataacttcaaagcggagtttgaaaaagcggcggcaacgcgtttcggttccggttgggcctggctggtgttgcagggcgacaaactggcggttgtctctaccgctaaccaggactccccgctgatgggcgaggccatttccggcgtttccggtttcccaatcctgggtctggacgtatgggaacacgcttactacctgaaattccagaaccgtcgcccggactacatcaaagagttctggaacgtggtgaactgggacgaagctgctgcgcgtttcgcggcgaaaaaataa

SEQ ID NO: 75293 - DNA, 1035 bp, Citrobacter koseri
atgagtaacgcgattacgatgggtatcttttggcatttaataggtgcggccagtgcagcctgtttttatgccccgttcaaacaagttaaacaatggtcctgggaaaccatgtggtcaatcggtgggattgtctcctggcttatcctgccctggaccatcagcgccctgctgctcccggatttctgggcctattacagttccttcaacctctccaccctgttgcccgtatttctgttcggcgcaatgtggggcatcggtaatattaactacggcctgaccatgcgctatctcggcatgtcgatggggatcggcatcgcgattggtattacgctgatcgtcggcaccctgatgacccccatcatcaatggaaactttgatgtgctgatcaataccgaaggcggacgaatgacgctgctgggcgtcctggtggcgctgatcggcgttggcatcgtcacccgcgccgggcagttaaaagagcgcaaaatggggatcaccgccgaggagttcaacctgaaaaaaggtctgctgctggcagtgatgtgcggtattttctccgccgggatgtcctttgcgatgaacgccgccaaaccgatgcatgaagccgctgccgcgctcggcgtcgatccgctgtatgtcgctctgccaagctacgtggtcatcatgggcggcggcgcgctgatcaacctgggtttctgtttcgttcgtctggcaaaagtgaaaaacttgtcgataaaagccgacttctcgctggcaaaatcgatgatcatcaccaatatcctgctgtccgcgctgggtggcctgatgtggtatttgcagttctttttctacgcctggggccacgctcgcattccgccgcagtatgactacatcagctggatgctgcacatgagcttctacgtgctgtgcggtgggattgtgggtctggtgctaaaagagtggaaaaacgcgggtcgtcgtcctgtcagcgttctcagtctgggttgtgtggtcattattattgccgccaacatcgtcggcatgggaatggcaagctaa

SEQ ID NO: 75294 - DNA, 849 bp, Citrobacter koseri
gtggcaaatcagttagtccttctgaaaaaagacttttttgcgaatgacggccaggctgtcgcggttgccgatcgctatccgcaaaatgtgttcgcggaacatacacacgagttttgtgaactggtgttggtctggcgcggcaacggtttgcatgtgctcaacgatcgcccttaccgcatcacgcgtggcgatctgttttatattcgcgccgaggacagacactcctacacctccgttaacgatttggttttgcagaatattatttactgcccggagcggttgaccctgaatcttggctgggaaagcgccattccgggctttaacggcagtgaacggcgcccgcactggcggctgggcagcgtggggatgaatcaggcgcggcaggttatcagccagcttgaacatgagagcaatcagggcgatccgctggcgaatgagatggcggagctgctatttggtcagctggtgatgacgctgaaaagacaccgctatgctaccgatgatctcccgaccagagcgagcgaaacgttgctggataaattgattaccgcgctggccggcagcctggaacgcccctttgcgctggatgcgttttgcgaccaggagcagtgcagcgagcgggtgctgcgacagcagtttcgctcacagaccgggatgactatcaaccagtatcttcgccagatccgcatctgccatgcgcagtatttgcttcagcacagccgcctgatgatcagtgagatttcaatgcagtgcggctttgaggacagtaactacttttcggtggtgtttacgcgggaaaccgggatgacgcccagccagtggcgtcatcacagtacgcaaaacgattag

SEQ ID NO: 75295 - DNA, 837 bp, Citrobacter koseri
atgaccgtactgcatagcgtggatttttttccgtcaggtaaagcgcccgtggccattgaaccccggcttcctcagtccgcttttcctgaacatcatcatgattttcatgagattgtgattgttgaacatggcactggcattcatgtgttcaatgggcagccctacaccattagcggcggtacggtctgctttgttcgcgatcatgacagacatctgtatgaacacaccgacaacctgtgtctgacgaatgtgctctatcgctcgccggacgcgtttcagtttctggcagggctgaaccagctcttgccgcaggaacaggatgggcagtacccgtcacactggcgcgtgaatcagagcgcgttacagcaggtgcggcaactggtggcgcagatggaaaacgccggagacgagatggacacgcctgcggtcgccaaccgtgaaattctgtttatgcagttgctggtgctgctgcgtaaaagcagcctgatggaaggggcggccaataacgatgcgcggctgaatcagttgctggcctggctggaggatcattttgctgaagaggtgtgctgggaatcgatagccgacaagttttcgctctcgctgcgcacgctgcaccgtcagctcaaacaacagaccggcctgacgccgcagcgctatcttaaccgtctgcggcttatcaaggctcgccatctgctgcgtcacagtgatgaaagcgtcacagatatcgcgtatcgctgcggttttggcgacagtaaccatttttcgacgctgtttcgccgggaatttgactggtcgcccagggatattcgccaggggcgggacgcattgctacagtaa

SEQ ID NO: 75296 - DNA, 1470 bp, Citrobacter koseri
atgacttttcgccattgtgtcgctgtcgatctcggggcatccagcgggcgcgtaatgctggcgcgttacgacagtgaacaacacgccctgacgctgcgtgaaatccaccgtttcgcgaactgtttgcaaaaaacagacgggttcgacgcctgggatatcgacagcctggaaaatgaaattcgccttggactggagaaagtctgcgatgaaggtatccgtattgacagcatcggcattgatacctggggcgtggactatgtgctgctcgacaagcacggccagcgcgtcggtctgcccgtatcttatcgcgacaaccgtaccacgggggtgatgcagcaggcgctggcgcagctcggcaagcatgatatctatcgccgcagcggcattcagtttctgccgttcaatacgctgtatcagctccgcgcgctggttgaacaacagcctgaacttatcccgcaggtggcgcatgccctgctgatccccgactatttcagtttccgcctgacgggcgaaatgaactgggaatacaccaacgccaccaccacgcagctcgtcaatatcaacagcgatgactgggacgataccctgttggactggaccggcgccaacaaagcctggtttggcagacctacccatccgggcaacgtgatcggctactggatctgcccacagaaaaatcaaattccggtggtcgccgtcgccagtcacgacaccgccagcgcagtgatcgcctctccgctggccgataaaaacagcgcttatctctcttccggcacctggtcgttgatgggcttcgagagcagaacgccttacaccgatgacgcggcgctggcggcgaacatcaccaatgaaggcggcgcagaaggccgataccgggtgctgaaaaacatcatggggctctggctgcttcagcgcgtactgaaagagcgccagattaccgacctgcccgcgctgatcgccgagacccagtcgcttccggcctgccgtttcctgataaacccgaatgacgatcgctttatcaaccccgccgatatgagcgcggagattcaggcggcctgccgtgaatccggccagccggaacccacccgtaacgccgaactggcacgctgcattttcgacagtctggcgctgctgtatgccgatgtgttgcaggagctggcgaacctgcgcggtgaagcctttagccagctgcacatcgttggaggaggttgccagaacgccctgctgaaccagctgtgcgccgatgcctgcggcattcacgtgatggccgggccgattgaggcttccaccctcggcaatatcggcatccagctcatgacgctggacgaactgaacaacgttgacgacttccgtcaggtggtgagaaccaactacgacctgacgacctttaccccaaatcctgacagtgaaattgcccgccacgttgcgcagtttcaatcaaaacgacagacaaaggagctttgcgcatga

SEQ ID NO: 75297 - DNA, 1260 bp, Citrobacter koseri
atgaccactcaacttgaacaagcctgggaactggcgaaacaacgttttgctgcggtaggtattgatgtcgaggaggcgttacgccagctcgatcgtctgccggtatcaatgcactgctggcagggcgatgacgtcgccggattcgaaaacccggaaggatcgctcaccggcggtattcaggccaccggtaactatcccggtaaagcgcgcagcgccagcgagctgcgcgccgacctggaacaggcgctaagcctgatcccggggccaaaacgcctgaacttacacgcaatctatctggagtctgacacgccggtgtcccgcgaccagatcaaaccggagcacttcaaaaactgggtggaatgggcaaaagcgaaccagttagggctggacttcaacccctcctgcttttctcacccgctgagcgctgacggcttcaccctggcgcacgcggacgacaacattcgccagttctggattgaccactgcaaggccagccgccgcgtatccgcgtacttcggtgagcaactgggcacgccgtcggtgatgaacatctggatcccggatggcatgaaagacatcaccgttgaccgcttagcgccgcgccaacgcctgctggaggcgctggacgaggtgatcagcgaaaaactgaatccggcgcatcacatcgacgccgtggaaagcaaactgttcggtattggcgcggaaagctataccgtcggctccaacgagttctacatgggctacgccaccagccgccagaccgcgctgtgcctcgacgcgggccacttccatccgaccgaagtgatttccgacaagatttccgccgccatgctgtatgtgccgcgcctgctgctgcacgtcagccgcccggtacgctgggacagcgaccacgtcgtgctgctggatgatgaaacccaggcaattgccagcgaaatcgtgcgtcacaacctgtttgaccgcgtgcatatcggcctcgatttcttcgatgcctccatcaaccgtatcgccgcgtgggttatcggcacgcgcaatatgaagaaagcgctgctgcgcgcgctgctggaaccaaccgggcaactgcgtcagttagaagccagcggcgattacaccgcccgcctggcgctgctggaagagcagaaatccctgccgtggcaagccgtctgggaaatgtattgccagcgtcacgacacgccagccggcagccagtggctggaaagcgtccgtgcctatgaaaaagagattctgagcaaacgtagctaa

SEQ ID NO: 75298 - DNA, 828 bp, Citrobacter koseri
atgcagaacattacccactcctggtttgtccagggaatgatcaaagccacctccgacgcctggctgaagggctgggacgaacgcaacggcggcaacctgacgttgcgtctggatgaggcggatatcgcgccgtttaccgacgatttccaccaggagccgcgctatatcgcgctgagtcagccaatgccgctgctggcgaacacgccgtttatcgtcaccggctccggcaaattcttccgcaacgtacagctcgatccggcagcgaatttaggcgtggtgaaagtggacagcgacggcgcgggctaccacattctgtgggggctgaatcatgaggcggttccaacctccgagctgccggctcacttcctctcccactgcgagcgcattaacgccaccgacggcaaagaccgcgtgattatgcattgccacgccaccaacctgatcgcgctgacctacgtgctggaaaacaacacgccgcttttcacccgcaaactgtgggaaggcagcaccgagtgcctggtggtgttcccggacggcgtcggcattctgccgtggatggtgccgggcactgatgagatcggtcaggccaccgcgcaggaaatgcagaagcattcgctggtgctgtggcccttccacggcgtgttcggcagcggcccgacgctggatgaaacattcggcctgatcgataccgccgagaagtctgcggaggtgctggtcaaaatctattcaatgggcggtatgaagcaaaccatcacgcgtgaagaactggtagcgcttggcaaacgctttggcgtgactccgcttgccagcgcattagcgttgtactga

SEQ ID NO: 75299 - DNA, 1149 bp, Citrobacter koseri
atgagcttcatgttggcacttcccaaaattagcctgcatggcgcaggcgcaatcggcgatatggttaacctcgtcgcgaacaagcaatggggtaaagcgctggtcgtcactgacgggcaactggtaaaactgggcctgctggacagcctgtttgccgcgcttgacgcgcatcagatgtcgtaccaccttttcgacgaggttttcccgaaccccactgaagaactggtgcaaaaagggtatgcggcatatcaggacgcgcagtgtgattacatcatcgccttcggcggcggcagcccgatcgataccgccaaagcggtcaaaattctgacggcgaatcctggcccctctaccgcctattcaggcgtcggcaaagtcaaaaacgcgggcgttccactggtagcgattaataccaccgccggtacggcagcggaaatgaccagcaatgccgtcattatcgactccgcgcgccaggtcaaagaggtcatcatcgacccgaatatcatccctgatatcgcggtggacgacgccagcgttatgctggacatcccgccatccgtcactgccgccaccggcatggatgcgctgacccacgccattgaggcctatgtctcggttggcgcgcatccgcttaccgacgccaacgcgctggaagccattcggctgattaacctgtggctgccgaaagcggttgatgacggccacaacctcgaagcgcgtgaacagatggcgtttggccagtatctggcaggtatggcgttcaacagcgctggccttggtctggtacacgcgctggcgcatcagccgggcgccacgcacaacctgccgcacggcgtctgtaacgccatcctgctgccgatcattgagaactttaaccgcccgaacgcggtcgcgcgttttgcccgcgtcgcccaggcgatgggcgtcgatactcaaggtatgagcattgaggcggcgagtatggaagcgatcaatgcaatccgcgcattgagcaaacgcgtcggcattcctgaaggtttcagcacattgggcgtcacgaaagacgatattgaaggctggctggacaaagcgctggcagatccgtgcgcgccgtgcaatccacgcaccgccagccgcgatgatgtccgcgagttgtatctggaggcgctatga

SEQ ID NO: 75300 - DNA, 315 bp, Citrobacter koseri
atgatccgcaaagcgtttgtgatgcaggtaaattccgacgcacacgaggagtatcagcgtcgccataatcccatctggccggagctggagagcgtattgaaagcgcatggcgcgcatcactatgcgatttacctcgataaagaacgcaacctgttgttcgcgaccgtcgagattgaatcggaagagcgctggaatgccatcgccagtaccgacgtgtgccagcgttggtggaagcatatgcgcgacgtgatgcctgccaacccggataacagcccggtgagcgcggagctgaaagaagtgttttacctggcgtag

SEQ ID NO: 75301 - DNA, 549 bp, Citrobacter koseri
atgacacagcccattagcgtgatcgcgaaaagcctggtgcgcgaacgtcagcgtaccggcctgtcgctggcggaaatcgcccggcgtgcggggattgcgaaatctaccctgtcgcaactggaagcgggcaatggaaatcctagcctggaaacgctctgggcgctttgtgtggccctggatattccctttgcacgtctgctggagccgcaggcgcaaaaaacgcaggtgattcgtcgcggagaagggacaaaagtggtggcggaacaggcccactatcaggctattttactggctgcctgtccgccaggggcgcggcgcgatatctacctgctgctgacgcagccgggggcggatcgtatttcacatccacatccgccgggatcggtggagcatattattgtgacgcaggggaaagcgcttgtcgggctgacagaggcgccggaagagttaggcgagggcgattatatttgttatcccgccgatcaggagcacatttttaaagcgctggaagcggatacgcaggcgatcctggtggccgagcaaaattaa

SEQ ID NO: 75302 - DNA, 660 bp, Citrobacter koseri
atgaaacatcacctctcatgtctcagcggagacacgataaaagcgatatttttagtgtgcctggccgttggcgtcgtcgggatgtcctacggatcgctggcgatggcctacggcttcccgatttgggtgccgtttgtactctccatttttgtcctggcgggggcgtccgaatttatgtttatcggcattgtcgccagcggcgggaacccactggccgccgccgctgccggtttgctggtgaatgcccgccatattccattcggcgtaacggtacgtgaactggtaggcacccgcgccgccagctttctgggctgccatatcatgaatgatgaaagcgtcgtctttggtctgtcgcaaaaaacacggcaacagcgcaaagccgcctactggctgtgcggcgcgggcgtcgcaattttttggccgctgggcgcactgcttggcgcgatggtcggcaaactgctcccggcaccggaaaccatcgggctggatgcggtatttcccgccattttattggcgttagtgatcccggcgttcagaaatcgcaccacgctgatccgcgcctgtagcggcgccgggctgtcgcttgccgctgtccccttcgcaccggtcgggttgccggtactgctctctctgcttggcttactgacgaggaaaaaataa

SEQ ID NO: 75303 - DNA, 324 bp, Citrobacter koseri
atgggcaacatgacgctgtttatcgtcggtattgctgtgttatcggcaggcacctatctgatgcgtcttggcggagcaaagctcggcaaccggctggcgctctccgaacgttctcaggcgctattgtcagatgcggcaacggtattgctgttttcagtggcgctggcaaccacgttttatgaaggcgaacattttgccggaatggcgagggtactgggcgtcgcgttcgctgttttcctggcgtggcgcaaaatgccgctgattgtggtgattatcgctgcggcggtagtgacagcgctgctgaggctggcgggtatgcactaa

SEQ ID NO: 75304 - DNA, 213 bp, Citrobacter koseri
atgaaaagcatcaaaacttttgtcgcagttatcgctctcgctacttctttcggttctttcgccgctcagtctgttaccgcgacgggctctactctggaaagcgcagaagcaaaaatcgccgctcaggctcagcaggctggcgccagtgattacaaaatcacttccgcatactccggtaaccgcgtgcatatgaccgctgaactgctgaaataa

SEQ ID NO: 75305 - DNA, 819 bp, Citrobacter koseri
ttgtctgaccatcaaaattcatccccggagggcgctgtttctcatgccgtctggacgcgcgggtgcctgacgcaatcaaaaccggatatgctggcgacggaagttcctgtcgcgctggtctataacggcatttcccatgtggtgatgatgaccacgccgaaagatctggaacaattcgcgatcggtttttcactgtcggaaggcattattgaatgtccgcaggatatttatggcatggacgtcgttccttcctgcaacggccttgaagtgcagattgagctttccagccgccgttttatggggctgaaagaacgtcgtcgcgccctggccgggcgtaccggctgcggcgtttgcggcgtggagcagctgaatgacatcggcaaacccattacgccgctcccgtttacccaaacctttagcctggcgaatcttgatcgcgcgctgaagcatctgtctgattttcaaccggttggtcagcttaccggctgtactcacgcggcggcgtgggcgatgccgtccggtgaattagcgggcgggcatgaagatgtcggtcgccatgtcgcgctggataaactgctggggcgccgggcgacggaaggcgaaatctggcagcagggcgcggtgctggtctccagtcgcgccagctatgaaatggtgcagaaatcggcgatgtgcggcgttgaaatcctgtttgccgtctccgctgccaccacgttagcggttgacgtggctgagcgctgtaacctgacgctggtgggcttttgcaagccgggcaaggcgacaatttatacgcatccacggcgtttgatgacaggttga

SEQ ID NO: 75306 - DNA, 591 bp, Citrobacter koseri
atgaaacaccttagcgtttttatgcctgtattactggcgggtttcttgtgtgggaatgcgccatccgcactggcggaagaaggcgactgtcagattttatcttcgacaaaacaggtcggctatgggcggttccgcagggaggatatgagggaggggagcaccgaatacgccgggaatatgtatcacggttatgcctccgtcacccgggagttacaggtctccgtcatctgtactgatgaacataaaattcggctctttgtggatggccccgcccggcaggggcaggcctggcggttttctgacaacggcgcgatgtcgattaaaatgaaaaatgccagagtcgataacgctcccgttcagttggcttcggttccccggggcgcggcgcaggtatcgggcggcgctgcggaaatgacgctgttgccggatatgtccgctgctgcggtaaacggccaggaagtggcaggaaaacagtgggttgcaacactgatgatcaccacttatcttgccgataaagctttccagaccagcaatacgcaggatctggaagaaacctacaccgtgtcgtttgacgctctcgcggctaactag

SEQ ID NO: 75307 - DNA, 2424 bp, Citrobacter koseri
atgattcgcggttccgctaaaaaaggaattattgtgttttgtctgacggcaatcgctttcagtatacgggcggaaataatgccgacctctactggaacgatggagttggcgagagcggtatttgatactgatgcattagaatctaatggtctcgatcctgtgattgctgattattattccttagcgtcccggttcactcctggtatccataatgtgaccgttattattaatggcaagaaacacagtgtcatgtcggttaagtttaatgaggaagggcagccctgtattgataaagcatttctggaaagcgcaggactcgtcacgaaaataaaaagagaaacctgcccgctgatccatcaatactggtctacggcaaccgttagcgctacgcctgaaacagaagaaatgtcgctggttgttccgcaggaagcgattgatccagataataaccgacaggtcgcggacgttcgcggtggtcatgccgcaatgctgaattactccatgtttggcacgcattataaatatgacggcgataattcagaccgctttcagtcaacgtttgaacttggttttaatgcgggtgactggattgtgcgcagcacgcaattcgtcagcgacggcagcgaccaggaattagaaaccgactcgtattatacctacgcgcaacgcactttcgccgactatggcgtgatggtgcagggcgggcaaatcaacattgccaacagccgctttagtattccatcggtctacggtgtgcaagtcatgccggataataccctgctgccgaacgaggggagcggcgtcgaggtgacggggatcgccagatattctcaggcgcgcgtggatattcgccagggtgggcagatcatctattcaacgcttgttcccgctggcccctttaccttaaccgatgtgcccattgctaacctcaacaccgacctgaatgtcacggtgacggagaccgatggaagcgaaagccattttaccgtatcggcgagcacgtttcgtagcaaccatgtcggcagggcgccgggcttttctctggccgtggggcgtgcggaagatatggacacgaattttgagcagccctggattgtgtcggcgtctgatggctggtcagtgaataatcgtatgaatctcatggccggaatggtgatggcggataaccactattacggtttctctgccaatgtggataccgttcccgtacagaatttatatgcctcgctcgggtttcttgggtcgatcgataaccgtagccagactgatgggcacaaaaccacgctggatcttgggtattccttgccctgggggatggggatttcgctgggcggcagctacggcacggcggactatcgcgaaatgcaggaactgtatagcgacgacgatgattactccccaacgaaatacgatacgaacgtcgcggtcagttggtcggatacgcttctggggcgtttttcgctcggctactaccgtaatgaggcctgggacagcgactataatagccgccgcattatctcttcctggtcgcaaacctataaatatttcagcgtcagcgtgaactgggaatcggatatcagtcgtggggatgagagcgatcgcgatatgttctacgtgaacgtttctgttccgttaggccgtaccggtgtttcaacgaactcgtggtatcgcgagagtgaaggaagaagctcttatggcacgcgggcgatggggtcgctgaatgacgacaaccaatacacggtcggcgtgtctcgcgatcaggacgaaagtgttaccgactgggatagctcgctcaacagcaatcttcactataccacgctgtccgtggcggctggcggcgataacgacagcaatacgaactactctgccgcattgagtggcggtattgtggcgcatgacgatggcgtgaccttctcaccgtatccggtcgcggacacgtatgccattacccaactggacaagcctgttgccggtatcgaaattgtgacgtcgcgcgggcctgtctggaccgataaatggggtcaggccgttgtcccgtcattgacgccgttccatgaaagtacgctggaacttaatacccaaagtcttccgggcaatcttgacgtcaataatggccggacggcgattaaagcgtcgcacggggcggtcgcgaaatggcaattcactacgctgagtcagcggcgcgtgctgctctctgtcatgcgcgcagacggtactccgttgccgaaaggcgtctccattgttaacgacgccggggaatacatcacttccgcgccagaggacggtttgatcttcctgaatgatatctcagcaagccatcagctgtatgcgaaggtggacggtggacgatgcaaactgaactacaccctgccggaagccgatccgcagaaattctacgaggagataaaagggaaatgtctctaa

SEQ ID NO: 75308 - DNA, 684 bp, Citrobacter koseri
atgctttccttcaagaaaacattaatctgcgcctgtttattggcgtcatttaactgtctggctgccgggatggtgcccgacacgtcgctgctgctgattaatgaagaagagcaaggcggcagtatggatgtcaaaaacaccgatgctgatgcccagctcttgtataccaaaatcgtcaatcttccagacgatcctcagcctggcctgattgtcacgcaacccgttacgcgtgttgatgccggtaagacgcaacgtgtgcgattcgttcttaaaaatagcgcggagccgttaaaagttgagcatttgaagcgcgttatttttacgaccatcccgcaacgggataaaaacaaagttaaagtggtctttagccaaaaccttcccgtcattattcatccttcgggtttagacgtgaatatggagccgtggaaagatctccagtggcatatgcgcggcggaaaactcagcgtggaaaataaaacgccttatgttatccgtctggagcagaaagtaaaattattgccatcaggcgcgcacgctgatttaccaaaggcttatattctgccgggtgaaacaataagtgcccatgcctcgaacacattatccgcactggataaaaatatcgaaatgtatcctgctacgcgctatggctataaggcgaagagttttgttgcagaaataaaataa

SEQ ID NO: 75309 - DNA, 708 bp, Citrobacter koseri
atgaatgttttttttaaaaaaagcctgatggcgtctgtgctggcgctgacggcttcttccgttatggcggcaccgagcgttgatattaaagtatcagggaaaattgttcctgcttcctgtattccgtcattcccaagcggcggcggtatcgctgattttggcaccatcaaagtggcgtcattaaattcaactgcgccaaccgcgctgcctgacattaaaaccgtgccagtcgccattacctgtgaagaagatacgcgtgtcggcgtttcttttactgatatgcatagcgcttctgcaccgaccaccggttatgccattaatttcgcatcgactgatttcatttcttctgctaattatctttttggcctggggctgtacggtagccagaaaattggggcatatgcgctgggtattcagattgattcaggaacgctgactaacggcaatggcgataacctgattgcctatttctcagcaaatgacggcactacctggggaacaaaagcaggcaacagctatatgcagattataaataataacagcgaggtttacagctttggtaaaagctcggctgatgcgccagaaccgcaaacaaaagtcaactttaacgtcggtgtgtccgcgattatcaacccgacagacgatctgcaaattaccgatgaagcgacgcttgacggcttaaccaccgtagagctggtatatctgtaa

SEQ ID NO: 75310 - DNA, 588 bp, Citrobacter koseri
atgcaggtcagcagaaggcagttctttaagatctgcgctggcggtatggcaggcaccacggcggcggcactgggtttcgcacccagcgtagcgctagcggaaacacggcaatataaattgctgcgcacccgcgaaacccgtaacacctgcacttactgttccgttggttgtgggctgttaatgtacagcctcggcgacggtgcaaaaaacgccaaagcatctatcttccacatcgagggcgatccggatcatccggtcagccgtggcgcgctttgcccgaaaggggccggtctggtggacttcattcactccgaaagccgcctgaaatacccggaataccgcgcgccaggttcagataaatggcagcaaatcagttgggatgaggcattcgaccgcatcgctaaactgatgaaagaagaccgcgacgccaactacgttgcgcagaacgccgaaggcgtgaccgttaaccgctggctctccaccgggatgctgtgcgcttccgcatccagtaacgaaaccggctatttaacgcaaaaattctcccgcgcgctcggtatgctcgcggtcgacaaccaggcgcgtgtctga

SEQ ID NO: 75311 - DNA, 2415 bp, Citrobacter koseri
atgaccaaccactgggtcgacatgaagaacgccaacctcatcgtggtgatgggcggtaacgccgctgaagcccacccggtagggttccgttgggcgatggaagctaaaattcacaacggcgcgaagttgattgtgattgatcctcgcttcacgcgtacggcgtcggtggccgatttctatgcccctatccgttccggtactgacattgccttcctgtcaggcgtactgctgtacctgctgaacaacgaaaaatacaaccgcgaatacaccgaagcctataccaacgccagcctgatcgtgcgtgaagattttggcttcgaagatggcctgtttacgggctatgacgcggataaacgcaagtacgacaaaaccagttgggcctacgaactggatgaaaatggcttcgctaaacgcgataccacgctgcaacatcctcgctgcgtgtggaacctgctcaagcagcacgtttcccgctatacgccggaggtggtggaaaatatctgcggcacgccgaaagccgatttcctgaaagtatgcgaatacattgcggaaaccagcgtcaaagataaaaccgcgtcgttcctgtatgccctcggctggacgcagcactccatcggcgcgcaaaacatccgcacgatggcgatgatccaactgttgctcggcaacatggggatggctggcggcggcgtcaacgcgctgcgcggtcactccaacattcaggggctgactgacttagggttgctgtcgcaaagcctgacgggttacatgacgctgcccagcgaaaaacagaccgacctgcaaacctaccttgccgccaacacgccaaaaccgctgctggaaggtcaggtcaactactggagcaactacccgaaattcttcgtttctatgatgaaagccttctttggcgataacgcgacgaaggacaacgactggggcttcgactggttgccgaagtgggacaaagggtacgacgtcctgcaatacttcgagatgatgaacgaaggcaaggtcaatggctatctctgccagggctttaacccggtcgcctcattcccgaacaaaaacaaagtggttgcgtcactctctaaactgaagttcctggtgactatcgacccgctcaataccgaaacgtccaccttctggcaaaaccacggtgagtcgaacgatgttgatccgtcgaaaatccagaccgaagtgttccgtctgccgtcaacctgcttcgccgaagagaacggctctatcgtcaactccggccgctggctgcaatggcactggaaaggcgcggacgcccccggcgacgccgtaaccgacggcgagatcctggccggtatcttcttacgcctgcgtaagatgtacgccgagcaaggcggcgcgaacccggaacaggtgctgaatatgacctggaactactccacgccgcatgaaccgtcttcggaagaagtggcgatggaaagtaacggtaaggcgctggccgatcttatcgacccggcaacgggggcggtgatcgtgaagaaaggccaacagctcagctcgttcgcccagctacgtgacgatggcaccacgtccagcggatgctggattttcgccggtagctggacgccggaaggcaaccagatggcgcgccgcgataactccgatccgtcaggcctcggcaatacgctggggtgggcatgggcatggccgctgaaccgccgcattctgtataaccgcgcctccgccgatccacagggcaacccgtgggatccgaagcgccaaatcctgaaatgggacggtgcgaaatggggcgggatggatatcccggactacagcgccgctgcgccgggtagcaacgtcgggccgttcatcatgcagccggaagggatgggtcgcctgttcgcgctcgacaagatggcggaagggccgttcccggaacactacgagccgtttgaaacgccgctggggacgaacccgctgcacccgaacgttatctccaaccctgccgcccgtatctttaaaggcgacgcagaggcgttgggtaaagccgataagttcccttacgtcggaacaacttaccgtctgaccgagcacttccactactggaccaaacacgcgctgcttaacgctatcgcgcagccggaacagtttgtggagatcggcgagaagctggcgaacaagctcggcatcgcgcatggcgataccgtaaaagtctcctccaaccgtggctatatcaaagccaaggcggtagtgaccaagcgcattcgcacgctgaaagcagacggcaaggatatcgataccatcggtattcctattcattggggctacgaaggggtggcgaaaaaaggctttatcgccaatacgctcacgccattcgtcggtgatgcgaacacgcagacgccggagttcaagtccttcctggtgaatgtggaaaaggtgtaa

SEQ ID NO: 75312 - DNA, 903 bp, Citrobacter koseri
atggcttatcaatcgcaagacatcattcgtcgttccgcgactaacggtttcactcccgcgccacaggcgcgggatcaccagcaagaggtggcgaagcttatcgacgtcaccacctgtattggctgtaaagcctgtcaggtggcctgttcggaatggaacgacatccgtgatgaagtgggcagcaacatcggggtgtacgacaacccggctgatctgaccgcaaaatcctggacggtgatgcgcttctcggaagtggagcaagacgacaaactggaatggcttatccgtaaggatggctgtatgcactgcgccgatccgggctgcctgaaggcatgtccggcagaaggggctatcattcagtatgccaacggcattgtcgacttccagtctgaacagtgcatcggctgcggctactgcatcgccggttgtccgttcgatgtgccgcgcctcaacccggacgacaaccgcgtttataaatgtacgctgtgcgttgaccgcgtggtggtggggcaagaaccggcctgcgtgaagacctgtccgactggtgctatccactttggttccaaagaggcgatgaaaacgctggcaggcgaacgtgtggctgagctgaaaacccgtggttacgacaatgcaggtctgtacgatccggcaggcgtcggcggtactcacgtcatgtacgtgctgcaccatgccgacaaaccgaatctgtaccacggtctgccggaaaacccggaaatcagcgcgacggtgaaattctggaaaggcatctggaaacctctcgcagcggtcggctttgctgcgacctttgcggccagcatcttccactatgtcggtgtcggcccgaaccgtgcagatgaggaagaagacaatctgcatgaagagaaagacgaggtgcgcaaatga

SEQ ID NO: 75313 - DNA, 636 bp, Citrobacter koseri
atgaaacgacgtgacaccatcgtgcgctatacggcgccggaacgcatcaaccactgggtaaccgccttctgtttcgtactggcggcggtgagcggactgggctttttgttcccgtccttcaactggctgatgcatatcatgggcaccccacagctggcgcgcattgtgcacccgttcgtgggcgtgatcatgttcgcctcattcatcatcatgtttttccgttactggcaccacaatctaatcaatcgggatgatatcttttgggcgaagaatattcgtaagatcgtcgtcaacgaggaagtcggcgacaccggacgttataacttcggccagaaatgcgtattctgggcggcgattattttcctggtcctgttgctggtcagcggagtgatcatctggcgtccgtattttgcgcctgctttctcaatcccggtgatccgattcgcgttaatgctgcattcatttgccgcagtagcgttaattgtggttatcatggtgcacatttacgccgccctctgggtgaaaggcaccattaccgcgatggtggagggatgggtaacccggtcatgggcgaagaaacatcacccgcgctggtaccgtgaagtccgccagaaacaggaaaagtcatctgaatga

SEQ ID NO: 75314 - DNA, 930 bp, Citrobacter koseri
atgagtattcgcataatcccgcaagatgagctggagaagagcgagaaacgtacggcggatatgattccgccgttattgttcccccggctcaaaaatttgtataaccgccgcgccgagcgtctgcgcgagctggccgaaaacaacccgctgggcgattacctgcgctttgccgcgctgatcgcacatgcccaggaagtggtgctgtacgaccatccgctggagatggatctgaccgcgcgcatcaaagaagcgaacgcgcagggcaaaccgccgctggacattcacgttttaccgcgcgataagcactggcagaaactgctgcattcgctgattgctgagctgaaaccggagatgagcggccccgcgctggcggtaatcgaaaatctggagaaggcttcggaacaggaactggagcaaatggcgagcgcgctgtttgaatccgattttgcctccgtcagcagtgataaggccccgtttatctgggcggcgctgtcgctctattgggcgcaaatggccagcctgatccccggtaaagcccgtgcggagtacggcgaacagcgtcagtattgcccggtgtgcggctcaatgccggtttccagcatggtgcaaatcggcaccacgcagggtctgcgttacctgcactgcaacctgtgcgaaaccgagtggcatgtggtgcgcgtcaaatgcagcaactgcgagcagagtcgcgatctgcactactggtcgctggataacgaacaggcgtcgattaaagcagaaagctgtggcgactgcggtacttacctgaaaattctgtatcaggaaaaagacccgaaagtggaagccgtcgccgacgatctcgcctcactggtgctggacgcgcgcatggagcaagagggctttgcccgcagttccatcaacccgttcctgttcccgggcgaaggggagtaa

SEQ ID NO: 75315 - DNA, 375 bp, Citrobacter koseri
atgattaaaggtccggtgttgtttgacaccaatattctcattgatttatttagcgggcgtggtgaagcgaagaaggctctcgaagcttactcaccccagaatgccattagtctcattacctggatggaagtgatggtaggggcaaaaaaataccatcaggaatcccgcacacgtatagcattgagcgcttttaacgttatcggcgtttcacaggatattgccgaaagaagtgtcagtctcaggcaggaatacgggatgaagttgccggatgcggttattctggctacagcgcacattcatcgttttgcgctcgtgacgcgcaatacaaaggacttcgcggggattccgggagtcattacgccttatcatttataa

SEQ ID NO: 75316 - DNA, 249 bp, Citrobacter koseri
atgagtatgatggctggaatggaaatgggcagaatattacttgatttatccgatgaagttatcaagcggcttgatgacctcaaacaacagcgtaatcttccgcgagcagagctattacgcgaagcagttgaacaatacctggaaaggcagggacaagccgaaaccactatttccgatgcgctggggctctggcaaggttgcgaagaagatggcgttgaatacgaaaggaaacttcgcgaggagtggtga

SEQ ID NO: 75317 - DNA, 942 bp, Citrobacter koseri
atgtatcaccttcgagtaccgcaaacagaagaagaattagcgcgttactaccagtttcgctgggaaatgctgcgcaaaccgctccaccagccgaaaggttccgaacgcgatgcctgggatgcgatggcgcatcatcaaatggtggtggatgaagaggggaacctggttgcggtagggcgtttgtatatcaatgcggataacgaagcttctattcgtttcatggccgttgaaccgtctgttcaggataaagggctgggaacgttgatggcgatgaccctggagtccgtggcgcgccaggaaggggtaaaacgcgtcacctgtagcgcccgtgaagatgcggtagcgttcttcgccaaacttggctttgtgaatcaaggggaaatcacgaccccgcaaaccacgccggttcgccattttctgatgattaaaccggtcgcgacgctggatgacattctgcaccgtggcgactggtgtgggcagcttcagcaggcctggtatgagcacatcccgttaagtgaaaaaatgggggtgcgcattcagcagtacactggtcagaaatttattacgaccatgcctgaaacgggcaatcagaatccgcaccacacgttgtttgccgggagtttgttttcactggcaacgcttaccggctgggggctgatctggctcatgctgcgcgagcgtcatctgggcggtacgattattctcgccgatgcgcatattcgctacagcaggcccatcagcggcaaacccagcgcaattgccgatctggggtcgttgagcggcgatctggacaggttggcgcgaggccgtaaagcacgcgtgcaactgcaagtggagttgtttggcgacgagacgtcaggcgcagtttttgaaggtatttatatcgtattgccggcaaaaccgtttggcccctatgaagagggcggcaacgaggaagagtag

SEQ ID NO: 75318 - DNA, 438 bp, Citrobacter koseri
atgattgcattaattcagcgcgtaacccgtgccagcgtcaccgtggagggcgaggtgacgggtgaaatcggccagggacttttagtgttattaggtgtcgaaagggatgatgacgaacagaaagcgaatcgtctgtgcgagcgcgtgctcggttatcgaatttttagcgatgccgaaggcaagatgaatctcaacgtgcaacaggcggggggaagcgtgctggtggtgtcgcaatttacgctggccgccgataccgaacgcggtatgcgaccgggcttctcaagaggcgccgcgccggatcgcgctgaagcgctgtatgaatattttgttgagcgctgccgccaacaggaaatgaacacgcaaaccggacgtttcgctgccgatatgcaggtctcgctggtcaatgatggccccgtaacgttctggctacaggtatga

SEQ ID NO: 75319 - DNA, 780 bp, Citrobacter koseri
atgaccaccctggcggggaacctggcctatgtctcgttgctctcgttagtgccgttgatcgccgtcgtttttgcgcttttcgccgcctttcccatgttttccgatgtcagcctccagttacgccattttatttttgctaacttcatcccggcgacgggagatgttattcagcgttatattgagcagttcgtcgcaaattccaacaaaatgacggcggtaggcgcttgtggactgatcgtcacggcgctgttgctgatgtatgccatcgacagcgccctgaacaccatctggcgtagcaaacgcacgcgtccaaaggtgtattcctttgccgtttactggatgattctgaccctggggccactgctggcgggcgccagcctggcgatcagctcctatctgctttctctgcgctgggccagcgagctcaacacggttattgataacgtcctgagggtattccctctgattctctcctggatttcgttctggctgctgtacagcattgtgccgaccacgcgcgtaccaaaccgcgatgctgttgtcggcgcttttgtcgcagcggtactgttcgaagcaggaaagaaaggattcgcgctttatatcaccatgttcccgtcatatcagttgatttacggcgtgctggcggttatccccattttgtttgtctgggtgtactggacatggtgtatcgtcttgcttggtgccgaaataactgtcactctcggggaataccgcaaactcaaacaagccgcagaacaagaagaagcagaccaatcatga

SEQ ID NO: 75320 - DNA, 600 bp, Citrobacter koseri
atgctctatatctttgatttaggtaatgtgattgtcgatatcgacttcaaccgcgtgttaggtgcatggagtgacctgagccgtgtcccgctggcttcgttgaagcaaagttttacgatgggagaggcgtttcatcagcatgagcggggggagatcactgatgaagccttcgcagaagcgctgtgccatgagatggcgttgccgctgagctatgagcaattttcccacggctggcaggcggtatttgtcgcattacggcccgaggttatcgacatcatgcataagcttcgcgagcaggggcatcgtgttgtcgtattgtctaataccaaccgtctgcatacgaccttctggccggatgaataccctgaagttcgccaggctgccgatcatatttatctgtctcaggaattgggcatgcgtaaacctgaggtgcggatttaccagcatgttttgcagacagaaggtttttccgctgccgatacggtcttttttgacgacaacgccgataatatagaaggggctaaccagttggggatcaccagtattctggtgacggataaaacgaccatcccggactatttcgcgaagttgttatgctaa

SEQ ID NO: 75321 - DNA, 2709 bp, Citrobacter koseri
atgaaatcttctcgtcttattcaaaaaacgccgatcccggcaaagctcgcgctctgtattgccagtgcgctggcgttgagcgggcaggctgtagcaggatgtagttacacgtctaccgcacaactattttgtgacaatacaactatatatcactatggtaatccgctcggaggagctgcaagggattacagtggatttgatgaagtccgtattgatactacctcagaaggaaccacttcaggattaactggctggggtgtctatattgataacattggctataaatttaaaaatctggttatcaatacaacaggcaccgcagcagatggaatccactctaaaaatgcaggcggtaaactggtcgcagataatatctatattaccgcaacaggaagtagtgctgatggaataaatattggtcgcgaattacaggctgattattcaattgttgaagtcaatggtgatgtaacggttgatgctgaaaatggaatggggctacgcgccaacgcgtctgcgaataaagataacgcccagtcatcaataattatccatggtgatactgatattgttacccgtggtcctggtggagcgaatacgggatacgggatctatgcaggtagagatcccgcgcaatttacaggtacagcaaaaggcgatgcgagtattacggttaatggcaccgcatcagtcgcgacgtcagggcgtagtgctcatgcggtatatgtggcccgtaaagggttaataaaccttaataatgtggatttgaaaacctccggcgtgagcgcacatggcgtttatgcgtattcatctactgattctgcaacggtgaaccttagcggtgatagtaaaattcaggttactgatagcggcgcttatgccatttacgcctatggttcacaggcgttggttcgctcgtgggattatgctaccgatagtgttggctctggcgtatacgacattgaaggaaatttacgcgcatattacggcggtacgatggatctgcggatggaagaggggagccgctttgtggggcaaacggattcttcacaacaaaatagtaacgcgaactaccatggtacgctggatctggatataaacggtgcaaacagcgaatggacgatgaccgggaactctgtggtctctactctgacgctgaaccaggccacattgcgttatagcgcagatggcgtgtcccgcgatgacgaaagtacctttaaaaccctgaccgtgatgggcaactacaccggcacagatgcgttactggtgttgaacaccgtgcttgaaggcgatgactcttttaccgataaactgatcgttaaaggggatacctccggcaataccaacgtaggcatcaataacatcggcggtgtgggcgatctgacccttaacggtattgagattgtggacgttgagggcgtttccgacggaacgttcaccaaagcaggacgtattgtggcgggcggctatgactatgacgtggtgaaaaatgccagtaactggtatctcaccagccagctaagcccggtggagccagaaccagaacctgagccggaaccagaaaacccggacccggtcgatccaccaacaccgccgggaccggttgacccggtggacccgccagcaccaccagggccggttgatcccgtggaaccaccaacgccgccagggccggtcgatcctgttgagccccctgcgccaccagagccgccgctgccgccagcgcctgaacctggtgaacatcaataccgcccggagtttggtagctatctggcgaacaactatgccgccaatacgctgtttatcacccgtttgcacgatcgcctgggtgaaacccagtacaccgacatattaacgggcgagcagaaagtgaccagcatgtggatgcgtaacgtaggtggtcatatgcgctttactgatggcagcaagcagctgaaaacgcaggctaatcgctatgtattgcagattggcggcgacctggcgcagtggagcagcgatggtctcgaccgctggcatctgggtgtgatggcgggttacgccaatcagaaaagtaaaacgcataacacccataatggctacgcttcacgcggtcatgtgaacggctacagtgcggggttgtatgcgacgtggtatgcgaatgaagcggataaaaccgggacgtatctggatagctgggtgctctataactggtttgataacaccgtgcagggtgaccatcttgccagtgaaaaatacaaatctgacggtatcacggcatccatcgaagggggatacaccttcctgataggcgaaagcgagcgtacgagttactggctccagccaaaagcccaggtgacctggatggacgtgcaggctgactcgcaccgtgaaagcaacggcactcaggtgaaagacaaaactgacggcaacctgatgacccgactcggtgtgcgcgcatacctgaaggggcataacgccattgatgatggcaaagaccgcgagtttcagccgtttgttgaagcaaactggctccacaatacccataaccagagcgtccagatgggggcgatccgggatgaaatcagcggcactaaaaatattggtgagttgaaagttggtgtggaagggcaaattaacccgcgtttgcaggtgtgggggaatgtagctcagcaggtaggcgacaacagttacagcgataccgcagcgatgttgggggtgaaatacagcttctga

SEQ ID NO: 75322 - DNA, 804 bp, Citrobacter koseri
atgagtcttactgaactgaccggtaacccacggcatgatcagttgctggcgctgattggcgagcgcggttacatgaatattgacgagctggcaggtctgctggatgtgtccacgcagaccgtgcgtcgcgatatccgcaaactgagcgatcagggattgattacgcgtcatcacggtggcgcgggacgggcttccagcgttgtgaataccgcctttgagcagcgagaagtctcctggacggaagagaaaaaagccatcgcggaagcggtggcggactatattccagacggctccacggtatttatcaccattggtacgaccgttgagcaggtagcgcgggcgctgttaaaccacaatcatctgcgcattatcactaacagcctgcgtgtggcgcatattctgtacaataatccgcgttttgaagtgatggtgcccggcggaacgcttcgcccgcataacagcggcattatcggcccttctgcgacggcgtttgtggcggggtttcgtgcggactatcttgtcaccagcgtcggcgcgatagaaagcgatggcgcgttgctggagtttgacgtcaatgaagccagcgtggtgaaaaccatgatggctcactcccggcatattctccttgctgccgatcatacgaaataccatgcttccgcagcggtagagattggcaacgtgtcgcaggtaacggcgctgtttactgatgagtaccctggcccggcattgcataacctgcttcagtcacagcaggttgagatcgtccaggttagcccaggccaggatgacgcaacgtcagtctga

SEQ ID NO: 75323 - DNA, 897 bp, Citrobacter koseri
atgattcgtgttgcttgtgtgggtatcaccgtgatggatcgcatctattacgttgaaggtttaccgactgaaggaggtaaatatgtggcgaaacgttatacggaagtgggcggtgggcctgctgcaactgccgcagtggctgcggcgaaactgggggcgcaggtggactttattgggcgtgtgggagatgacgacaccggaaacagcctgctggcggagctggaatccctgggggtaaatacccgctatacccggcgttacgcgggggcgaagtcctcacagtctgcggtcatcgtcgatgcgaaaggggagcggattatcatcaattatcccagcccggatttattgcatgacgctgactggcttaatgagatcgacttttctcaatgggatgtggtgctggcggatgttcgctggcatgaaggggcgaaacgggcattcacgctggcgcgccgggccggagtcatgacggttctggatggcgatgtgacgccacaggacatccgcgagctggtggcattaagcgatcatgccgccttctctgaaccgggtctggcgcgcctgacgggaatacaggataccgtaagcgcgttaaaaaaatcacaaatgctcacaaatggacatgtctatgtcacgcgcggcggtgaaggatgcgactggttagacgataatgtcttcctgcatcaacccggattcccggtagaggtggtcgacaccaccggcgcgggggatgtttttcacggtgcgctcgcctttagcctggcgggtggaacgccggtcgaagaggccgtcaggtttgccagcggcgtggccgcactgaaatgcacccgaccaggcgggcgtgccggaatccctgactgtgatcaaacccgatcttttctgtcactttttgtataa

SEQ ID NO: 75324 - DNA, 897 bp, Citrobacter koseri
atggcagtgattgcatttgtcggattaggccagatgggttcgcccatggcgagtaatttgctcaagcagggccatcagctcagcgtctttgatgtgaaccccgacgccatacagaccctggtggaaaaaggcgctcgtccggccagcagcccggcgcaggcggcgaaagaggccgagtttgtcatcacaatgctgcctaatggcgatctcgttcgcagcgtgttattcggcgatcaaggcgtttgcgaaggcttgtcacaggacgcgctggtgatcgatatgtccaccatccatccgctacagacggacaaacttatcgcagatatgcgcgccagagggttcagcatgatggatgtcccggtcggtcgaacgtccgatcacgccattgcggggacgttgctattactggcaggcggcagcgcagaacaggtggagcgcgcaacgccggtactgatggcgatgggcaatgaattgattaacgctggcggccccggcatggggattcgcgtaaagcttatcaataactatatgagcatcgcgctgaatgcgctttctgccgaagccgccgcgttatgcgaagcgctgggcctctccttcgacgtcgcgttaaaagtgatgagcggaaccccggcaggcaaaggccacttcaccacctcctggcccaacaaagtgctgaaaggcgacctttctccctccttcatgatcgatctggcgcacaaagacctggggattgcgctggatgttgccaaccaactgcatgtgccgatgccgctcggcgccgcatcccgtgaagtttataaccaggctcgcgccgccggtcgtggccgggaagactggacagccattctcgaacaggtgcgtaacagcgccggattaccgaacaaattcaaaatgtaa

SEQ ID NO: 75325 - DNA, 879 bp, Citrobacter koseri
atgaacaactacaccatcaaagacattacgcgcgcatccggcggctttgccatgctggcggtcgatcagcgtgaagcgatgcgcttaatgtttgcagctgctggtgcgaagtctcctgttgccgacagcatactgacggatttcaaagtgaatgccgcaaaagcgctgtctccttatgcctccgccattctgattgaccaacagttctgttaccgccaggtggtggagcaaaacgcgattgcgaaaaactgcgccatgatcgtcgccgccgatgcgttcattcccggcaatggcattcctgtcgatagcgtcgtcattgataaaaaaatcaatccacaagcgataaagcaagacggcggtaaagcgctaaaactgctggtgctctggcgtagcgatgaagacgcccaacagcgtcttgatatggtcaaagaatttaatgagatgtgccacagcaatggtctggtgagcatcatcgaaccggttgtgcgcccacctcgccgtggcgataagttcgaccgtgaacaggccatcattgatgccgcgaaagagttgggcgacagcggcgcggatctctacaaagttgaaatgccgctgtacggcaaaggcgcacagcacgaccttctcgccgcgtcacagcgcctgaacgagcatatcaatatgccgtgggtcatcctctcttccggtattgaggaaaaattgttccctcgggcggtcagagtcgcaatgactgcgggcgcatccggttttctggcgggtcgcgccgtctggtcatcggtgattggcctgccggataccgaactgatgctgcgtgatatttctgtgcctaagttgcagcgtttgggtgagatcgtcgacgaaatgatggcccgccgtcgttaa

SEQ ID NO: 75326 - DNA, 1242 bp, Citrobacter koseri
atgaaatggtttaacacgttgagccacaaccgctggctggaacaagaaaccgatcgcatttttgactttgggaaaaaatccgtagtagccaccggtttcggctggctgggaaaccaggggcagatcagagcggagatgggtacgcacctgtggattaccgcccgtatgctgcacgtttattccgttgccgcatcgatgggccgtccgggcgcatatcagttagtcgaccatggtattaacgcgttgaacggcgcgttacgcgatcggcgctacggcggctggtatgcctgtgtgaacgatgaaggcgtgatggacgcctccaaacagggatatcagcatttcttcgtcctgttaggggcggcaagcgccgtcaccacgggccatccacaggccagaaaactgctggatgacgcgatcgaggtcatcgaaaaatacttctggagcgaagaggagcagatgtgcctggagtcctgggacgaagccttcagccagaccgaagattaccgtggcggcaacgccaacatgcatgccgtagaggcttttttgatcgtgtacgacgtgacccatgatcgtaaatggctcgaccgcgcgctgcgcatcgcctccgtcattattcacgatgtggcccgcaacggcgactaccgcgtcaacgagcacttcgatgcgcagtggaaccccatccgcgattacaacaaagataaccctgcccaccgtttccgcgcttacggcggcacgccggggcattggatcgagtggggtcgcctgatgctgcacctgcatgcggccctggaagcgcgttttgaaactccgcccgcctggctgctggaagatgccaaagggttattccacgccacccttcgcgacgcctgggcgcccgatggcgcagacggcttcgtctactccgtggactgggacggcaaaccgattgtacgtgaaagagtacgctggccgattgtggaagcaatgggcaccgcttacgccctgtataccctcaccggcgatagccaatacgaagcctggtatcagaagtggtgggattactgcatcacttatctgatggactacgagaacggttcgtggtggcaggagctggataccaataaccaggtgaccaccaaagtgtgggacggcaagcaggatatttaccacctgctgcattgcctggtgatcccgcgcctgccgctggcgccggggctggcgcccgccgttgctgcgggcctgctggatagcaacgcgaaataa

SEQ ID NO: 75327 - DNA, 2025 bp, Citrobacter koseri
atgcataccctacacaatatcaccctgacaacaatcgataacggctttaccctgagctggcaagatcgtctgctgctatcccacagcgcagaaaatccctgcctgtggattggcgccggcgccgccgatatcgacatgtttcgcggtaatttcagcataaaagataagctgaatgagaaaatcgcgctgactgacgcaacgataagccagtccccggatggctggttgatccatttcaatcgcggcgatgccatcagcgcagcgttacacatcaccaccgatgaggcgggccgcctgacgctgaaactgcaaaacagcgatcttacccataaccgcatctggttacgcctggccgcccagccagaagatcacatctatggctgcggcgaacaattctcttatttcgatttgcgcggcaagcctttcccgctctggaccagcgaacaaggcgtcgggcgcaacaaaaacagctatgtcacctggcaggcggactgcaaagaaaacgcgggcggggattactactggacctttttcccacagcccacttttgtcagcacgcaaaagtactactgccacgtcgataacagctgctacatgaatttcgactttagcgcgccggaataccatgagctggcgctatgggaagacaatgctaccctgcgttttgaatgcgccgacagctacatcgccctgctggaaaaattgacggcgctgttaggccgccagccggtgttgccggactgggtttacgacggcgtgacgctcggcattcagggcggcaccgacgtctgccagcagaagctggacaccatgcgcaacgcaggcgtgaaggtgaatggcatctgggcgcaggactggtccggcatccgcatgacctctttcggcaaacgcgtgatgtggaactggaagtggaacagcgacaactatccgcagctggatacccgtatcaagcagtggcaagaagaaggcgtgcagttcctctcctacatcaatccttacgtcgccagcgataaagatctttgtgccgaggcggccagacacggttatctggcaaaagacgctgcgggcgatgactatctggttgagttcggcgagttttatggcggcgtcgtggatttgaccaatcctgaagcctatgactggttcaagaatgtcatcaagaaaaacatgattgagctgggttgcggcggctggatggcggatttcggggaatacctgccaaccgacacttacctgcataacggcgtcagcgcggaaattatgcataacgcctggccggcgctgtgggcgaaatgtaactacgaagcgctacaagagaccggcaagctgggcgagatcctgttctttatgcgtgcgggttataccggcagccagaaatattccaccatgatgtgggcgggcgatcagaacgtcgactggagtctggacgacggtctcgcctccgtggtgcctgccgcattgtcgctggcgatgacgggtcacggtctgcatcacagcgatattggcggttataccaccctgttcgacatgaagcgcagtaaagagctgctgctgcgctggtgtgacttcagcgccttcaccccgatgatgcgtacccacgaagggaaccgccccggcgataactggcagtttgatggcgacgcggaaactatcgcccactttgcccgtatgacaaccgtctttaccaccctgaaaccgtatctcaaacaggcggtggcgcagaacgccagaaccggtctgccggtcatgcgcccgctgttcctgcactacgaggacgatgcgcagacctacaccctgaagtaccagtatctgctgggtcgcgacctgctggttgcgccggtccacgaacaaggacgccgcgactggacgctatatctgcctgaggataactggatcaacgcgtggacgggcgaaacgcttcgcggcggcgagattaccgtggacgcgccgctcggcaagcctccggtcttttaccgtgcagagagcgagtgggcatctctgtttgcctctttacgcactatctaa

SEQ ID NO: 75328 - DNA, 1383 bp, Citrobacter koseri
atgagtcaaacgtcatcaaatccggcgaccctacgcttgccgtttaaagaaaaacttgcctatgggatgggtgatttaggctccaatatcctgctggatattggtacgctttatttacttaagttttataccgatgtgctgggtctaccgggcacgtatggcggtattattttcctgatcgccaaattctttaccgccttcaccgatatgggcaccgggattatgctcgactcgcggcgtaaaatcggcccaaaaggcaagttccgtccgttcgtgctctatgccgcgtttccggtgaccctgctggccatcgccaactttgtcggcacgccgtttgaaatcaccggtaagacggtgatggcgacggtgctgtttatgctgtacggcctgttcttcagcatgatgaactgttcgtatggcgcgatggtgcccgccattaccaaaaacccggatgagcgcgcctcgcttgccgcctggcgtcagggcggcgccacgctcggcctgctgctgtgcaccgtcggttttgttccggtgatgaatctgatcgaagggaacgcacagctaagctatattttcgccgccacgctgttttcactgtttggcctgctgtttatgtggctctgctacgcaggcgtcaaagagcgttatgtggaggtaaaaccggttgaagcgaccgaaaaaccggggctgctccagtcgtttcgcgccattgccgggaaccgtccgctgttcattttatgtatcgcgaatctctgcaccctgggcgctttcaacgttaagctggcgatccaggtgtattacacccagtacgtactgaatgacccgatcctcctctcctggatgggctttttcagcatgggctgcatttttatcggcgtctttttaatgcccggcgcggtaagacgcttcggcaagaaaaaggtctacatcggcggcctgctggtttgggttatcggcgatcttctcaactacttctttggcggcggctcggtcagttttgtcgcgttttcctgcctggcatttttcggttcagcgtttgtgaacagcctgaactgggcgctggtctccgacacggtggaatacggtgaatggcgcaccggcgtgcgttcagaaggaacggtatacaccggttttaccttcttccgtaaggtgtctcaggcgctggcgggcttcttccccggctggatgctgacccaaatcggctacgtgcccaatgtggtgcaatcggcaggcactgtcgaaggtttgcggcagctgatctttatttatccgtgcgcgctggcggtgataaccatcatcgcaatggggtgtttctacaacctcaacgagaagatgtatgtccgcatcgttgaagagatagaagcccgtaaacaaacggcttaa

SEQ ID NO: 75329 - DNA, 1395 bp, Citrobacter koseri
atgtctgaccatgatccgctgacgctaaaactgagcctacgggaaaaatatgcctatggcatgggtgacttcggctcaaatttgatgctgtgtatcggtacgctgtatctgcttaagttttataccgatgaactggggatgcccgcatattacggtgggattatctttctggtggcgaaattttttaccgcgttcaccgatatgttgacgggagtgctgctggattcccgtcgtcatattggcgctaaaggtaagtttcgccctttcattctgtatgcatcatttcctgtcgcgctggttgccagcgcgcagtttctcgccaccgattttacgctgacggtcaaaacagcgctggcaaccgtactgttcatgctgtttggcctgttttacagcctgatgaattgctcatacggggcgatggtgcccgctatcaccagaaacccgcatgagcgcgcccaactcgcagcatggcgtcagggcggcgcaacgctcggtctgttgctgtgtaccgttggctttatgccgattcaggcgctctttacccagtcatcttctctgggttatctggtagccgcgctgattttctccgtttgcggcctgttcagtatgtggtggtgtttcagcggggtgaaagaacggtatatcgatatcgttccggcccaccataagcccagcattcttaaatccttctgtgcgattttccgcaatccgccgctgctggtgctctgcgtggccaacttatgtacgctggccgcgtttaacatcaaactggcgattcaggtctattacacccagtacgtgctgaacgacatccatttgctgtcatggatgggatttttcagtatggggtgcattctggtcggcgtactgctggtgcccgtaaccgtaaaacggtttgggaaaaagcaggtctatctcggcggcctgacgctgtgggctatcggcgatgtgctgaactttctctggggtggaacctctttcctgttcgtgatcttctcctgcatggcgtttttcggcaccgcgttcgttaacagcctgaactgggcgctggttcccgatacggtcgattacggcgaatggaaaacaggtattcgtgcggaagggtcggtctataccggttataccttctcacgaaaaatttctgcggcgctggcgggtttcttgcccggcattatgctgacgcaaattggctacgtgccgaacatagcgcaaagcgcggagacgttacttggcctgcgtcagctgatatttctttggccatgcggcctggcgattatcgccgctctcacaatgggctttttttataagctcaatgaaaaacgttttgcttttattattgaggaaattagccaacgaaagaaacaatcgatacaaaccggcgttgtaagccattaa

SEQ ID NO: 75330 - DNA, 693 bp, Citrobacter koseri
atgaaaacgttgaacacaataatgctgttatcctctgttatctccacttctgtttttgcgggcgcgtatgtggaaaaccgcgaggcctataatctggcatccgatcaaatggaattcatgctgcgcgttggctataactccgatatgggggctggaattatgttgaccaacacctatacgctacagcgtgatgatgaattaaagcatggttataatgaaattgagggttggtatccgttatttaaaccgacggaccggttaaccattcaacccggtggtctgataaacgataaaagcatcggttctggcggcgctgtttatctggacgtcaattataaattcacgccgtggtttaacctgacggttcgtaaccgttacaaccataataactacagttctactgatttaaatggtgaattagataataacgatagctatgaaatcggcaactactggaatttcatcattactgataaattttcttatacctttgagccacactatttttataatgtgaatgattttaacagcagcaacggaaccaaacaccactgggaaattaccaatactttcagataccggattaaccagaactggctgccgtacttagagttacgttggttggatcgcaatgtggagccctaccatcgggagcaaaaccagattcgtgtcggggtaaaatatttcttctga

SEQ ID NO: 75331 - DNA, 1824 bp, Citrobacter koseri
gtgatcgaaaatttgcgtaacatcgccatcatcgcgcacgttgaccacggtaaaactaccctggtcgataagctgctacagcaatccggtacgtttgatgcgcgtgccgaaactcaagagcgtgtgatggactccaacgatttggagaaagagcgtgggattaccatcctcgctaaaaacactgctatcaaatggaatgattaccgtatcaacatcgttgataccccaggacacgccgacttcggtggtgaagttgaacgtgtaatgtccatggtagactccgtgctgctggtggttgacgcatttgacggcccgatgccgcagacgcgcttcgtgaccaaaaaagcctttgctcatggcctgaagccgattgttgttatcaacaaagttgaccgtcctggcgcgcgccctgactgggttgtagaccaggtattcgacctgttcgttaacctcgacgcgaccgacgaacagctggacttcccgatcatctacgcttcggcgctgaacggtatcgcaggtctggatcacgaagatatggcggaagacatgaccccgctgtatcaggcgatcgttgaccacgtaccggcaccggacgttgacttggacggcccgctccagatgcagatctctcagctggactacaacaactatgttggcgttatcggcattggtcgtatcaagcgcggtaaagtgaagccgaaccagcaaatcactatcatcgatagcgaaggcaaaacccgtaacggtaaagtgggcaaagtgctgactcacctgggtctggaacgtattgatagcgacctggcggaagcgggcgatatcattgcaatcactggtctgggcgagctgaacatctccgacaccatctgcgatccgcagaatgttgaagcgctgccagcgctgtctgttgatgagccgaccgtttctatgttcttctgcgtaaacacctctccattctgcggtaaagaaggtaaatacgtgacctctcgtcagatccttgagcgtctgaacaaagaactggtacacaacgttgcgctgcgcgttgaagaaaccgaagatgcggacgcgttccgtgtatccggtcgtggtgaactgcacctgtccgttctgattgaaaacatgcgtcgtgaaggtttcgagatggcggtttcccgtccgaaagttatcttccgcgaaatcgacggccgtaaacaagagccgtacgaaaacgtcacgctggacgtcgaagagcagcaccagggttctgtgatgcaggcgctgggcgagcgtaaaggcgacctgaaaaacatgaatccagatggcaaaggccgcgtacgtcttgactacgtgatcccaagccgaggtctgatcggtttccgttcagagttcatgaccatgacctccggtacgggtctgctgtactccaccttcagccactacgacgatatccgtccgggcgaagtgggccagcgtcagaacggcgtactgatctccaacggtcagggtaaagcggttgcgttcgcactgttcggtttgcaggatcgcggtaagctgttcctgggtcacggcgcggaagtttacgaaggccagatcatcggtattcacagccgttctaacgacctgaccgtaaactgcctgaccggtaagaaactgaccaacatgcgtgcgtctggtactgacgaagcaacggttctggttccgccgatcaagatgaccctggagcaggctctggagttcatcgatgacgacgaactggtagaagtgactccaacctctatccgtattcgtaaacgtcacctgacggaaaacgatcgtcgtcgtgcaatgcgtggcgcgaaagaagagtaa

SEQ ID NO: 75332 - DNA, 1410 bp, Citrobacter koseri
atgtccgctgaacacgttttgacgatgctgaatgagcatgaagtgaagtttgttgatttgcgcttcaccgataccaaaggtaaagaacagcacgtcacgattcctgctcatcaggtgaatgccgaattctttgaagaaggcaaaatgtttgacggctcctcgatcggtggctggaaaggtatcaacgaatccgacatggttctgatgccggacgcatccactgcggtcattgacccgttctacgctgattctacgctgattattcgttgcgacatcctggagccaggcaccctgcaaggttacgatcgcgacccgcgttccatcgccaagcgcgcggaagagtacctgcgctctaccggcatcgcagacaccgttctgttcgggccagagccagagttcttcctgtttgacgatatccgcttcggttcttctatctccggttcccacgtcgctatcgacgatatcgaaggcgcatggaactcctccacccagtacgaaggtggcaacaaaggtcaccgtccggcagtaaaaggcggttacttcccggttccgccggtagactcttctcaggacatccgttctgaaatgtgttccgttatggagcaaatgggtctggttgtagaagcacaccaccacgaagtggcaaccgcaggtcagaacgaagtggcaacccgcttcaacaccatgaccaaaaaagcggacgaaattcagatctacaaatacgttgtgcataacgtcgctcaccgtttcggtaaaaccgcgacctttatgccaaaaccgatgttcggcgataacggttccggtatgcactgccacatgtccctgtccaaaaacgggactaacctgttctccggcgacaaatatgcgggtctgtctgagcaggcgctgtactacatcggcggcgtaatcaaacacgcaaaagcgatcaacgccctggcgaacccgaccaccaactcctacaagcgtctggtcccgggttatgaagcaccggtcatgctggcctactccgcccgtaaccgttctgcctctatccgtattccggttgtggcctctccgaaagcgcgtcgtatcgaagtgcgcttcccggacccggctgcgaacccgtacctgtgctttgccgctctgctgacggcgggtcttgacggtattaagaacaagatccacccaggcgaagcgatggacaaaaacctgtatgacctgccgccggaagaagcgaaagagatcccacaggttgcaggctctctggaagaagcgctcaacgagctggatattgaccgcgaattcctgaaagcaggcggcgtgttcactgatgaagcgatcgacgcgtacatcgccctgcgcattgaagaaaatgaccgcgtgcgcatgacgccgcacccggtagagtttgagctgtactacagcgtttaa

SEQ ID NO: 75333 - DNA, 1050 bp, Citrobacter koseri
atggcaacaggcacgcagcccgatgctgggcagatcctcaattctttaatcaacagcattttactggttgacgacgagctggcggtgcattacgccaacccggccgcacaacagctgctcgcccaaagcgcccgcaagctgtttggtacgccgctgcctgagctgttgagctatttttcattaaatattgggctgatgcgcgaaagcctggaagcaggtcagggatttacggacaacgaagttacgctggtgatcgacgggcgctctcatattctctcgttaaccgcccagcgcctgccggataacttcatcctgctggaaatggcgccgatggataaccagcgtcgcctgagccaggaacagcttcagcatgcccagcaaatcgccgcccgcgacctggtgcgcggtctggcgcatgagatcaaaaacccgcttggtggtttacgcggcgcggcccagctgctcagtaaagccctgcctgacccggcgttgctggagtacaccaaagtcattattgagcaggccgacaggctgcgtaatctggttgaccgactgctggggccgcaacagccgggtatgcacgtcacggagagtatccacaaagtcgcagaacgcgtcgtcgcactggtgtcgatggagctgccggagaacgtcacgctgattcgtgattacgaccccagtctgccagaactgcctcacgacccggaccagattgaacaggtcctgctgaacatcgtgcgtaacgctttacaggcgttagggccggaaggcggtgaaatcattctgcgtacccgtaccgcattccagctgacgctgcatggcgtgcgttatcgcctggcggcgcgcatcgacgttgaggacaacgggccgggtattccgtcccatttacaggacacgctgttttacccgatggtcagcggccgtgaaggcggcaccgggctgggcttatccattgcccgtaatttgattgatcagcattccggcaaaattgaatttaccagttggccgggtcataccgagttctcggtttacctgcctatcaggaaataa

SEQ ID NO: 75334 - DNA, 1410 bp, Citrobacter koseri
atgcaacgagggatagtctgggtagtcgatgacgatagttccatccgttgggtgcttgaacgtgcgctcgccggggcgggattacattgcaccacatttgaaagcggcaacgaagtgctggacgcgctggcgagtaaaacgccggatgtcctgctgtcggatatccgtatgccgggaatggacggactggcgctgttaaaacagatcaaacagcgtcaccccatgcttccggtcatcataatgacggcgcattccgatctcgatgccgccgtcagcgcttatcaacaaggcgcgtttgattatctgccaaagccttttgatattgacgaagcggtcgcgctggttgaacgcgcgatcagccattatcaggagcagcaacagccgcgcaatgtccagatcaacggcccgacaaccgatatcatcggcgaagcgcccgcgatgcaggatgtctttcgcattattggccgcctctcacgctcgtctatcagcgtgctgatcaacggcgagtccgggaccggtaaagagctggtcgcccatgcgctgcatcgccatagcccacgcgttaaagctccctttatcgccctgaatatggcggctattccgaaggatttgatcgagtccgaactgtttggtcatgaaaaaggggcgttcaccggggcgaataccattcgtcaggggcgctttgagcaggccgacggcggcacgctgtttctcgatgagatcggcgatatgccgctggatgtgcagacgcgtttgctacgcgtcttagccgatgggcagttttaccgcgttggtggctatgcgccggtgaaggttgatgtgcggattatcgccgccacccatcagaacctggaattacgcgtacaggaaggtaagttccgtgaagatctgttccaccgcctgaacgtgattcgcgtacatttaccgccgctgcgcgagcgccgggaagatattccacgcctggcgcggcatttcctgcaagtggctgcccgcgagctgggcgtcgaagccaaattgctccacccggaaaccgaagcggcgctgacgcgtctggcctggcctggcaacgtgcgtcaactggagaatacctgccgttggttaacggtgatggccgccggacaggaggttctgattcaggacttacccggcgagctgtttgaagccacggtgccagacagccagtcgcacatacagtcagacagctgggccacattgctggcgcagtgggcggatcgcgcgttgcgttccggtcatcaaaacctgctttctgaagcgcagcctgagctggagcgtacgctgttaaccaccgcgctgcgtcatacccaggggcacaaacaggaagcggcacggctgctgggatggggtcgtaacaccctgactcgcaagctaaaagagctgggtatggagtga

SEQ ID NO: 75335 - DNA, 1374 bp, Citrobacter koseri
atgtctgaacagttgatagactgggatctggccctgatccagaaatataactattccgggccacgatatacctcgtatcccacagcgctggagttttcggaagactacggcgaagaggcatttcagcacgctgtggcgcgttaccctgaacgtccgctgtctctgtacgttcatatcccgttttgccataaattgtgctacttctgcggttgcaacaagattgtgacccgccagcagcataaggccgaccaatatctcgatgcgcttgaacaagaaattattcatcgcgcgccgctgtttgccggacgtcgcgttagtcaactgcactggggcggcggaacgccaacgtacctgaataaagcgcaaatcagtcggttaatgacgcttctgcgtggaaactttcattttaacgacgacgtcgaaatctcgatcgaagtcgatccccgtgaaattgagctggatgtgctcgatcatttacgcgcgcaagggtttaaccgcctgagtatgggagtgcaggacttcaataaagacgttcagcgtctggttaaccgcgagcaggatgaagagtttatcttctcgctgctcaatcatgcgcgcgagataggcttcacctcgacgaatatcgatctgatttacgggctgccaaagcaaacgccggaaagcttcgcctttacgctcagacgcgtggcagagctgagccccgatcgcctgagtgtctttaactacgctcatttgcccacgttattcgccgctcagcgcaaaatcaaagaggctgacctgcccagcgcgcagcaaaaactcgatatcctgcaagagaccatctcgtcgctgacggagacgggctatcagttcatcgggatggatcactttgcccgcccggatgacgaactggccgttgcccagcgtgagggcgttctgcatcgtaacttccagggctataccactcagggcgatacggacctgctggggatgggcgtttccgccatcagtatgattggcgacagctacgcgcagaaccagaaagagctgaagcgctactatcagcaggtggatgagctggggaatgcgttatggcgcggcattgtgctgacccgcgatgactgcattcgtcgggatattattaagtcgctgatctgcaacttccgtctcgattacgcagcggttgaacagcagtgggatctcaactttgcggcgtactttgcggaagatttagcgctgttggcgccgctggcgaaagatgggctggtggatgtggatgataaggggattcaggttacgccgaaaggccgtctgctgatccgtaacatctgtatgtgctttgatgcttatctgcgccagaaagcgcggatgcagcagttctcacgggtgatttag

SEQ ID NO: 75336 - DNA, 510 bp, Citrobacter koseri
atgaaatcaacttctacaccacgcggtaaaggtcccgcaaaagcgcgtcgtaaaacacgcgaagagctgaatcaggaagcgcgcgaccgtaagcgtcagaaaaaacaccgtggtcatgcggcggggagccgtgcgacaggtgacaacgcggcttcaggcggtaaaaaccagaacaagcagaaagatccacgaattggcagtaaaacccccattcccctgggtgtgaccgaaaaagtcaccaaacagcacaaaccgaagagtgagaaacctatgctttcaccgcaggctgagttggatttactggaaacggatgagcgcctggatgcgctgctggaacgtctggaagcaggcgaaaccctgagtgcggaagaccaaacctgggtagatgccaaactggatcgtattgatgagctgatgcagaagttgggcctctcttatgatgacgatgaagaagaggaagaggacgaaaagcaggaagatatgatgcgcctgctccggggcggcaactaa

SEQ ID NO: 75337 - DNA, 633 bp, Citrobacter koseri
ttgactaatttgaattatcaacagacgcactttgtgatgagtgcgcctgatattcgccatttaccttccgataccggaatcgaagtggcttttgctggccgttccaatgcaggcaaatccagcgcgctgaacacgcttacgaatcagaagagtctggcgcgtacatccaaaacaccgggccgtactcagctcatcaacctgtttgaggtggttgaaggcaaacgtctggttgacctgcccggctatggctatgcagaagtcccggaagagatgaagcgtaagtggcaacgcgcgctgggcgaatatctggaaaaacgtcagagtctgcaaggcctggtggtactgatggatatccgtcacccgttaaaagatctcgaccagcagatgatccagtgggccgtagagagcaacattcaggttctggttttactcaccaaagcggacaaactggccagcggcgcacgtaaagcgcagctgaatatggtgcgtgaagcggtactggcctttaacggcgatgtgcaggtagaaacgttttcttccctgaagaagcaaggcgtggataaattacgtcagaaactggatagctggtttaacgatctggctcccgtagaagagacgcaggacggggaataa

SEQ ID NO: 75338 - DNA, 2787 bp, Citrobacter koseri
atggttcagatcccagaaaacccacttatccttgtagatggctcatcttatctctatcgcgcgtatcacgcctttcctcctctgacgaacagcgcaggggagcctacaggggcgatgtacggtgttctcaacatgctgcgcagcctgattatgcagtatcaaccgacgcatgccgcagtggtatttgatgccaagggtaaaaccttccgtgatgagttatttgaacattacaaatcgcatcgcccgccgatgcctgatgacctgcgtgcgcagattgaaccgctgcatgcgatggtaaaagcgatgggcctgccgctgctggctgtttcgggcgtggaagcggacgacgttatcggtacgctggcgcgtgaagccgagaaggtgggccgtccggtgctgatcagcaccggcgacaaagatatggcccagctggtgacgccaaatatcacgctgattaataccatgaccaatacgattctgggcccggatgaggtcgtgaacaagtacggtgttccacccgaattgatcatcgatttcctggcgctgatgggcgactcttccgataacattccaggcgtgccgggcgtgggtgaaaaaaccgctcaggcgctccttcaggggttaggcgggctggataccctgtatgccgaatcagataaaattgcgggcttaaccttccgtggcgcgaaaaccatggccgggaagcttgagcagaataaagaggtggcttacctctcttatcaactggctaccatcaaaacggatgtcgaactggagctaagctgcgatcagcttgaagtacaacaaccagcggctgaagagttgcttggcctgtttaagaaatatgaatttaagcgctggaccaccgatgtggaagcgggtaaatggctacaggcgaaaggtgcgaagcccgcagcaaaaccgcaggaaaccatagttattgatgaaacgccagacgtgcctgcgaccgcgctttcttacgataactacgtcactatcctggatgaagcgacgctggaaagctggattgagacgctgaaaaaggcgcccgtttttgcatttgataccgaaacggacagcctggataaccatgcggcgaatctggtcggtctctcttttgctattgaaccgggcgtggcggcctacgttcccgtggcgcatgactacctggatgcacccgatcagatttcccgcgagcgagcgctggagctgttgaagccgctgctggaagatgagaaggcgcgtaaggttgggcaaaacctgaagtacgatcgcggcgtattgcagaactacggcattgagctgcgcggtattgcttttgacactatgctcgaatcctacatcctgaacagcgttgctggtcgccatgacatggacagcctgtccgaacgctggttgaagcataagaccatcacttttgaagagattgccggtaaaggtaaaaatcagctgacctttaaccagattgccctggaagaggccggacgttatgccgcagaagatgcggacgttacgttacagctgcatttgaaaatgtggccagagctacagcagtacaaagggccgctgaatgtcttcgagaatatcgaaatgccgctggtgccggtgctttcccgcgtagagcgtaacggtgtaaaaatcgactctgccgtgctgcataagcattcagaggagatcacgttgcgtctggcggagctggagaagaaggcgcatgagatcgccggagaagaatttaacctctcttctaccaaacagttgcaaactattctgtttgaaaaacagggtattaagccgctgaagaaaacgccgggcggtgcgccgtccacctcggaagaggtgctggaagaactggcgctggactatccgctgccgaaggtgattctggaatatcgcgggctggcgaagctgaaatcgacctacaccgataaactcccgctgatgatcaacccgaaaaccgggcgagtgcatacctcttatcatcaggcggtgaccgcgacggggcgtttatcgtctaccgatcctaacctgcaaaatattccggtacgtaacgaggaagggcgccgtattcgtcaggcgtttatcgctccgcaagattacgtcatcgcatcagcggactactcgcagattgagctgcgtattatggcgcacctttcccgtgataaaggtctgttaaccgcctttgccgaaggaaaagatatccaccgggcgacggctgctgaagtgtttggactgccgctggaaagcgttacggctgaacagcgccgcagcgccaaagcgattaactttggtctgatctacggcatgagcgcattcggtctggcgcgtcagctcaatattccgcgcaaagaggcgcagaagtacatggatctctacttcgaacgctaccctggcgtactggaatatatggaacgcacgcgcgctcaggcaaaagagcgaggctatgttgaaacgctggaagggcgtcgtctctacttgccggatattaaatccagcaatgctgcgcgtcgtgccggtgcggaacgtgccgccatcaacgctccgatgcaggggacggcagcagacatcatcaagcgcgctatgattgccgtcgataaatggctgcaagatgaacagccgcgcgtgcgtatgatcatgcaggtacacgatgaactggtgttcgaagtgcataaagatgatctcgacgtggtatcgaaaaagatccatcaactgatggaaaactgcacgcgtattgatgtgccgttgctggtggaagtgggtagtggcgaaaactgggatcaggcgcactaa

SEQ ID NO: 75339 - DNA, 936 bp, Citrobacter koseri
atggctaacccgttgaataatttaattatgacaagaatactcgctgcgataacgctgttgctgagtatcgtattgaccattttggtcactattttttgttctgtgccgatcatccttgccgggatcgtgaagctccttttgcccattcctgtcgtctggcgcaaggtatccgttttttgtaatttcatgatgtactgctggtgtgaagggttggcgctgctgctacatctcaatccgtggcttaaatgggacgtggaagggctggaaggcctgaacaagaaaaactggtatctgcttatttgtaaccatcacagttgggccgatatcgtggtgctttgcgttctgttccgtaagcacattccaatgaataaatactttcttaagcagcagttagcctgggtgccgtttatcggcctggcctgctgggcgctggatatgccgtttatgaaacgctactcgcgcgcttatttgctccgtcatcccgaacaacgcggtaaagatgtagaaacaacccgccgttcttgcgagaaatttcgcgcgcatcccacaacgatcgtaaattttgtcgaaggttcgcgttttaccgaagagaaacgtcggcaaactcgctcgccatataaaaaccttctcccaccaaaagcggcggggatcgcgatggcgctaaacgtcttagggtctcagtttgataagctgctcaacgttaccctctgctacccggaaaacgatcggaaaccattctacgatatgttgagcggtaaactgacgcgcatcgtggtacgtatcgatctggagccgattaaagaagagctgcacggtgactatgtgaacgacaaaggattcaaacgccgtttccagctttggttgaatgcactctggaatgaaaaagacgaacagatagaaaagattaaagcggaaaacaaaaacgccggtcaatga

SEQ ID NO: 75340 - DNA, 624 bp, Citrobacter koseri
atgaaaaagatttggctggcgctggctggtatgattttagcttttagcgcatcggcagcgcagttcagtgatggtaagcaatacatcacactggataagcccgttgctggcgagcctcaggttctggagtttttctccttctactgcccgcactgctatcagtttgaagaagtgctgcacgtttctgataacgtgaagaaaaagctgcctgaaggcaccaaaatgaccaaataccacgttgagttcctgggcccattgggtaaggacctgacgcaggcatgggctgtggcgatggcactgggcgtagaagataaaatcactgcgccgatgtttgaagcagtacagaaaaaccagaccgttcagtctgctgccgatattcgcaaagtattcgttgatgcgggtgtgaaaggtgaagactacgatgcggcatggaacagcttcgtggtgaaatcactggttgcgcagcaagaaaaagcggccgctgatctccagcttcagggtgtaccggcgatgtttgtaaacggcaaatatcaggttaacccgcaagggatggataccagcagcatggatatcttcgtacaacagtacgccgataccgtgaaacatctggttgaaaagaaataa

SEQ ID NO: 75341 - DNA, 987 bp, Citrobacter koseri
atgaacgataacgcttttactttccagacattacacccggataccatcatggatgcgctgtttgaacagggaatccgggtggattccggtcttaccccgctcaacagctatgaaaaccgcgtctatcagtttcaggacgaagaccgtcggcgctttgtcgttaagttttatcgccctgagcgttggtctgccgatcaaatacgggaagagcatcagtttgcactggaactggtaaaagatgaggtgccggtcgcggcgccgcttgtcctcaatggccagacgctactgaaccaccagggattccactacgcgattttcccaagcgtcggcgggcggcagttcgaagcggataatatcgatcagatggaggcggtaggacgctatctgggtcgcctgcatcagaccgggcgtaaacattcttttgcctgccggccgacaatgggcctggaagagtatctcattgaacctcgtaaacttttcgaagactcatcactgattcccgcggggcaaaaagcggctttcctgaacgcgacggacactcttattgccgccgttaccgaacgttggcatacccgttttgagacgctgcgtttacacggggattgtcatgccggaaatatcctctggcgcgatggcccgctgtttgttgatttagatgatgcccgcaatggccctgccgttcaggatctgtggatgctgctgaatggcgataaagccgagcagcggatgcagcttgaaacgattatcgaggcttatgaagaagttagtgagttcgataccgctgaaatagaacttattgagcctttacgcgcgatgcgtttggtttattatcttgcctggctgatgcgtcgctgggctgatcctgcgtttcctaaaaatttcccgtggttaaccggggaagattactggcaacggcagactgcgacatttcttgagcaggcaaaagtgctgcaagaaccccctttacaattaacgccaatgtattaa

SEQ ID NO: 75342 - DNA, 270 bp, Citrobacter koseri
atgaaatgtaaacgcctgaatgaagtcattgaactcctgcaaccagcctggcagaaagagcccgatcttaatctgctgcaatttttacagaaactggcgaaagagtcaggttttgacggcgaactggcggatttaaccgacgacattctgatctatcacctgaaaatgcgtgactccgcaaaagatgcggtgattcctggcattcagaaagattatgaagaagatttcaaaacggcgctattacgcgcacgcggcgtgattaaagagtaa

SEQ ID NO: 75343 - DNA, 585 bp, Citrobacter koseri
gtgaatctggagagtgcaataacgggggttgtgctggcaggcggtaaggccaggcgaatggggggggcagataagggtctgcttgagctggatggcaaaccactctggaagcatgttgctgatacgctggcgtctcagcttgaaaccgtcgtgattaacgcgaatcgccatcaggatatttatcaacaaagcggtctgaaagtgatccccgattcactggccgattttccggggcctctggcgggtatgttgtctgttttacagcaagagaagggagactggtttctgttttgcccttgtgacacgccttacattccccgcaatctggttgcgcgtttaaaagctcagcgtaataacgcgcctgtcgtatgggttcacgacggcgagcgggaccacccgacaattgcactggttaatcgctccgtagcacctttcttacaggaatatctccggtcaggtgaacggcgagtcatggtctttatgcgccaggccggtggtcatgctgttgatttcagtgattttaaacaggcatttgtgaatgtgaatacgccggaagaactcgccagatggcaggagaaatcatga

SEQ ID NO: 75344 - DNA, 504 bp, Citrobacter koseri
atgatcccactactcggcatagccgcatggagcggcaccggtaagactacgctgctcaagaaattgattccagcgttatgcgccagaggggttcgcccaggattaattaagcatacccatcacaatatggacgtagataagcccggaaaagacagttacgagttacgcaaggcaggcgcagcacaaacgcttgtcgccagtcagcaacgttgggcgctgatgacagaaacaccggaagaacctgagctggatttaacgtatctggtgagtcgaatggatgcttctaagctggatatagtgcttgttgaaggttttaagcacgaagcggtggcgaagatcttattattccgacaggggtgtgggcatgaagtggatgagctgaccattgatgaacatgtgatcgccgtcgccagcaacattccgctttccctggacgtcccgctattagatatcaatgatataccacagatcgctacatttgttttgcgttggctgggacgatag

SEQ ID NO: 75345 - DNA, 1005 bp, Citrobacter koseri
atggcttcaataaaagaatccactgatgccaatggacaatcaaaatattacgtccactggaaggatgaaaaatccggtcatgggcgccgccgaatctttaagaatattgatgatgccgcacatcttttctggcaaaaacagaatattgagctggattgtcgaacagccagctggcgcgggatagaccattcatggacgttccgtaaattaatcctgttttttcttggatatcaggccaacaagctggaaaaaaacattattcggctgtcgtcctataccaaatgccgtcacgatcttctcgctgtagaaggcccaatactggaaaaacacgttctccatgtaagccaccgggatgtagctgattcaattcgccagggttgccaccgctggattcgctcggcgttcttcctgctggaagaaaagcggctcatcacgtttaatcctgttgatcgtcctgttcgtcggcaccgtcggcccataacgattccttccagggaaacggtgagaaagctactcgacactgcaccgcaccgggagagaatagcgtgctggctcgggatttgtggtctgcgtctcggtgaggcgctggcggtgacttacgaagacgtatcacccgaagtaatccagatccggcggcatatcgtaaacggcgtcatacgcgaggggctgaaacgcggtgtggaacgtcaggtgcgaatgccccgggagttgctggcattactggattcggaattgttcgggacgtctcagccgctggtatcaaacagttttaccggggcaccactgtccatcaattacggcacgcagggcatactgcaaaaaacactggcggcacatggcatcaggcgattccatcacctccggcattttgcggtatcccgactggccgccagaggtgtcgatgtcacgcatgtttcccgtcttatcgggcatgtgaacataaagaccaccattgatgtttacggtcatctgttttgtgcgccggtggacatggatctggactga

SEQ ID NO: 75346 - DNA, 603 bp, Citrobacter koseri
atggcccgaaaaaatagctttaagaaggcctacgtcggtatcgttcttgacatggccttagcccgtaacaagatttctaaccggatggttgcccagcggttagaaattgacgaggcgactatccgtaactggcgcaaggaacatgccgactttaatcgtgcctttactgaggctcgcgaagttctgatggaaaagatcaatagcgttgcaggtaaaagcctggacgttcgtaagcgaaagattgtcaccaaatcctcagatggcctgaaaacgacagtcgaggatgttttgccaacacacaatgatgttgcagtgtttgccaaaacccttggacttggccgcagcgtttatggtgaagaagagcgccagcgcgatgtgcttcgtgaagtgatgaaacacaaggtcgccgggaaatactccgcacttcaggcggcgcagctacttgaggctgaggggataaaagttccttcaactctgcttatggagcttggcgcgccgaaaatattcgaacctttcaccaatagtgacgaggcagccaaagctgaagcggcgaacatgagccctcacgaggcagcagatatctacaaaaaattcatgggctga

SEQ ID NO: 75347 - DNA, 1617 bp, Citrobacter koseri
gtgccgatcccgttcccctttgacttccgcaaaccggattataccgccgtgtttgagtggagaatggagaggctggagcggatcaggaaagcgcctgaaatgcttccggcgctccgtgagttttaccgtactaacccggcccagttcatcatcgactggggcatgacgacggacccgcgtaacctcgattatggcctgcctgcgaccatcccgtttttgctgttcccccgccaggaggaatggattaactggatcatggacaggcgcgccagtcttgagcacggactgacagaaaaaagccgcgaaatggggctgagctggacctctgtcggtctggcctgttcgctttgcctgttcaacaaagaaatggtgatcgggttcggttcccgcaaagaggaatatgtcgacagtaccggcgacccgaaaacactgttctggaaagctcgtaagtttgtcgagctgctgccagttgagtttcgcggttcatggaatgataaaaaacacgcaccttatatgcgcgtggagttcccggaaactggcgcagtcatcaagggcgaagcaggcgataacattggacgtggtgaccgtaccacgctttatttcgtggatgagtcggcgttcctgaaacggccattactcattgatgctgcgctgtcacagacaacccgctgccgtatcgacctctcatcggtcaacggtatgaataacccgtttgcccgtaagcgtcacagcggaaacattcccgtgtttactttccactggcgcagcgacccacgcaaagacgatgaatggtatcgcaacgagtgtctgaaaattgatgatccgattatcgttgctcaggaactggacctgaactacagcgcatccactgagggtattctcattccttcggaatgggtgcaggcagcggtcgacgcgcatatcaaactgggcattcagcccagcggccagcgcctcggcgcgatggatattgcagacgaggggaaagacaaaaacggcttttcttcccgttatggcttcctcctggagaacgttcacgaatggtctggtgtcggtagcgacatctacgcttctgtcgtcaaagcgtttggttactgcgacgattatggcctggatgaattccgtttcgatgaagatggtctgggtgccggtgcgcgcggtgatgctcgcgtgataaacgagatcaggcaggctgaaggttgcggaacgataacggctacgcctttccgtggtagcggtagtgtattcgatcctgatgatgaggctgttcctggtgataacgggaaagcggcacgcctgaataaagatttcttcgcaaacgccaaagcacagagctggtggcatcttcgcaagctgtttcgtaacactttccgcgcgctgaacgggatggactacaaccccgatgagatcatttcgataagcagcaggattgagaacaaagaccgcctgctgattgagctttcacagcctacatggtcgaaaaataccgtcggtaaaatcctcgtggataaacagccggaaggcacaaaatcaccgaacctcgcggactccgtaatgattaattacgcaccgatggatacggctatggatatctggatcaaactggggagtcagtaa

SEQ ID NO: 75348 - DNA, 1449 bp, Citrobacter koseri
atgtctcgtaaaacaaaagtcgctacggctgactcttacgataactttgtcgcgcgcgttggcatgcagcagccaaatcagcatgcagcgtcaacctaccgcgccaattacaccagccgcaatcgtctgttattggaatgggcttatcgttcttcgtggatcatcggcgccgctgtcgatgcaaagcccgatgatatgacaaaaaaaggggccaggatcaccagcgaaatcgacccgaagcgccggggtattctggaagccaaatttgaagagctgaaactgtgggaacgtctgaaccttacgctgaaatggtcgcggctctatggtggtgctgtcgggatgattctcatcgaagggcaggcgccactcacaccgctgatactggacaaggtgggcaagggcagtttcaaagggttagcggtacttgaccgctggatgattaaccctaatctcgggcgtcgcattaagaccctcgggccagagcttggcaaaccggaggtgtacgacatcgttaccactgcccaggggattccgccgtggacggtgaactacagccggctgatccgcatggatggaataaccctcccgtaccagcaggccctaacggaaaacgaatggggaatgtctgttgttgagcggatctttgatcgtctgacatcgtatgacagtacgagtgttggcgcggcacagctcgcttacaaagcgcatctgcgcacggcaaaaatcaaggagctgcgtaaaattattgcgatgggtggtaagccatacgaagcactgctcaaacaaatggacatggtgcgccagttccagaccaatgagggaatgtctctttttgatgcagaggacgacttcgagacgcattcctattcgttcgccggtttatctgacctgctgagcgagttcaaagaagacattgccggtgccgttggtattccgctggttcgtctgtttcgacagtcgccgaagggattttcaacgggcgattctgatctggctaactactacgacgatattggtgcgctacaggaaaacaccctgagagcaccggttcggctgctttatgacgtgcttcatcgttctgagtttggcgagccgctgcctgacgattttacattcgaatttaaccccctctggcagatgtcagatgttgatcgttcgactgtagcaaccaataccactaccgcactggcgaccgctgtgcgtgaactgggaatgcctcctgccgccgcactaaccgacctcagggaaacggcgcgtgtgacgggtattggcgcatccattaccgacgaggatatcgaccatgcgaaggcccagtggtcggaggatgaatctgaaaccagccctccgccgacgttcggaaatacagtaccgcaaaagcctgttggcgatagcaaaccagatcggggaaatcgtagcaggctcttacgatggttcacaggccagcgctga

SEQ ID NO: 75349 - DNA, 585 bp, Citrobacter koseri
gtggattattctgacgtcatcagcgactgggcggaaatggtcggtcgtaaaatgtttgcccaggtcgagcacgaagagtggaaccagtggcgatctgtctcggaagagattgccgccggtctgcgcgatgtggtgggtaacactcctgtcgggcaggtggcgcaggatatcgtttatcgtcaaatccaactgatgaagtccttgccgctggaagcagcagatcgtgtgatggacatacaacagcgcgcaatgcaggcggttgtcagtggggagcgtccggatcagctttacgaaatgattatggcctctggtgatgtggctgccagcagagcgcagctgattgcccgtacggagattggccgcgcaaccggtgcactgacacaggcccgggccctctcggttggttcggaggggtactggtggcgtatcgagggcgctggtacgcgcgactcccactacaaaatgcgcaataaatttgtgcgctgggataacccgccgacgctggacggtatgaccggacacgccggatgtttgccgaactgcaaatgctggcctgaagtacagattcctgcaccgagaaaatga

SEQ ID NO: 75350 - DNA, 195 bp, Citrobacter koseri
atgaaaaaggtccatatcgaatcaaaacgagtcggcgaccgccgagttatcgaaatatcgatgggtgccatcaccgcgcgttatcgcgctgttggtgagctatcagagttaaaagccacagggcgtggcaacgtacgccaggtaaaagcgctgctccgtgagttccttcgcaacgctgaccccgcgctcatttag

SEQ ID NO: 75351 - DNA, 1203 bp, Citrobacter koseri
atgaaatatttctttaaaacccgactggggaacacccgtttccagttggctgatggttcgatcctgtttaaggacgtaccaattggacgaaccggcgagcaggtttatggcgcggaggaactgccggagctaaccccggacagtgacgggttgatagttgtccggcggacgcctgaggaagtgttcagcgaacgcacgattgcgtcattcgaggggatggcggtcaccatcggccacccgaaagactttggcggcaacatcatttttgtcacgccggagaactggcgcaggctggcaaacggccacattcagaacgtcagacgcggagagggcgccagttccgatctgctgctggccgacgtcatcgccaaaacgccggaagctattcaggcagtggaagacggagacgacgaggttagttgcggctatgacgccgactaccgccaaatttcgccgggtgtcgcagagcagtatgcgatcaccggtaatcatctggccttagtccctaacgggcgggctggttcacgttgtgcactgggagacgctatgccgagcactactaaaaactggtttacccggcttttaaaggcccgtaaaaccaacgacgccgccgaaatggcgagtcttattgataacccgccggagaatatgactggcgataacgatgatgtgacaaccgctgtgacaccgggcggcgtggtcatcaacctttcacctcagaacccgatgcctgcgccgactttgcctgtcacgactgactcagaagaagagatccctgcgtggggtaaagcgctgattgaggccgtggcaaaactcactgcgacagaaccggctacgggtgatgaggatgaagacgagaaggatgaagaagagggggctgttactggtgatgccgcttaccgtgccgatctgattcagcctggtattcagttaccggcgaaagcgaaactgacggcgtttaaacgtcagattctcgcatctgccgatcagacgctggttcgttccatcgtgggagatgcggatgtgacgaagctgaaaaaagctactgtggatatggcgtttaatgccgtctctgagctggctaaaaatcgcaacaccaccgcgcagactgtcgacagtttccgcactatgaccaccaacaccacaaaatctatcgcggacatcaataaagccgcgaaagagatctgggctaaacgaggctaa

SEQ ID NO: 75352 - DNA, 495 bp, Citrobacter koseri
atggcgaataccattctttaccggatgtcttcgggcattgccggggcgatttcacgcccgcaggacttaaccgttgagcctcatgtgctcgattccactaagccgttcgctgcgtatggcctgggcgggaaaattgctgacgggaaatttgttcctgtcgaatcaggcgacacggcgacggtactggcgggaattttcgttcgtccttacccgacagcgtcacagcccgataaagtccgccagattggttctggttttaactttaccggcgataacctgaagcgtggttatgtcacggtcaatattggcggtgatgcttcagcggttgccctcaatgcgctggtctacatgcgcatcgataatccaacggattccagccccctcggcgcattcctcgctgctgctgacggtgaaaacaccgtgcagatcactaatgcatatttcaatggccccggcgatgccgacgggaatattgagctggcgtacaacatttaa

SEQ ID NO: 75353 - DNA, 942 bp, Citrobacter koseri
atgccaatgacctttgatcaggcaacagtcgacagcactggtgctttccttgttcacgagctggagcgacttgaccagacgctgaacctgccgttgacgtcccagacatggagccgggacatcgagctgcgcgaagacgtctctattgcggatgagatgagctctttcaccaacaccacgtttgcagcagcgggcacgccgaatgcgaacggtaagaactggattaaccagcttgcgaccgcgatcgctggcctgaatgtggatatcgcaaaaacaggctttcctctggaattgtgggggatggagcttggctggacggtcgtagaactggccgcagctgcgcaggtggggcgtcctatcgatacgcagaaatacgaaggcatgcagttgaaatggaacatggatactgacgagcaggtgtatatcggggatgcagtaaaaggcgctaaaggtctgctgaacctgtctcaggtaaccccgacgaacgcggcgaagacctgggcgatctcctcgccggacgaaatccgtgccagcattaaccaggtactgagcaatgcctgggttcgctcggcttattcaaaagtaccggaagatttgctgatcccgccggaacagtattcattcctggcgagcaccatcgtttcttctgcgggtaaccagtcactgctgacctaccttgaaaccaacacgatcgctttccaccagaacggcaagccgctgggcattcgtcctgttaagtgggccattggtcgcggtgtggcaaataaagatcgcatggtcgcttacacgaacgataaaaagtttgtgcgcttcccgatggttccgctgcaaagcgtgccgatccagtatcgtggtatttaccagctcgtaacctattacggcaagctgggcgcggttgaaccggtttacccggaaaccctgaactacatggatggtatttaa

SEQ ID NO: 75354 - DNA, 282 bp, Citrobacter koseri
atgaagaaaatctatgtgctgaccgcgttcaatttcaacgatggtgccaacatcacgtcgtttactccaggttttcatgacgtcgaaagcgatgtggctgatcactggttcgtgaaggcgcactgctcaccggatggcgaagcgccgacggttgcgggtgattcccgcatagccgagcttgaaacgctggtggccgaaaaagacgcccgcatagccgagcttgaaacccaactcgcagaggctaaagccaatggcaaaaaacaaaagcctgccgacgcctga

SEQ ID NO: 75355 - DNA, 417 bp, Citrobacter koseri
atggcaaaaaacaaaagcctgccgacgcctgataaattccgcaccgattttccgcagttcgctgacgaaacaaaatatcccaccacgatgattcaggcgcgcatttccctggcggatgtgttgatgagtgagtcacggtttggcgaagatattttcccttatgtcgttgaattatttgtggcgcactacatggcgctgtatgcggctgatcaacgcggtgccgcagcgggttctgccgggggcgcaaacagcggggtacagacatcaaaatcagtggacaaggtttctgtcagctatgacgccagcgtgacgctgaaccctgatgcaggtttctggaataacacccgttacggttctgagttctgggaatatctgatgattttcggcgccggggctattcagctggggacgccgtaa

SEQ ID NO: 75356 - DNA, 504 bp, Citrobacter koseri
atgaaaagtggtctgaaggtacgggcggacaatgccgtgtctgtactggaatccctgcgccggttatccggtatggatgtgctggtggggattccggcggataaggcggcccgcgacggttcgccgataagtaacgcggagctgggttatctccattcaaccggtgcgacggtggaaattgacggcgagaccgttacgttaccgccgcgcccgtttctggatatggggatagaggattcaaaaccccgaaccactgcacacctgaaggcggcggcaactgctgcgctggaggggcaggcagaagcggcagagcgggagctggaaagcgccggacagattgcgcgggatgctgcaaaagccgttatcggttctggcgatcgattgcaccctctttctgataaaacccttgaacgcaggcgggctgagggcattcccggagaaaagccgctatttgctcacggttacttgctgcgctcaattaactacgtcgtgaggaaaaaataa

SEQ ID NO: 75357 - DNA, 405 bp, Citrobacter koseri
atgcctcttctcgatgtgagcgaggttcttctcgatcccgacttcatggacaacagcctggtgtgtcaccgacaggttcagacggtggatgaggacaatttcacgaaaaacacgccgcaggatatcccgttctctggcgtggtgacggttgaccgttcactggaagccagacgaatggcagcagggcagaacatcagcggcgctatcctcatcgtgacgcagttcagactaacgcagggccagcccggtacagacagtaccccgcgactggatgccgatatcgtgacctatagcggccgcgactatcgcgtgactttcgtcgacccttatacccgctacggtgccggattcgttcaggcgcattgtgagctggtggactttaacggagggacgccagttgagtaa

SEQ ID NO: 75358 - DNA, 546 bp, Citrobacter koseri
ttgagtaacgacagcactgtacgcggttatctgacgcctgtcggggatatcccgaaatacgatgaggatctggagcgggaaatcagccggtggattcgtggtgtttctggcctgccggctgcgcttgttttcccccgatggactgacccgcagccgcagatccccaacaacggggtgacgtggtgcgccttcggtatcactactgttccccagccgttaagtcagtccgatgttcaggtttcggaagaacagtccgagcaatggacatgggagcaggtcacggttatttgctgcttttacggccctatgggggccaacattgcatcaactttccgcgcggggatattcgtcgagcagaacaacgccgagctgaaccgctcggggctttcgctggtggatgccgggactatctacaacctgccagagctcattaacaaccagtgggtgaggcgatacgacctcaccattacgctttctcgcaaaaacattcgtacctataacgtccggacgctgcaagatgcgcccgtctcatttttcggagactaa

SEQ ID NO: 75359 - DNA, 1146 bp, Citrobacter koseri
atgccgcagggattacctgtatcaaacgtcgtcaatgtcgacgtgatcattgggccgcgtgcggctactggtcgaaactttggttcgctgctcattctcgggagctcaacggttatcccggttactgagcgtattcgcctttactcatcccccgaagatatcggcacagatttcggtgttgatagcccggaatatgaagccgctacggtgtatttctcgcaatcaccgaagcctcagcaggtatatgtcggccgctgggcgaaaacgctggcatcggctgaaagcggttcgacggaaacgctgctacaggccgtgaacgccgtactgaattacacgaactggtatggcgtggccgtggctgacgatgaagatatcgacgatgccgactggctgagtgtggccgccgcgatcgaggcttccagtctcagccgcattctggcgattaccactgcagaaccggcctcagttgatgcgacatcgacaaccgatctggcttacaagctgaaggctgcaaaatacgctcgcacgtttgtgcagtattccaccagcagcaagtacgccgcgctgtcggcgtttggccgcgcgtttaccgtgaatttcaacggcagcaacaccaccattaccctgaagttcaaacaggagccggggatcacgtatgaaaccctgaccaccaatcaggcggcggcgctggatgccaagaactgcaacgtgtttgtgtactaccagaacgatacggcaatcctgcagcagggcgtcatgtccagcggtgatttcttcgatgaacgccacgggctcgactggctgcagaactacgttcagaccaacctgtataacctgctctacaccagcacaaccaaagtcccacagaccgatgctggcgttacgcgcctcctttccaatgtcgaacagtcgatggatcagtctgtcacaaacgggctggtggctgccggtgtatggaacggcggcccgatcgggcagctggattccggcgatacgctgacaaaaggctattacgtttacgcgcagccgatttccgagcaggctcaggcagaccgtgaagcacgtaaggcaccggttattcaggtggcctgtaagctggcgggtgcggttcatttcgctgatgttcagatcaacgtcgttcgctaa

SEQ ID NO: 75360 - DNA, 441 bp, Citrobacter koseri
atggctacttattcttttatggacgttacggcgtccctctccggcccgaccggcgagattgatctgggctacggttccgccagttcagaggaggggatcaccgttgcaatgggcggccccaaaaacaccatgaccatcggtgctgacggcgaagtgatgcacagcctgcacgcggacaaaagcggcacggtaaccgtcaacctgctgaaaacctcgccgacaaacaaaaagctgtcgctggcgtacaacgcgcagagtcagtcctcaggcacctggggaaacaacgtcattgtgatccgaaacaaggtgagcggagacatcatcacggcgcgcagcgtggcgttccagaaacagccggataacgccaacgctaaggccggtaatacgatgccctgggtgtttgactgcggcaaaatcgaccaggtactcggagagttttaa

SEQ ID NO: 75361 - DNA, 453 bp, Citrobacter koseri
atggaatgctcaatcaaaggccacgattaccgcgtggcaaaactcagcgtttttgaccagctgaaagtgacccgtaagctgctgccggtgctggcgggcatgatgtcagatttcgggagcattcgctccctgttgcctgctgatggcaaaatcgacaccgtgaaattcgatcagttgaaaccggtatttgaaaccctgcttccgcgtatcgctgaggaactgtcttccctgaccgaagaagacaccaacgcgattattcatccttgcctgtccgtagtatcacgtaagcacatggacggatggacgccggtatttaacagcggtcagctgatgttcgatgatatcgacctgctaaccatgctgcagctggtggcgcgggtggtcgccgattcgctgggaaattttttgcccgtgagccctaccagcgcgacggcggaccagcctcagggctaa

SEQ ID NO: 75362 - DNA, 2217 bp, Citrobacter koseri
atgaacgctgagactattaaagatttcctcgtctcgctcggttttgatatcgacgaagcaggcgcggaaaagttcgattcagtcctcgccggcacgaccgcaaacgccatcaaaatggggctggccgtcgaaggtgccgcgcttaccgtagtggcctttacggctaagatcgcctccgggctcgataacctctactgggcgtcacagcgcaccggcgcgacggttcaggggattcagtctattggctatgcggtttcgcaggtgggcggcagcgtggacgcggcgcgctcctctctggaaagcctctcccggtttgttcgtaacaatcccggtgcggaaggcttcctgaatcgcctgggcgtacagacccgtgacgccagcggtaacatgcgcgacatggccgctatctttacgggtgtcggccagaagctcagcagcatgccgtattaccgggctaaccagtatgcgcagatgctgggcattgacgaaaataccctcatggcgatgcgccgaggtgtcggtggtttctccgggcagtacagcgcgatggcgaaggctatcggcttcaatgctgacgaggcggccagaagctccaacaaattcatgacctccctgcgcgagttcggcgcgatggcaggcatggcccgtgacaaaatcggctctaatcttgctggtggcctggcgggttcgctggacacgctgcgccgtcatatcctggataacttcccgcgtatcgagcagaccctgacgaaagccataaaaggcatcctggcgctcggggacattatcgggcggctgttcttccggcttattgaggggacatcagaccttattacctggtggaaatcactcgacaagcaaacgcgggaactgatctcgctgtttggcgcgctgacgattgcgctgcgcattctgaacagcacgttctggatgtcacctgtcggccttattaccgcgctggcggcgggtattgccctcctgtgggaggattataaaacctggaaggaaggcggccagagtctgattgactggggcaagtggaaaccggaagtcgacgccgcgctaaaaatggtccatgacctgcaggggaccgttaacgatctggcgaaagcgctggcgaaactgctcaacattgaccccaaatcatggtccctgaagtgggatttcagcaacttcatcgaccagatgggcgagttcagcaggatgctgaatatgatcgccgacctgctgaacgccattaaagacggtcgctgggccgatgcggccagtgttggcaagcagctactgaatcaggggagtgataaaccgtctgcaatgccagaagtgacggacagcgctaaccagacggcggagtggttgaacgacaagctgggatttgatccgcgcaatgtcggtaaaaccgtcaaaggctggctgtttggtagcgaggctggagaggggcgcgggattcatgacgaccagcgcgacccccagattgatgagctgaacggcacgcaggaaaaatcacgtaaagaggctgctgaatatcacggccgtagtaccggagtgctcggcaaaattgcagagggtattaagcaaattgctgatggaatgttcccgactgcagaggcggcagcattcacccccacagatgcgagtggcttacctcttgcaggcgtaaagcagccgcagccatcaaaagcaggctctgagttgctgggatggatgcaaccgatgctcaccagcctggaacaactctaccggcttccggaaggtttgttgcgcagtgtggccatcacagaatcgggcggaaatcaattcgctgtttcaggtgctggcgctaaagggctgtttcagtttatggacggcaccgcgcgtgatatgggcctgcgcgggaacgacgtattcaatcctgaaaaggccgctcaggcggccgctaaatatctctcgcaattgctgaaggctaacggtggtgacctgagcaaggcgctggcctcatacaactgggggatcgggaacgtgcagaagcacggaatggccctgatgccgcaggaaacccgcaactacattcctaaggtgttgagtaacatgcccgggaagggtgcgcaggtgcagcagcagaacacctatcacatttatggtggtggtgatccgcgttctgttggtaccgaggtcgagcgtcgtcagcagtcggcaaacgcccaggtcatgcgcggcaatcaaacgaaggtgggctaa

SEQ ID NO: 75363 - DNA, 588 bp, Citrobacter koseri
atggatattctctcaactctctttcaacagcagacccgaaaaatagggatgatagtccccggcgtggttgtttctgagaagcacaccgacacgctggagataaccgagcaccctgtcgaggttggggccgccatcgccgaccatgcctacaaaaaaccgtctgaagtggtgatggaggtcggtttcgctggtggcggatcgttgctggattttgccagtaatctgacggccaccagcctgctcggtctgagcccccagcagacatatcaggagatactcgacctgcaggcgagccgtattcctttcgatgtggtgaccggcaaacggctgtacagcaacatgctaatccgcgcgctggaagtgacgacagacaagacaaccgaaaacgtcctgtccgccgtcctcaccctgagggaggttcttatctcccagacgcagcagatcaccgtcgcggataaaaccaacatgaaggacggcgccagcacgtcggcggtactgaataccggcaacaaaaccacaaagccgccaaatacctctctgctgaaaagcatcacgggtaacgcggcgtcattactggggctcggctaa

SEQ ID NO: 75364 - DNA, 303 bp, Citrobacter koseri
atggcaattcaggaaatcccgctgacagcggataaccagcaattcagcatcatcctggcaggtaccacctggcggattagcatcacctggcgcgatctgtactggattatggacctgcagaacgacagaggggagccggttatctccggtattcctctcgtaacgggggctgacctgctggcgcagtacggctatatggggctcggctttaagctggtggtggtctgtgacgacagcacacaggactatccgacgaaaaccgacctgggcggccgcagtcatttactggtatcaacggagtaa

SEQ ID NO: 75365 - DNA, 1068 bp, Citrobacter koseri
atgtcacagaactggatgaggcatttcgagctgcagatcgtggacgagaacgggcaggggattgagctcagcgattttaaagtgacctttacgattgactggttcaacatcagcagcgcgtcgcgggttggaacgttcaaaatctacaacctgtcagcagatacggtgaaccgcatcaccgggcaggagttttcgaaagtgcgactgattgccgggtatgacggcatcgcaccggaggtatcggccagtgatgttggaacggtgagagaagtcgacgcggcaggcgtgggccagagtgatggccgcaactacggtctgattttcagcggtgaaattcgctactcggtcacaggaaaagacagccccattgattcctatgtcctgattcaggcagcagatacagatctggcttttgccaccagcataacctcgcagacgctggcagccggttacacggtcgcagacgtgaaccgcgcgcttatgaaagatttcgaggccaaaggcgcgagcgaaggcctgacaccagaaatgcctgctaccgtattcccccggggccgggtgctgttcggcatgacacggcatcttatggataacgtggccgggcaatgcggcgcgacctggcagttcgtggacggtcagcgccagatggtggcaaataacgaatatgttcacgacgcgattgtgctcaacagcgccaccgggctgatcggtatgccgcagcagaccatcggtaacggcgtgaacgtccgcgcgctgattaacccgaacatccgggttaacgggctcattcagctggatcaggcttctgtattccgcaccgcgctgtcgaacaacgatattgctatggctggtgggcagatcaccgaccagaatacggacggcaatatcacgctcagcggcaccacggcgcagcctgccagcatcgcaacggatggcgtttatattgtgcgcgggattatgtacactggcgatacaaggggtcaggcgtggtacatggatatgatgtgcgaagcgcgtggcgcggcggatctccgttcggcgtcgtctttacagcgggaggtaggatag

SEQ ID NO: 75366 - DNA, 348 bp, Citrobacter koseri
gtgaaaaagtggattgttatcgtactctgtttccttccagggttagcgtttgctgcgaatcctggcggtatcacgcttcagtgtggtggctacaaattagagttgattcctgattcactgttcaggattaatggtgagacggttacctcccaaaaaattaaaacgctcggcaacggcaatggaatgaaggcagacatgggccttatgccagccaaagacggtaacaattacgggttcgagtttattcgtcgccctggtaccgaaacgcgtttcctgaacgttcaactgcttcagaacagcatggacgcgccgagaatcatcggatctttcccgtgcaagaaagtatag

SEQ ID NO: 75367 - DNA, 165 bp, Citrobacter koseri
atggataagcagacggaaaaacaactaatagcgcttcttgatgagctcttagaaaagggtgatttctttcactctgccattgagagcaacgacatgatgtttgatttcgaagaatggaaaaccagagctgtaaacctgcttattgacgctaaatcacaagaataa

SEQ ID NO: 75368 - DNA, 756 bp, Citrobacter koseri
atggcagtatctgaccagacccgcagcggcgaccttgccgaaacgtttaaatctgagcgggacacaacaaagaatcagatccgcgttgctttgcctggcattatccagtcattcgatccagatgcggttacggcggttgtgcagcctgctatccgttacgttgaaaccgataacgatggcaaccgcgttaccaaaaattatccgctgctggtggatgtgccggtggtatttccgcgcggtgggggatgcacgctaacgttcccggtgaaggccggcgatgaatgcctggtgatttttgccgatcgctgcattgatttctggtggcagaacggcggagtgcaggagccggtcgacgaccgggtgcatgatttatcggatgcgttctgtatcgtcgggccgcaatcgcaggcgcagaaaatcagcggtatcagcaacagcgccgcgcagctgcgtacagatgatggcgctgcgtttgtggaagtggccgcagggcataacgttacggttaaaactcccggcacgctgacggcgaatgcagaaggtggaaccacgatcacgtcgcccactatcacgctaaacggaaacgtaacaataaacggaaatctttctcagggtatgggggaaagtggaggtaccgcgacgatgctcggccctgttacggtgactaacgatgtgaaagcgggtggcaagagcctgatgacgcacacgcacggcggagtacagaccggcggcggtaatacaggagcgcctaactaa

SEQ ID NO: 75369 - DNA, 354 bp, Citrobacter koseri
atgcgatacagacgcgaagatgctgacggtgattacacctttggcagcggcgataatacctggctgattaactcacctgacgccgtggcgcaggccgtgaaaacacgattcgaattgtggtacgggcaatggtttctcgatacgacagagggaactccgtggattcagtctgtgctcggcaagcagaagccggaaacctacaacctggcgatacggaaacgcatcctcgaaacgaagggcgtgaagtcgcttctctcgttcaatacgacagtgaataccacgacgcgccgcgtctctttcactgctgaaatcgacactatctacggaacaacgacagtaaccagcgaggcataa

SEQ ID NO: 75370 - DNA, 1200 bp, Citrobacter koseri
atgaccctcaatttggacacactcggcttatcggcaacggtaaccgctgaggggatcagcgcgcctgattaccagacgatcctcgataccctgacgagctatttccagcagatttatggcagtgatgcttatcttgacccggacagtaaagacggccagatggtggcggtggtggcgctggctattcacgatgccaacaacacagcgattgccgtttataacagcttttcaccgtcgacaggttttggcgcagcactttccagtaatgtgaaaataaacggactggcacgccgcagcgccactaattcgactgttgacgtggtgctgaccgggacagcagggacgacgattacaaacggctcggtgaaagacgaaaataacgtgatctggaaccttccgccgtcggtgacgattggcgtgagcgattcagtgacagttacggcgacatgtgccagcagtggcgcagttgccgcgcaggcaggaagcgtatcgacaatcaacaccccgaccagaggctggagagccgttactaacccggctcctgctacggtcggtagcgcagccgaaaaagattcagagctgcgcgcccgtcagacaatcagcgtggcaaatccgtcgattacgccttttgaggcagttgatggaggtctggccgccatcggtggcgtgacgcgtcacaaactctatgaaaatgatacagggacaaccaacagccttggtttgccgccgcactctattgcggcaattgtcgaaggtggcgatgtcaccctgattgcgcaaaccatcagaggaaagaaagggcaaggtgtcaggacttacggcaccacgaccatcacggttcctgataaatacggtaacccgcaggatattaatttttcacgacctgtcgatgttcctgtttatgcatcaatcaggattaatgtctttgcaggctatacatccctcattgcgacacaaatgcagcaggccgtcgctgactatatcaattcgctggctatcggggacggggttttgattagccgggtttattccccggctaacctcggtgtagtaagtggtgggaacgcaaaatattacgacatcactgaattgctgattggtcgttcggccgaaagtcttgcggctgcaaatatcagcgtcgtgttcaatgagtcggcatcctgcaagcctgaaaacgtcgttataacggtgaatacatga

SEQ ID NO: 75371 - DNA, 666 bp, Citrobacter koseri
atgagcaaatacaccgaactgataaccaactatcacgcagggaaaccgcgttacttcagccatatcgacctttccacccgaccatttactgatatctcaaccgctcttatagggctaatcaaagcattcgatatcgacaacgctatcggcgcgcagctcgacattctcggtgagtggatcggtttaagccgggtagtaaggcaacccatcacaaacgtttatttcagcttcgatattgatgggcttggctttggacaaggtgtctggcaggggccatatgaccccgatgaaggttatacgacgctcagcgacgacacgtaccgcctgatactgaaggcaaaaatcgcaatcaatagctgggacgggcaaaacgactccttacccgcaatcctcgatatggcgactgctggctcggggctacgaatgcagatcgtcgacaaccaggacatgactatctccgtccgggtttttcctgatacggacatatctgatgtttctctcgaaatactggccgtcatccggcaaggctacctcacggtgaaagcagcgggcgtatacgctggtgaaattgaggtgccttcgacgggatcgcgtttcttcggttttgacatagataacgaatacacaggtggatttgatgaaggcgcatggggagtacctatctaa

SEQ ID NO: 75372 - DNA, 1053 bp, Citrobacter koseri
atggcgattaataactttaaacctttcgcggcggcgtcaggagccaatgtaaccagccaggccgattacgaagcattaacggcgctggcaacagggtttactgctggagtggctaaatcagcgcagatgaataaagccatcaggcaaggcactttcatcgccgctggtgtggctcaattcgtggcagaagcatcgaatgctgacgttctggatgatggggatcttaataaattttctaccttactgaaggatacaattacgctcgttgcatctcaggcagcaggtacgctggtgggacaacctatcccgtggccgtctgatgttattcccgatggatacgcactaatgcaggggcaaccgtttgacactgcacagtatccgaaacttgctgttgcatatccgaatggtgtcatcccggatatgcgagggcagacggttaaagggaagccagccagtggtcgtgcggtgttatctcaggaacaggatggaataaagtcgcatactcatacggcgacagccgcatcgaccgatcttggaacgaaaacatcgtcgtcatttgactactcaacaaaaactaccaatgcgccagatttaggatcaaaaacaacgtcatcatttgactatggtacgaaaacgaccaataacactggagcgcatacacatacggttagtggtacaacggcttcagctggtgagcatgcgcatagtatgacaatttaccacctggatacatctaatcagcaggtacggcctggggcaggtggccctaacgttcagggttcaggtacttataataccagtagtgctggagcgcatacacactcggttagtggtactgctgcttcggcaggtgcacatgcgcacactgttgctattggtgcacacactcacacagtggctatggggacacattcccacaccgttgctattggagcacacacacatactgtcgccatcggtgcgcatgggcataccattacggtagcaaatgctggtggtacagaaaacacaattaaaaacattgcatataactatttagtgaggcttgcataa

SEQ ID NO: 75373 - DNA, 570 bp, Citrobacter koseri
atgaccttcaaaatgagtaaagaagcgcagactattaaaatttacaatcttcgtgctgataccagcgaatttattgggggcggggatgcatacattcctgcacatacaggcttaccggcctactgcactgatattgaacctccagaggctccaactggtcatgttgctgtttttgacgacaacgaacaaaaatgggatgtggtcgaagaccatcgcggtaaaacggtctatgacatccagactggacaggctatttctatcgaatcactgggatcattgcctgataacgtagtttcagttgcaccggatggctcatatgaaaaatgggatggcaaaaaatgggtaaaggatgaagaagcggaaaaaaatgcccgcctgatcgaagcaacagggaagcaacaccaactgattactgatgcccgtatctttattggtgagtggcaaacagctctgatgttaggctcactctcggacgagaataaggtcaaacttcagtcatggattgattatattgaggcacttaaaaatgttgacttgagcgatcctgactggcccaaacaaccagcttaa

SEQ ID NO: 75374 - DNA, 978 bp, Citrobacter koseri
atgagtgccccattcttgttaagcgtcataattccttgctacaactgccaggattatatttatgaatgcttgcaatctgtatgcagccaggttgatgatagtgttgaaatcattgtaattaatgatggttcaacagataactcgcttaaagaaatagaatcttttatcaaaaaagcgactcagactgtcagagtgatatctcaagcaaaccaggggatatccatcgcaagaaataatggaatagaggcatcatctggaaaatacatagcactactggatggagatgacctttggacgccgtccttctgggagaaaatccgcccagtgatagagaatggcgaaactgatctaatcgagtttaatataaaagtgctttatgaatatgataacaaaatgaaagtcccattaataacgtcatctgatggacactttaaaataaactcaataagtgatttacgtgaaacttttctaagaagtcaatggtatgcctgggccagagtttacaaaaaggatttatttaatgaatttaaatttcctgctggaaggcgctacgaagatgttgcactattaccaaaaatatatctttcagcaaaagaaatccaccgtataactgatgaactggtactctatcgcatcaggcagggaagcataaccacctccacggcaagtatggatgtagatgatataatatatgctttgggcgttttcaaagagttagctaatggtaaaactaaagatgagattgaaatcatatcgccatctgtatacactacatacaattttgcaagaaaaatcagcaaaaggatttatggctattgtttttttaacaatacgcaaattcatgatataaagaaagcactcaagccatatttcagaacacaaaaaacaagccgtcgtattagattgttttttatccgtgaattttgccttgtaaataaatttaaatacaagttaaaactactcgctggcgcgaaatag

SEQ ID NO: 75375 - DNA, 411 bp, Citrobacter koseri
atgttatatcccattgctattgataaaggcgattcatccttcggcgttcgcgtaccggatattcccggctgcttttctggtggtgataactaccaggacgcaatcgagagtgtacgtgaagcaatcgacgcacatatagaattactggtggaagatggcgaagcggtaccagaagcgaccagtgtggaaaactggctggacgatcctgattacgctggagtggtatgggcgctggtggatgtggatgttacgcgattgatggggaaagcggaaaaaatcaatgtcacccttccctctttgttgatccgccgtatcgaccagtttgtcgccgcacaccctgagtacggtagccgttctggcttcctgtcccgcgtagctgctgataaagtgataggacgagaaaaacgataa

SEQ ID NO: 75376 - DNA, 180 bp, Citrobacter koseri
atggatagcaggaatgcaatagcaatgatagaagccgatgggtggtatctggtgagagtaaaaggcagtcaccaccagttcaaacacccaacgaagaaagggctggtaacggtgaaacatccacaaaaggacataccgctaccaacactgaaaagcatcaaaaaacaggcggggctttaa

SEQ ID NO: 75377 - DNA, 270 bp, Citrobacter koseri
atggtcgcagaaaaaaaatcgaacgcaggcgcaatgccagaattaactgattttgctatcagctattgtgcccttactgagcatgtcctgctgcatgcccgcttcacagatactatggcaagggtgccggcctggccttctgtggaatttcctgatcaaacgatatgtttatctcgccgtcaggctgagaacctcctctatgaactcaagaaagccgtggactacattgacgctggaattgagcatccttccatcaaattcattgactaa

SEQ ID NO: 75378 - DNA, 666 bp, Citrobacter koseri
atgaaaacaggaccgttaaacgaaagcgagctggaatggctggacgatgtactgacaaagtacaataccgatcacgcgattctggatgtgtcagagttggatggtttactgacggctgtactcagttcgccgtatgagattgagccagagcaatggctggtcgcggtatggggtggggcgcaatatgttccgcgctggtcctctgaaaaggagatgacgcgttttatggaactggcgtttcagcatatggcggatacggcagacaggcttaatgagttcccggaacagtttgaaccgctgttcggtctgcgtgaagtcgaaggtcatgagctgaccatcgtggaagagtggtgctttggctatatgcgcggggtcgcgctctctgactggtccaccttaccggatacgctacaacccgcgctgaaagccattgcgctgcacggtacggaagagaacttcgccgtggttgaaaaaatgtcaccagaagcgtttgatgagagcgttaacgcgattcgtctggccgccctggatttacacgcgtactggatggcgcacccgcaggaaacgccggtgcaggtgccggtaagagcggaagtaaaggtggggcgcaacgatccttgtccctgcggcagcggtaaaaaatataaacagtgctgtctgcactaa

SEQ ID NO: 75379 - DNA, 1212 bp, Citrobacter koseri
gtgaaaaatagaactctgggtagtgtttttatcgtggcgggcaccactatcggcgccggtatgctggcgatgccgttggccgccgctggcgttggtttcagcgtcacactggcgttattgattgggttatgggcattgatgtgctacaccgcgctgttgctcctggaagtatatcagcacgttccggcagataccgggttaggaacgttggcaaaacgctacctcggacgttatgggcaatggatcaccggctttagcatgatgtttctgatgtatgcgctcacagcggcctatatcagcggggccggcgaactgctggcctcaagcatcagcgactggacgggcgccgatatgtctccggcgatgggcgttttgctgttcaccgtggttgccggtggcgtcgtgtgcgtcggaacctcgctggtcgatctgttcaaccgctttctcttcagcgccaaaattatcttcctaatcgccatgctggcgctgctgatgccgcatattcataaagtgaatctgcttacgctgccgctgcaacagggtctggcgttatcagcaattccggtcatttttacgtcgttcggttttcacggcagcgtacccagcatcgtcagctatatgaacggtaatattcgcaaactgcgatgggtatttatcaccggtagcgcaatcccgctggtggcatacattttctggcaacttgccacgctcggcagtatcaactcttctacctttatgggcttgctggccgatcatgccgggttaaatggcctgttgcaggccttgcgtgaggtggttgcctcgccgcacgttgaactggcggtacatctgtttgccgacctggcgctggcgacatcgtttttgggtgtggcgctgggattgtttgattatctggcagatctgttccagcgacgcaacaccgtcgccgggcgtctgcaaaccggcgcgattaccttcctgccgccactggcgttcgcactcttttacccgcgcggctttgtgatggcgctgggatacgctggcgtcgcgctggcggtgctggcgttgctgatcccttccctgctcgcgtggcaaagcaggaagcataatccgcaggcaacgtatcgcgtagcgggcggcgttccggcattagccctcgtctttacctgtgggatagtggtgatcggcgtacagttttgtatcgccgccgggctgctgcctgaagtgggataa

SEQ ID NO: 75380 - DNA, 240 bp, Citrobacter koseri
atggattctattcacggccacgaagtgctgaatatgatgattgagtcaggcgagcagtattcgaataccagcctggaagcggcgattacggcgcgttttggtgaacaggcgcgttttcatacctgttcggctgctgatatgacggcggcggagctggtggcgtttctggcggcgaaggggaagtttattgcgaaggatgacggcttctctacgcacgaaagcaagatctgccgtcattga

SEQ ID NO: 75381 - DNA, 498 bp, Citrobacter koseri
atgctgaaaacagaaatgatcgacaaactgaatgagcaaatgaaccttgaattatattcttctctgctctaccaacagatgagcgcatggtgcagctaccatagctttgaaggggcggcagcgttcctgcgtcgtcacgcgcaggaagagatgacgcatatgcagcgcctgttcgattatctgaccgataccggtagcttaccgtgcatcaatacgatctcttcgcctgctgccgaatatgcttcactggatgaactgttccgcgccacctacgaacacgaacaattaattacgcagaaaattaatgaactggcgcatgccgcgatgaccaaccaggattatccgacattcaacttcctgcaatggtatgtcgctgaacagcatgaagaagagaagttatttaaatctattattgataaattaacgctggcagggaaaagcggtgaaggtctgtacttcatcgataaagaactgtctacgcttgatacccaaaactaa

SEQ ID NO: 75382 - DNA, 336 bp, Citrobacter koseri
atgaaaacctttatccttggcctctcactcatagccctgacgggatgtaccctcaccaaacaagcgcaggtcagtgaaaccaacccgacaagcgggattgtccgcctcagttataaccaggcgatgatgcaaacggcgcgcgcggatgattatgttgcgcacggtacggcgacacgcgaatgtcagcagatgggatacgccaacgccatcgcattcggtcagccagtgtcaacctgtagcgtttatgccggttcgctgtgcatgaacaccagaatcacgctgtcttatcagtgtcagggcgtagccatccagccaatatccgttggcgggtattaa

SEQ ID NO: 75383 - DNA, 639 bp, Citrobacter koseri
atgaaaattgcactgatgatggaaaacagccaggcagctaaaaatgccaccattcatcgcgagcttaaagcagtagcggatgaaaagggattccctgttttcaacgtcgggatgagcgatgaaaacgaccatcatctgacttatatccaccttggtattatggccagcattctgcttaacgccaaagcggtggattttgttgtgacgggttgtggcaccgggcagggcgcgctgatgtcgctgaatattcatccgggcgtggtgtgcggctactgcatcgacccggcggatgcgttcctgtttgcgcagattaacaacggtaatgcgctttctctgccattcgcaaaaggctttggctggggtgcggagttgaatgtgcgtttcatctttgaaaaagcattcaccggccgtaacggggaagggtatccaccagaacgtaaagaaccgcaggtacgtaacgcgggcattctgaaccaggtgaaagcggcggtggtgaaagaaaactatctggatacgctgcgcgccatcgatcctgaactggtgaaaacggcggtctccggcccacgtttccagcagtgtttctttgacaattgccaggataaagagatcgaagcgttcgttcgcgacattctcggttaa

SEQ ID NO: 75384 - DNA, 252 bp, Citrobacter koseri
atgtcccaaccactgaacgccgatcaggaactggtctctgacgttgttgcctgccagttagttatcaaacagatactggatgttattgacgttattgccccggttgaagttcgggagaagatgtccagccagttgaaaaacatcgattttaccagccaccctgccgctgcggacccggttactatgcgggccattcaaaaggcgattgcgttgattgagctgaaattcacgccgcaggacgaagcgcactaa

SEQ ID NO: 75385 - DNA, 504 bp, Citrobacter koseri
atggcgacagctggaatggttcataagctcaacacccaaatgaaccttgagttttacgcatctaacctctacctccacctgagcgactggtgttttgaccacagtctgaccggtacggcgacttttcttcgtacccaggcgcagggaaacgtgacccagatgatgcgcatgttcaattttatgaagaacgcaggcgccaaccccatcgtgagagccattgatgttcccggcgaagagttaacctgtcttgaagagttatttcaaaaaacgctggatgagtatcagcaacgcgccagcacgctctcacgcttaaccgacgaagccaaagcaatgaatgacgcgccaacgctcaactttctccacgacctggaaaaagatcagcagcaggatggcgttctgttacagacgattctcgatgaagttcgcagcgcaaaacgcgcgggattgtgtatggtgcaaacggacaaacacttactcaacgtcgtcaactatcaacaccactaa

SEQ ID NO: 75386 - DNA, 558 bp, Citrobacter koseri
atgaaaaaggtcgctgtcctgctggcgccaggattcgaagaagcagaagccgtggtcactattgatattctgcgtcgcctgaatattgatgttgaaacgctggcctgcgcggaatctcgcgcggtagtgagttatcacgatattccaatggttgcggacaacaccctcgccgggcgtctggacacgttgtatgacgccatcgtcttgcccggcggcccgcaggggagcgctaatctggccgccagcgcgcaggtgatcgacttcgtttcccgccatgacgctgcgggtaaactgatctgtccggtctgctccgccgcagcgcgggtgctggggggcaatggtctgctgaaagggcgccgttacgtctgctctggcgacctatgggaaaatgtgactgacggtgaatatgttgatgcgccggtggtggaagatggcaatctcttgagcggcaaagggttagggcatatttttgattttgcgctgacgctggctgctcgtctgtcaggggatgacgcttctgttcgcgatcatgccgatcatatttactatgcctggtaa

SEQ ID NO: 75387 - DNA, 990 bp, Citrobacter koseri
atgcacaaatttactaaagcgctggcagccatcggtctggctgccgttatgtcacaatccgctatcgcggaaaccatgaagctcggttttctggtgaaacaaccggaggaaccctggttccagacagaatggaaatttgccgataaagccgggaaagatctgggttttgaggtcattaaaattgcggtgccggacggtgagaaaaccctgaacgccatcgacagcctggcggcgagtggggcaaaaggcttcgttatttgtaccccggacccgaaactgggttcagcgatcgttgcaaaagcgcgtgggtatgacatgaaggtaatcgctgtggacgatcagttcgtcaacgcgaaaggtaagccaatggacaccgtaccgctggtgatgatggcggccacgaaaattggcgagcgccaggggcaggagctgtataaggagatgcaaaaccgcggctgggatgtgaaggaaacggcggtgatggcgattaccgctaatgaactggataccgcgcgtcgccgcacgtccggctcgatggacgcgctgaaagctgcgggcttcccggaaaaacagatctatcaggttccaacgaaatccaatgatattcccggcgcattcgatgccgctaactctatgctggttcaacaccctgaagtgaaacactggctgattgtcggcatgaatgacaacaccgtgctgggcggcgtgcgcgccaccgaaggtcagggctttaaggcggcggacgttatcggcatcggcattaacggtgtggatgcgatcagcgaactgtcaaaagcgcaggcgacaggattctacggctcgttgctgcccagcccggacatacacggctataaatccagtgaaatgctctacaactgggtaaccaaagatgcggaaccgccaaaattcactgaagtgaccgacgtggtgctgatcacccgtgacaacttcaaagaagaactggcgaaaaaaggtttaggcggcaagtaa

SEQ ID NO: 75388 - DNA, 1515 bp, Citrobacter koseri
atgcaacagcccaccccatatctctcatttcgcggcatcgggaaaacgttccctggcgttaaggcgctgacggatatcagttttgactgttatgccggtcaggtgcatgcgctgatgggcgaaaatggcgccgggaagtccacactcttaaaaattctcagcggcaactatgcgccaaccacgggatcgctggcgatccgtgggcaagagatgacctttgccgacaccacggctgcactgaatgccggtgtcgccattatttaccaggaactgcacctcgtgccggaaatgaccgttgcggagaatatctatctcggccagcttccgcataagggggggattgttaaccggacgctgctcaactacgaagccggtcttcagttacaacatctggggatggatatctccccggataccccgctgaaatacctctcgattggccagtggcaaatggtggagattgcgaaagcgttagcgcgtaacgccaaaattatcgctttcgatgaaccgaccagctcactctctgccagggagatcgagaacctgttccgggtgattcgcgaactgcgcaaagaagggcgcgtcattctgtatgtgtcgcaccgtatggaagagatctttgcactgagcgatgccattaccgtgtttaaagatggccgctacgttaaaacgtttaccgatatgcagcaggttaaccatgacgcgctggttcaggcgatggttgggcgcgatctcggcgatatctacggctggcagcctcgcgcctgtggcgcagagcggctgcggctgcaagaggtgaaagcgcctggcgttcgcgcgcctgtcagcttatccgtacgcagcggcgaaattgtcggcctgtttggtctggttggcgccgggcgcagtgaattaatgaaagggctgttcggcggaacgcgcatcaccgaagggcaggtgttcattgacgagcagcccattgatatccgcaaaccggcgcacgcgattgcggcaggcatgatgctgtgcccggaagatcgcaaagcggaggggatcattcctgtgcattcggttcgcgacaatatcaacatcagcgcccggcgtaagcatgtgctgggcgggtgcctgatcaataacggttgggaagagagcaatgccgaacaccatattcgctccctcaatataaaaacgccaggtgctgagcaactcattatgaatctctccggggggaatcaacagaaggcgattctgggacgctggttatcggaagagatgaaggtcattttgcttgatgagccgacgcgcggtatcgatgtcggcgcaaaacacgagatctacaacgttatttacgcgctggcggcgcgcggtgtggccgtgctgtttgcctccagcgatctgccggaagttcttggtgttgccgaccgtattgtggtgatgcgtgaaggtgagatcgccggtgaattacttcatgaacaggcggatgaacggcaggccctgagccttgctatgcctaaagtcagccaggctgtcgcctga

SEQ ID NO: 75389 - DNA, 987 bp, Citrobacter koseri
atgtcttctgtaactacatccggttctggcgcacctaagtcgccgtttagcttcgggcgtatctgggatcaatacggcatgctggtggtgttcgccgtcctgttcctggcgtgtgcgatctttgtgcctaactttgccacgttcatcaacatgaaggggctggggctggcgatttcgatgtcgggtatggtggcgtgcgggatgctgttttgtctggcgtccggcgattttgacctctccgtcgcctcggtaattgcctgtgccggcgtcaccaccgccgtggtcatcaatatgaccgaaagcctgtggattggtgtggctgccgggctgctgctgggcatactctgtggactggtgaacggttttgttatcgcgcgtttaaagatcaacgccctgattaccacgctcgccacgatgcagattgttcgtggtctggcctatatcatctctgacggtaaagcggtagggattgaagatgagcgcttcttcaccctcgggtatgccaactggtttgggctacctgcgccgatctggttaacggtagggtgcctggttatctttggtttattgctgaataaaaccacgtttggccgcaatacgctggcgattggcgggaatgaagaagcggcgcgtctggccggggtgccggtagtacgcacgaagatcattatcttcgttctctccgggctggtgtcggcggcggcggggattatcctggcgtcgcgtatgaccagcggccagccaatgacctccattggttatgaactgattgtgatttcagcctgcgtattaggcggtgtctccctcaagggcggcatcggaaaaatctcatatgtggtcgcaggggtgttgatcctggggacggtggaaaacgccatgaacctgctgaacatttccccctttgcacagtacgtcgtgcgcggcttaatcctgctggcagcggtaatcttcgaccgttacaaacaaaaggcgaagcgcaccgtttaa

SEQ ID NO: 75390 - DNA, 804 bp, Citrobacter koseri
gtggcagaaccgttaaccgtatcccccgaactgtccgcaaactatgcttattttttcgatcttgatgggacgctggcggagattaaaccccacccggatcaggtggtggtgccgcacaatattctccagctgttacaccgcctctcgacgcataacgcaggggcgctggcattgatttcagggcgctcaatggctgaacttgatgcgctctcagcccccttttgctttcccctcgccggggtgcatggggcggaacgccgtgacatcaatggtaatacccatatcgtgcgccttccgcaggcgatagcacgcgatgtcagcgcgcagctgcacgccgcgctgggaaatcttcctggggcggaactggaagcgaaaggcatggcctttgcgctgcattaccggcaggcgccgcagcatgaggcgacgttgctggcgctggcgcagcacattacgcagaaatggccgcagcttgcgcttcagccgggtaaatgcgtggtggagattaaaccgaaaggcgcgaacaaaggggaggccattgccgcgtttatgcaagaagcgccatttgcagggcgtatccctgtctttgtgggcgatgacttgacggatgaggcgggctttgacgtcgtcaataatttgggagggatttcagtcaaagtgggtgccggggcgacccgggcaacaggacgtctggcaggcgttcctgaggtctggcgctggctggaagaaattaacaatccacaacaagaaaaaaaattaatgaatgacaggagagatggctatgggtcgtttagtcgtagtatctaa

SEQ ID NO: 75391 - DNA, 1422 bp, Citrobacter koseri
atgggtcgtttagtcgtagtatctaatcgaattgctcccccggataataaaggcggcgcgggtggcctggcagttggcgtactgggcgcgttgaaagcggcgggcggattgtggttcggctggagtggcgagacgggcaacgaggataagccgttaaaaaaggtcacacgaggcaatatgacctgggcgtcttttaatctgagcgagcaggactacgaggaatattattgccagttttcgaatgcggtcttatggcctgccttccattatcgactcgatctggtgcagttccagcgccccgcgtgggaagggtattcacgggtgaatgcgctgctggcggataagctgctgcccttactgaaagatgacgatattatctgggttcatgactatcatttattgccgtttgccagtgaattgcgcaagcggggcgtgaataatcgcatcggctttttcttgcatatccctttcccgacgccggaaattttcaatgctttgccgccgcatgatacgctgctggaacaactgtgtgattttgacttactgggattccagacggaaaacgaccgcctggcgtttctggacagtctgtcaagtcagaccagagtaaccacgcgcggcagtaagagccattcggcatgggggaaatccttccgcactgaggtctatcctattggcattgaacctgacgagatcgcacaacaggcttccgggccgttaccgccgaaactggcgcagctaaaagcggagctgaaaaatgtgcaaaacattttttccgtcgagcgtctggattactccaaaggattaccggagcgtttccaggcgtatgaagcgctgctggagaaatacccccagcaccacgggaaaattcgctatacgcaaatagcgccgacctcgcgcggtgaagtgcaggcttatcaggatatccgccaccaactggagacggaagcagggcgtatcaacggtaaatatggacagcttggctggacaccgctctactatcttaaccagcactttgatcgcaagctgctgatgaaggtgttccgctactcggatgtcgggttagtgaccccgctgcgggatggcatgaatctggtcgcgaaagagtttgtcgccgcgcaggacccggcaaatcccggcgttctcgttttgtcgcagtttgccggtgcggcaaatgagttgacgtccgcgctcattgttaacccttatgatcgggatgatgtggccgtagcgctccaccgcgcgttgaccatgccgcttgccgaacgcatttcacgccacgcggaaatgcttgagacgattattaaaaatgatattaatcactggcagcaacggtttattcgcgacctaaaggatgtcgcgccacgtagcgcagaaacgctgcatcgcaataaggtcgccaccttcccaaagcttgcctga

SEQ ID NO: 75392 - DNA, 429 bp, Citrobacter koseri
atgagctatacgcatattcttgtcgccgtcgccgttacccccgaaagtcagcagctgttagcgaaagctgtctccattgctcgtcccgtcaatgcccgcattagcctgattaccctcgcctctgatcccgagctgtataatcaattcgccgcccccatgctggaagatttgcgggaggtgatgcatgaagagacgcaggattttctcgacaaactgagtgcgaaggcagactacccgattgaacaaacgttcattacttacggggagttaagcgcgcatattctggatgtgtgtcgtaagcagcaggtggatttggtcatttgcggcaatcataatcacagcttcttttcgcgagcgtcctgctcagcgaaaagtgtcgttagcgccagtgaagttgatgtattgctggttccgcttgccggtgattag

SEQ ID NO: 75393 - DNA, 351 bp, Citrobacter koseri
atgcatacatccgagttgctgaaacacatttatgacatcaatctgtcatatttactccttgcacagcgtctgatcgttcaggacaaagcatccgcgatgttccgccttggtatcagtgaagagatggcgaacacgttgggtactctgactcttccacaaatggttaaactggccgaaacgaaccagctggtatgtcatttccgttttgacaaccaccagacagttacccagctgacccaggattctcgcgttgacgatcttcagcaaattcataccggtatcatgctttcaacacgcctgttacacgatgtgaatcaggccgatgatgcggcgcgtaagaaaagggcttga

SEQ ID NO: 75394 - DNA, 582 bp, Citrobacter koseri
atgatgagtgaaaaaagcattgttcaggaagctcgcgatatccagttagcgatggaattgatctctttgggcgcccgtttgcaaatgctggaaagcgaaacgcagttaagtcgtggtcgcctcatcaaattatacaaagagttacgcggcagtcctccgccaaaaggtatgcttcctttttcaacggactggtttatgacatgggagcaaaacattcatgcctccatgttttgcaacgcctggcagttcttactcaaaaccggtctgtgcagcggcgtggatgcggtcattaaagcgtaccgtctgtatctggaacagtgcccgcaggcggaagacgggccattgttggcgttaacacgcgcatggacgctggtgcgtttcgtggaaagcgggttgcttgaattatcgacctgtaattgctgtggcgggaattttattacccatgcgcatcagcctgcgggaagttttgcctgtagtttgtgccagccgccgtcccgcgcagtaaaaagacgtaaactttcccaaaatgctgccgatattattccacaactgctggatgaacagatcgaacaggctgtttaa

SEQ ID NO: 75395 - DNA, 891 bp, Citrobacter koseri
gtgcttatcttattaggttacctggtagttctcggtacagttttcggtggttacatgatgaccggcggacaccttggagcactctatcaaccggctgaattcgtcatcatcggtggtgcggggatcggggcattcattgtcggtaacaacggcaaagcgatcaaagggacgttaaaggcgatcccgttactgtttcgtcgttcgaaatacacaaaagcgatgtacatggatttgctggcgttgctctatcgcctgatggccaaatcgcgccagcaggggatgttctcgctggaacgtgacattgaaaacccgaaagagagtgaaatttttgccagctatccgcgtattctggccgacgcgatcatgcttgattttatcgtcgattatctgcgcctgatcatcagcggcaacatgaatacctttgaaattgaggcgctgatggatgaggaaattgaaacccacgaaagcgaggcggaagttcctgccaacagcctggcgctgatgggcgattcattaccggcatttggtatcgttgcggcggtcatgggggttgtccatgcgctggcttccgccgatcgtccggcggctgaactgggggcgctgatcgcccatgcgatggtggggacattcctcgggattttattggcctatgggtttatctcgccactcgccagcgtgctgcgtcaaaagagcgctgaaaccaccaaaatgatgcagtgcgtaaaaatcacactgctttctaacctgaacggttatgcgccgccgatcgccgtcgaatttggtcgtaaaacattgtattccagcgaacgtccttcgttcattgaactggaagagcacgtacgcgcagtgagaaacccgaaccagcagcagacgacgaccgaggaagcatga

SEQ ID NO: 75396 - DNA, 927 bp, Citrobacter koseri
atgaagaatcagccccatccaattatcgtcgtaaaacggcggaaacataagggtcacagcggggcgcatggctcctggaaaattgcttacgccgactttatgacggcgatgatggcttttttcctcgtcatgtggctgatttctatctccagtcctaaagaattgattcaaattgccgaatatttccgtacgccgctggcaacagcgataacgggcggacatcgcatcgcgaacagtgaaagtccgatccccggcggcggcgaggactacacccagcagcagggtgaagtgaacaagcaacccaatattgatgaactgaaaaagcgtatggagcagagccgtctgagcaaattgcgcggcgacctggatcagctgattgagtccgatcccaaactgcgcgcattgcggccgcacctgaagattgacctggttcaggaagggctgcgcattcagattatcgacagccagaatcgcccgatgtttaagacgggcagcgcggaggttgaaccttacatgcgtgacattctgcgtggtattgcgccggtgttgaacggtattcctaaccgcatcagcctttccggtcatacggatgatttcccgtacgccagcggcgaacggggatacagcaactgggaattgtcggccgaccgcgccaatgcttcgcgtcgcgagctggtggttggcggtctggatgatggaaaagtattacgggtggtaggcatggccgccacgatgcgtctgagcgatcgcggtcctgatgacgccatcaaccgccgtataagtctgctggtgttgaacaagcaggcagaagaggccattttgcatgaaaacgctgaaagccagaatgagccggtaagtgtcttacaacagccagcggcactcccgccggtaagcgttcccacatcgccaccagccaatccgaggtga

SEQ ID NO: 75397 - DNA, 2034 bp, Citrobacter koseri
gtgagcatggatattagcgatttttatcagacattttttgatgaagctgacgagctgttggctgacatggagcagcacctgcttgatttggcgcctgaagccccggactctgagcaactgaatgccatttttcgtgcggcgcactccattaaaggcggcgcaggtactttcggctttaccattttgcaggaaacaacccacttgatggaaaacctgctggatgaagcccggcgcggtgagatgcagctcaataccgacattatcaacctgtttttggaaacgaaagatattatgcaggaacagctcgacgcctataaaagctcggaagagccggatgccgcaagcttcgaatatatctgcaacgcgttacgtcagttagcgctcgaggcgaaaggggaaaccgctccggcggtggttaacgctgccaaactgagcgtcgtcgacggtacggcgatacaggaagaggaagtcgcacaggaaaacagcgcggaagagagcaaactgcgcgtggttctttcgcgcctgaaagccaatgaagtcgatctgcttgaagaagagttgggcaacctggccaccttaacggatgtggtgaaaggcgaggattcgctgtccgcgaccctcgacggcacgatcgcggaagatgacatcattgcggtgctctgctttgtgattgaagccgatcagatagcctttgagacggtctcctcagccccggtcgcgcaggtcgaagagcctgttgccgtggcaactacgccgcaaccgaccgcagtggttcctgttgccaaagccgccgccagcgaaccgcagtccgggcgcgccgagcgtgaaaagccggcccgtgagcgagagtcaaccagtattcgcgtggcggttgagaaagtagaccagttgatcaacctggtcggcgaactggtgattactcagtcaatgctggcccagcgttctaatgaactggacccggttaatcatggcgatctcatcaccagcatgggtcagttacaacgtaacgcccgcgatctgcaagagtcggtgatgtcgattcgtatgatgccgatggagtacgtcttcagccgcttcccgcgtctggtgcgcgacctggcaggtaagctgggcaaacaggtcgaactgaccctcgtcggcagctcgacggaactggataaaagtctaattgaacgcattatcgatccattaacccacctggtgcgcaacagcctcgatcacggtatcgagatgccggaaacacgccttgaagccgggaagaatgcgatcggtaatctgatcctctccgctgaacaccagggcggcaatatctgcattgaagtaaccgatgacggcgcggggctgaaccgcgagcgcattctggcgaaagctgtctctcaggggatggcggtcaacgaaaacatgaccgatgaagaagtgggcatgttgatttttgcgccgggcttctccaccgccgagcaggtgacggatgtttccggtcgcggcgtgggcatggacgtggtgaaacgtaacatccaggagatgggcggccacgttgaaatccagtcaaaacaggggacgggcaccaccattcgcattctgctgccgctgacgctggctattctggacgggatgtccgtccgcgtggcgggcgaagtgttcattctgccgctgaatgcggtaatggaatcgctgcaaccgcgtgaagacgatctgcacccgctggccggaggcgagcgggtactggaagtgcgcggcgagtatctgccgctggtggaactgtggaaagtctttgatgtcgttggcgccaaaactgaagccacgcagggcattgtggtgatcctgcaaagcggcggtcgccgttacgcactgctggttgatcagcttattggacagcaccaggtggtagtgaaaaacctggaaagcaactatcgcaaggtgcctggcatttctgcggcgacgattctgggcgacggcagcgtggcgctgatcgttgatgtctccgcattgcagggtttaaaccgtgaacaacgtatggcgatcacagccgcctga

SEQ ID NO: 75398 - DNA, 504 bp, Citrobacter koseri
atgaccggtatgagtaatgtaaccaaactggccggcgagccgtcaggtcaggaattcctggtatttacactgggagatgaagagtacggtatcgacatcctgaaagtgcaggagatccgtggctacgatcaggtcacgcgcatcgccaacacgccttcttttattaaaggggtgacgaacctgcgcggcgtgattgtgccgattgtcgatctgcgcgtgaagttttgccagggcgacgttgagtataacgataacacggtggtcatcgtgttgaatctgggacaacgcgtggtagggattgtggtggacggcgtgtctgacgtgctgtcgctgacggcggagcaaattcgcccggcgccggagtttgccgttaccctgtctacggaatatctgaccggtctgggcgcgcttggcgaacgtatgttgatcctggtgaacattgagaaactgctgaacagcgatgagatggcgctgcttgatatcgccgcttcccacgttgcataa

SEQ ID NO: 75399 - DNA, 1269 bp, Citrobacter koseri
gtggcaagtgcaaacaaactcacgttatttatcgtgatcttcatgctggcaggcatcctgtcaggcgcggtgattcactcttacgcgtcacaggaggcgatcgccgcctggtccgataacatcacgctcctcaccgatattttcttacggctcattaaaatggtgattgccccgctggtcttcagcacgctgaccgtgggcatcatgcgtctgggcgaaaccgccactatcggccgcgttggcggtaaagcgatggtctggtttatcagttcttccgtgttgtccattctggtggggctgtttatcgtgacgattgagcatccgggcagcggtctgaatctggcaattccggcagaatcggtcgacaccggacttgcggtgggcggcatgagcttaaaaggattcctgtcgcacaccattccgaccagcattgccggggcgatggccaataatgaaattttgcagatcgtcgtgttttccatgttcttcggtattggcggcgcgtcgcttggcgagaaattcaacgcgccgctggtcgccgccctggatgtggtttcacatattatgctgaaggtgactggctacgtgatgtacgttgcgccgttggccatttttgccgcgatctcctcggtgatcgccacccaggggctggggattctgcttaactacgcgtcgtttatcggcggctactatgtggcgattctgctgacctgcctggtgctgttggccgtgggctatatggtgctgaaaaaagaggtgttccgtttagtcagcatgttgaaagatccggtgctggtcgcctttactaccagcagctctgaagccgcttacccgaaaacgctggaacaactgacgaagtttggctgctcacgtaacatcgtgtcgtttgtgctgcctattggttactcctttaacctcgtcggctcaatggtgtactgctctttcgcgtcgatgtttatcgcgcaggcttataatattcatctctcttttgcggaaattacggtgctgatgctgacgctgatgctggcgtcaaaaggaattgcaggcgtgccgcgttctgcgctggtggtgctggccgccacgattccgagcttcaatattccggtggcgggcattttattgctgatggggattgaccattttcttgatatgggacgctccgccattaacgtgttaggaaacgggattgctaccgcgatgctggcgcagaatgaaggtttgctggaagaggactcggaagaacgcgttccgcagcagttagtggggtaa

SEQ ID NO: 75400 - DNA, 1659 bp, Citrobacter koseri
atgtttaaccgtatccgcgttgtcacaatgctgatgatggtgctgggggttttcgcactgctacagcttgtttccggtggtctgttgttttcgtcattacagcagaaccagcaaagttttgttatttcaaatgatttacgccagcagcagagcgaactgacctcgacatgggatctcatgctgcaaacgcgtattaacctgagccgttcttcggcccgcatgatgatggatgcctctaatcagcagagcagcgcgaaaaacgacctgctgaaaaacgccaaaagcacgctggagcaggcggcaacgcattatgccaacttcaaaaatatcaatccgctgccggagatggcggaagccagcggcaatgtggatgaaaaataccagcaataccatgcggcgctggcggaactggttcagttcctcgaaaacggcaacatggatgcctacttcgcgcagccaacccaggggatgcagaacgcacttggcgaagcgctgggcaaatacgctggcgtgagcgaaaaactgtacagcaaggcgtttgatgagagcgcgcgtgactaccattttgcccagtggcaattgggcattctggccgttgtcctggtgctgattctggttgtggtgtggtacggcattcgtcataccttgctgaatccgctggcgcgagtgattgcccatattcgtgacatcgccagcggtaacctgaccaatacgctgaccgtctccgggcgcaatgagatcggtgaactggcgggaaccgttgatcatatgcagcgttcgctgatagagacagtgactcaggtacgtgaagggtctgacgccatctattccggcaccagcgaaatcgctacgggcaacaccgatctctcctcccgcaccgagcagcaggcatcggcgctggaagagacggctgccagcatggaacagctcaccgcgacggtgaaacagaacgccgacaatgcccgtcaggcgtcgcacctggcgcaaagcgcctccgacaccgcacaacacggcgggaaagtggtggatggcgtggtcaacaccatgcatgaaattgccgacagctcgaagaagatcgccgacatcatcagcgttatcgacggcattgcattccagaccaatattctggcgctgaacgctgcggttgaagccgcgcgtgccggtgagcaagggcgtgggtttgcggtggtggcaggggaagtgcgtaacctggcaagccgcagcgcgcaggcggcgaaagagatcaaagcgctcattgaagattccgtttcgcgggtggataccggctccgtgctggtggaaagcgccggtgaaacgatgagagacattgtcaacgccgtgacccgcgtgacggacatcatgggtgaaatcgcgtcggcttccgatgagcaaagccgtggaatcgatcaggtggcgctggccgtctctgagatggatcgcgtcacgcagcagaacgcctcgctggtgcaggagtcggcggccgcagcggccgcgctggaagagcaggccagccgtttaacgatggcggtatccgcgtttcgtctggcatctcgtccattaaccgtaaaaacagacctgaatacaaccgcagctgcgtcgcgtacagcgcaaccgcgccagcttgcaactgaacaagatactcactgggaaacattttga

SEQ ID NO: 75401 - DNA, 1602 bp, Citrobacter koseri
atgtttaatcgtattcgaatctcgaccacgctgtttttaatcttgatcctctgcggtgttttgcagattggcagtaatggcttgtccttttgggcatttcgcgatggttttcagagtctgaaccaggtcgagcagagtaatcagcaacgcgcagcattggcgcaaacacgcgccgttttattacaggccagtaccgcgctgaataaagccggaacgttaaccgcgctgagctatccgaccgaggatatcaaacagctgatgaccaccgcccgggaaagcctggtgcagtccggcgttgtgtttaaaggttttatggcgacagaggcgagtacggaagaggggaaagcgttacaggccgccacggaaaaaagttatacacagtggtatagcgatctggagcatcaggccacctggcttgaaagcaaccagctgtcggattttctgaccgcgccggtacaggcatcgcaggacgcctttgacgccaacgtcacgacctggcagcaggatatcaaccgtgttctggagacggccagcgaacagggaaaagacaattatcaccgctcggcgatcatttttatcacgatggtggtcgtcgccgcgttattaaccaccggggcgctgttctggtcacgcaaaatgattgttcagccgttggcgattatcggcagccattttgacagcattgcggacggaaacctggcgcggccgatcgccgtgtatgggcgcaatgagatttccgctattttcgccagcctgaaggccatgcagcaggcgctgcgcgaaacggtcagcgacgtgcggcagggcagtttagcgatgcataccggcatttcggaaatcgcgatgggcaataacgatctgtcgtcgcgtaccgaacagcaggcggcgtcgctggcgcaaaccgcagccagtatggagcagctaacggcaacggtcgggcagaacgccgataacgcccgtcaggcctccggtctggcgaaaagcgcggcggataccgcgaaaaaaggcggcgaccaggcttcgcgtatggccagcacaatgcaggatattgccgccagttcgcagaaaattggcgacatcatcggcgttatcgacagcattgcgtttcagaccaatattctggcgctgaatgcggcggtcgaagcggcgcgggccggtgagcaggggcgcggttttgccgttgtcgcaggcgaagtgcgtaacctggcgagccgcagcgcacaggcggccaaagagattaaagggttgattgaggagtccgtaaaccgtgtgcatcagggatcgcaactggtggacaccgccgcgaataccatgacggagatcgtcagctcggtaacccaggtgaacgacatcatgggcgaaatcgcttcggcctccgatgaacagcgccgaggaattgagcaggtggcgcaagccgtcagccagatggatcaggtgacgcaacaaaacgccgcgcttgtcgaagaagctgccgccgccaccgatcagttagcgaaccaggcagaccatctctctgcccgtgtcgcggtatttaagcttgaagagcaagtcgtaacacaacaagagtcggcgccgccgcaagcggtacccgttgtatcctga

SEQ ID NO: 75402 - DNA, 867 bp, Citrobacter koseri
atgacatcatcgctgcccaccgggcaaacgtcattattgttacagatgacacagcgcctcgcgctgtctgacgcgcattttcgtcggatatgtcaattaatctaccagcgcgcgggaatcgtgctggcggaccacaagcgggatatggtttacaaccgcctggttcgtcgcctgagaacgctggggctggatgatttcggccgttatctcagcatgctggaagccaaccagaacagcgctgagtggcaggcttttattaactcattgaccactaacctgacggccttcttccgtgaagcgcatcacttcccggtactggcggatcacgcgcgtcgccgcaacggggaataccgtgtgtggagcgcggcggcctctaccggagaggaaccctacagcatcgccattacgctggcggatgccttagggatggcaccggggcgctggaaagttttcgccagcgatatcgacaccgaagtgctggaaaaggcgagaagcgggatttaccgtcaggacgagttgaaaacgctgtcgccacaacagttgcagcgttatttcatgcgcggtacaggcccgcatgaagggctggtgcgcgtgcgacaggaactggctaattacgttgagttttccaccctcaacctgctggataaacagtacaacgttcccgggccattcgacgcgatattttgccgtaacgtcatgatctattttgataaaacaacgcagcaggacattctgcgtcgttttgttccactccttaagcctgacggactgctgtttgcgggtcactcagaaaactttagcaacctcgtgcgcgactttagcctgcgcggacagacggtgtatgcgctaagtaaggacaaagcatga

SEQ ID NO: 75403 - DNA, 1050 bp, Citrobacter koseri
atgagtaaaatcagggtgttgtcggttgacgattcagcgctgatgcgccaaatcatgaccgaaattattaacagccatagcgatatggaaatggtggcgacggcgcccgatccgctggttgccagggatttaatcaaaaaatataaccccgatgtgctgacgctggatgtggaaatgccgcgcatggacggtctcgattttcttgagaaactgatgcgcctgcgtccgatgccggtggttatggtctcctctctgaccgggaaaggctcagaggtgacgctgcgcgcgctggaactgggggcgattgattttgtcaccaagccccagttgggcattcgcgaagggatgctggcgtacagcgagatgatcgcagagaaagtccgcaccgcgtcacgcgctcgcctggcggcgcataagccgatggctgcgcctgtgacgctaaaagcggggccgctgctcagttctgaaaaactgatcgcgattggcgcctcgacggggggaaccgaggccatacgtcatgtgctgcaaccgctgccgctttccagtccggcggtgatcatcacccagcatatgccgcccggttttacccgttcgtttgccgagcggttaaataagctctgccagattagcgtgaaagaggcggaagacggcgaacgcgtgttgccaggccatgcctacatcgcccccggcgacaagcatatggaactgacgcgcagcggggcgaactatcaaatcaaaattcatgacgggccgccggttaaccgccatcgcccgtcagtggatgtgctgtttcattcggtcgcaaaacatgcggggcgcaatgcggtaggggtcatccttaccggcatgggcaacgatggcgcggccggaatgttagcgatgcaccaggctggcgcctggactatcgcgcaaaatgaagcaagttgtgtggtgttcggcatgccgcgcgaggccatcaatatgggtggcgtgagcgaagtggtcgatcttagccaggtaagccagcagatgctggcgaaaatcagtgccggacaggcaatacgtatttaa

SEQ ID NO: 75404 - DNA, 390 bp, Citrobacter koseri
atggcggacaaagagctcagatttctggttgtggatgacttttccaccatgcgtcgcatcgtgcgcaacctgctaaaagagctgggtttcaataacgtcgaagaggccgaagatggcgttgacgcactgaacaaattgcaggcaagcggctttgacttcgtaatttctgactggaacatgcccaacatggacggtctggaactgctgaaaacgattcgcgctgatggcgcaatggcgtcattgccggtgctgatggtgaccgcagaagcgaagaaagagaacattatcgcggctgcgcaggcgggtgccagcggctatgtggtgaaaccgttcactgcggcgacgctggaagagaaactcaacaaaatctttgagaaactgggcatgtga

SEQ ID NO: 75405 - DNA, 645 bp, Citrobacter koseri
atgatgcaaccacaaattaaacctgttgatgagcattcagcaggggacatcattgcgcgcatcggcagtctgacccgaatgctgcgtgacagcctgcgtgaactggggctggatcaggcgatagcagaagcggcggaagcgattcctgacgcgcgcgatcgtctggactatgttgtacagatgacggcgcaggcggcggaacgtgcgctgaacagcgttgaagcctctcagccacaccaggatgaaatggagaagggcgccaaagcgctgaccaaacgctgggatgagtggttcgaaaacccgattgaactcgccgacgcccgcgaactggttacggatacgcgtaaattcctcggtgatgtgccggggcataccagcttcaccaatgcgcaactgctggacatcatgatggcgcaggatttccaggatctcaccggtcaggttatcaagcgcatgatggatgtgatccaggagattgagcgtcagctgctgatggtattgctggaaaacatccctgagcaaaattcacgtccgaaacgcgagaatgaaagcctgctcaatggcccacaggtcgacaccaccaaagccggcgttgtcgccagccaggatcaggtggatgacctgctggatagtctcgggttctga

SEQ ID NO: 75406 - DNA, 1158 bp, Citrobacter koseri
atgttaagtaaaatgggaaaatacgcacgtctttcattgtccgcagcaggtctttgcctgatggcgtccgcaacagcccaggccgcgaccattctgcgtgactgctttaccgcgccacagtattacagcgtcacgttcagcaacgaaatcaacgcaaacgacaacacggccaacaatattgttaaatttgatgagcatattgtcgggaacggcgttgaaatggaggcaaactgcacatgccctggcaatgtgtttgaatcaacggcaataatggaattgacgctggccggaagcccgcttaatgccggtatcgccgggtacggttatctgactgaaaacatagatattgatgttgcaggttatagcgatgccgttaattctctggacggtaccggcctgattcagatcagcattaaccagtatccgacgccggtgtcgtcgatggggaaagtgatcgagtcaatgaaacccaccgaaggttccgccagcgtctgtagcgacagcacccatcctggcgcgcccgcccccgcgaagcgaacgttcagatggaatgttatcgccgccacgttttatatcaaaaagcccattctcggtatcgaagtcattcccccaacgatactcgtgcaaaactacgcctgtctctattttgactcaggaagctgcgacgctggcagcgcacagcacgtatcaaatatctggctgagtggctcactctctgccccgctgagctgtacgattaatgccggaagcaccattgaggttgatctggggaaaattgtgagtaaacagtttgtcaccaggggtcagcctcccgaaggctacgccctgaaaaacgttgatatctcttaccactgcgacggcaacgccgtgggaaataccgacagaatcaagctaacgctcagcgccgaccagggggttgtagacaacagcgatcccctgatagccaaaatgctcggcagagacgacctgggagtgagaatctttagtgaggacaaccaaaatgttgcgctggacggcacctttgaatttccggtgacgatggatgagcaaggtaacggcgcggtacgcatcaaagccgcaccggtgagcacgaccagcgcaacgccagcgcccggcgaatttgagggcaatgtgacggtaaaaatggatctgcgctaa

SEQ ID NO: 75407 - DNA, 2544 bp, Citrobacter koseri
atggcttttggcccacctcttttacgtcagcgtctcaccccactggtgcgttgccttggcggtatgttgctggtctcttcctgtgtcgcgaacgcgcgcgagtatcgcttttcgccttctgcgctggaggggaatatgctgacgcagcaggatatcgatctttccttattttctaaatccagtgcgcaattgcccggcgtctacgcttcccgggtcatgattaacgatgtgcgcctggatgatgcggatatcacctacctcggcacgcctggcggcgaactgacgccgcagctcacgccggatatgctaagaaaatggggcgtggcggtcgataaatatcctgaattagccgcactcaatgcggcgaagccactgcctgaaccgttgagcgtgtatatcccacaggcgctggcaacgctcgatttctccgttatgacgctgcgccttagcatcccgcaggccgccattgccggcacgggtaaaggttatattgatccgtcacgctgggatgacggcgtccccgtcgcctttgtcgactacgccttttccggttcacaaaaccaggacgacacgcaaaacagcaccactaaccagtacctgaatatgcgcagcggcaccaatattggcggctggcggctgcgcaattacgccacctggagcgacactgacggcagccatcactgggaaaccatcaacacctatttgcagcacgatattgacgccctgaaagcgcagtttaccgggggagaaagcaacacccggggcgacgtttttgacagtctgcaataccgtggcgtcaatatcgcctctgatgaagagatgctgccttacagccagcgcggttacgcgccggtgattcgcggcatcgccagctccaacgccgaagtgtcggtacgtcagaacggttatctcatctatcagcaaaacgtcgcgccgggcgcatttgaaattaacgacctttattccacgaccaacagcggcgatctggaagtcacggtaaaagaggccgatggcacagagcgccactttacccagccttattccagcgtcgccgtgatgcagcgtcctgggcatatgaaatatgaagttactgcgggtcgctatcgcgcagacagcggaagcgaacaaaatgaaccggacttcgtgcagggtagcctcatttatggcctgaacaatagcgtcacgctgttcggcggcgtgaccgccgcgcaggattatcaggcgatgaacagcggagctggcctctcccttggcatcgtcgggtcgctttccgccgatgtgacgctggcgaaaacctggcttgatgatgacactcagcacaccggccagtcttatcgcctgctctactcagggaaaattgataccacggagacaaactttacgctggccagctaccgctactctacccgtggttattacagtttcgccgacgcgaatcaaaagtacgacgatcatgaagatgatctgctgtttcgctttaacaaacgcaaccggattcaggccagcataagccagaacgtgttcggcaccagcctttacctgaacggttatcagcaggattactggggcaccgcctacaaagagcgcagtatttcggcgggcctgaataccacgattaaaaatatcagcgtccaccttgcttatacctacagcaaaagcaacggcgaagagagcgaccagatgatcgccttcggcttcagcgtgccgttaagtcagtggctaccgggagcctggagcagctacaacatcagcaataacaagcatggctacacccagcaaaatatcgggttaaacggtacgctgctggacgatgaacgcctgaattacgccttccagcagagccattccaaccatgacggcgcagacaccagcagcgtatacggtagctatcgctcacaatatgccaacctcaatgcgggttactacacctcctctgacgatacgcagcgcttgagttacggcgtcagcggtgcgattgtcgcccatccacacggtgtcacgctggctcagcctttaggcagtcagtttgctatcgtcaacgccaacggcgcatcgggcgtacgcttccaaaaccagcgcggcattcagactgactggcaaggcaacgccatcatcccgtcattaagcccctatcaggaaaaccggattcgcgtcgacaccagcagtctgccggaggacgttgataccagtgaaaccgccgtgacggtgattccttcgcgcaatgccgccgtttccgccgcttttgatgcgcatgtcggctatcgcacgctcataaaattaactcgcccgaatggcatggcggtgccttttggcgcgatggcgacggtcgacgccctcgccatcagcggcatcgtggatgatacgggcacgctctacctggccggggtcgccgacgacgttcagttaagcgtcaaatggggaaattcacaggatcaacaatgcacagcccacatcacgctgaatagcgaacaccacgcggtcagcccgaccggcatccattacctcagcgcgacttgtcagcaggaaccgcaaaatgttaagtaa

SEQ ID NO: 75408 - DNA, 693 bp, Citrobacter koseri
atgcgtactgtatctcaggttttattatgcctccctgtaatattaacatcatttagccatgccgctggaattcaggttggccgcacgcgcattatttatgacgcagggaaaaaagaggtcgcccttccgctggtcaataaagagaaggaactgccgtggctgatccagtcatggtccgataccggcgacggtaaaacgcgtgggccttttattgtcacgccgccactgttccgtcttgacccgcagaaagaacaaagcctgcgtattgcctggaatggaaccgcgcttcccacagaccgggaatccctgttctacatgaatgtgcgcacaattcccggtacagccaaagaagacgatgataaaaacgtgttgcgtctgatttacaaaacgcgtctgaaattgttctggcgtccgaagggcttgcaaggtacgcccaccgagacctgcaagaacctgcattttgttcgtcgcggcgaaatgttaacggtggtcaatgaaggcgcgtttcacagcatctttgacagtctgctgctcggcaacaccagacttgagaaagccgatatggtcactcccaggtccagcgtgcaaatcccggtgccgaaaagcgcctcgggaaacaccgttagctgtcgttgcattacggattacggcaacgcctctgacaaatatactgtcactctggctcgggattaa

SEQ ID NO: 75409 - DNA, 576 bp, Citrobacter koseri
atgaacgcaagaggacatattatatcaggcgcactgctggcactggcgtcaacgggaaccttcgccgccgaactgaatgccggtacgattcacttcacaggacaaattatcgaacccagttgtgagattcagggcgatgatggaacgaacagcaccgtgccattaggtacttaccccacctcgcttttttccactccaggaactgaatcaacgcttgcccccttttccattgtattagtggattgcccacttaaaagcgatggtctgcccgccgttcagttaacgtttaacgggacaaccgccctgacaggttcttcgacattactggatgtcagtaaaatcactaccgccggagatacggcggcaacaggggtcggtattgccgttagcccggaaaataaagacacgcaactcattacaatggatggaggagaaggacaggtgtttatcgaattacccactctgacgggcgactctgttcaggcgaatttcaatgcccgttataaatcattcgcgcaaaccgtcactgcgggcccggccgatgcggacatgaccgtaaatatactttatcgttaa

SEQ ID NO: 75410 - DNA, 1152 bp, Citrobacter koseri
gtggcagaagagagcgacgacgacaaaacagaagcccccacaccccaccgacttgaaaaagcgcgggaggaagggcaagtcccccgatcgaaggagttgacctcactgctgattttgctggtgggcgtttgcattatctggatcggcggtgagtcgctggcgcgtcgcctggcggggatgttgtcggctggactgcgttttgatcacagcatggtgaacgaccccaatttgatcctcgggcagattattttgctgattaaagaggcgatgattgcgttgctgccgcttatcaccggcgttgtgctggtcgcgctgatctcgccggtcatgctcggcggcctgattttcagcggtaaatcactgcaacccaaattttcaaaactgaatccgctatcggggattaaacgcatgttctccgcccagaccggcgcggaactgctgaaagcaatcctgaaatcgacgctggtgggaagcgtggcgggattttatctctggcatcactggccggagatgatgcgcctgatggcggaatctccggttacggcgatgggcaacgcgcttgatttagtcgggctgtgcgcgcttctggttgtactgggcgtgattccgatggtggcgtttgacgtcgtctttcagatcttcagccacctgaagaaactgcggatgtcgcgtaaagatattcgcgatgaatttaaagagagtgaaggcgatccgcacatcaaagggaaaattcgccagatgcagcgtgcggctgcgcagcggcgcatgatggaagatgtgcccaaagcggatgtcatcgtgactaacccgacgcattactcggttgcgttgcagtacgacgaaaacaaaatgagtgcgccaaaagtggtcgccaaaggcgcgggactggtggcgctgcgcattcgcgaaatcggcgcggaacatcgggtgccgaccttagaagcgcccccgctggcgcgcgccttgtatcggcatgctgaaattggtcagcaaattcctggccagctctatgccgcagtggcagaagtgctggcatgggtatggcagctcaaacgctggcgtcttgccggtggacaacgtcctccacaacctgaaaatcttcctgtgcctgaagcactggattttatgaacgagaagaatactgatggctaa

SEQ ID NO: 75411 - DNA, 2079 bp, Citrobacter koseri
atggctaatctggtcgcgatgctgcgcctgcccagcaacctgaaatccacgcaatggcaaattcttgccgggccgatcctcatcctgctgattttgtcgatgatggtgctgccgctgcccgccttcatcctcgacctgctgttcacctttaatatcgcgctgtcgatcatggtgctgttggtggcgatgttcacccagcgtacgctggaatttgccgcattcccgacaatattgcttttcaccacgctgttgcgcctggcactgaacgtggcgtcgacccgtatcatcctgatggaagggcataccggcgcagcggcggcggggaaagtggtcgaggcgtttggtcacttcctggtcggtggcaactttgcgatcggtatcgtggtgttcgtcattctcgtcatcatcaactttatggttatcaccaagggcgccgggcgtatcgcggaagtgggcgcgcgtttcgtgctggatgggatgcccggtaagcagatggcgatcgacgccgacctgaacgctggtctgattggcgaagatgaagcgaaaaaacggcgtgctgaagtgacgcaggaagcggatttctacgggtcaatggacggtgcgagtaagtttgtgcgcggggatgccatcgccggtatcttaatcatggtcattaacatcgtgggcggcctgctggtgggggttctgcaacacgggatggacatggggcacgcggcggaaagttacaccctgttgacgatcggcgacggcctggtggcgcaaattccggcgctggtgatctctacggcggcgggcgttatcgtcacccgcgtaagcaccgaccaggatgtgggcgaacagatggtggggcaactgttcagcaacccgagcgtgatgctgcttagcgcatcggttctcggcctgcttggcctggtgccggggatgccaaacttggtgttcctgatgtttacggcggcgctattgggccttgcctggtggctgcgcgggcgtgaacaaaaaccaccggcagagccgcaggccgtcaagatgccggaaaataattcagtagttgaagccacctggaacgatgtacagcttgaagattcgctgggcatggaggtgggctaccgcctgatcccgatggtggatttccagcaggacggcgaactgctcgggcgaatccgcagtattcgtaaaaagtttgcccaggatatgggcttcctgccgccggtggtacacattcgcgacaatatggacttacagccagcgcgctatcgcattctgatgaaaggggtagaaattggcagtggcgacgcctatccgggacgctggctggcgattaacccaggcacggcggcgggaacgctgccgggcgaacagactgtcgatcccgcttttggcctggacgccatctggatcgaaagcgcgctgaaagagcaggcgcagattcagggcttcaccgtggtggaagccagcaccgtcgtggcgacgcatcttaaccacttgattggtcagtttgccgcagagttgtttggtcgccaggaagcgcagcaactgctggatcgcgtatcacaagagatgccaaagctgacggaagatttggtgcctggcgttgtaacgctcacgaccctgcataaagtgttgcagaacctgctggatgaaaaagtgccgatccgtgatatgcgcacgattctggaaacgctggccgaacatgcgccgttgcagagcgatccgcatgaattaaccgccgtggtgcgtgtggcgctgggcagggcgattacgcagcagtggttcccgggcaatgacgaagtgcaggtgattgggctggatactccgctggagcgcctgctgttgcaggcgttacagggtggtggcggccttgaaccggggctggccgatcgcttgctggcgcaaacccaggaggcgctgtcccgtcaggaaatgctgggcgcgccgccggttctgctggtgaaccacgcgctacgcccgctgctgtcgcgctttttacgccggagtttgccgcaattggtggtgttgtcgaacatggagctttctgacaatcgcaacatccgtatgacggcgacaattggagggaaataa

SEQ ID NO: 75412 - DNA, 393 bp, Citrobacter koseri
atgcgtaaattactcggcttattgttatttccgctggcggtacaggccgccggagaaggggcgtggcaggccagcagtatcggcattaccctgaaccatcgtggggtgtcggcgtcgtctgctccattgtcgtcaggccagccggtgtccggtttaatgacgctggtcgcctggcgctatgaactgaatggcccgacgccggcggggcttcgggtgcgtttgtgttcacagtcccgttgcgtggagctggacggacagagcggaaccacccacgggttcgcgaatgtgcctgccgctgaaccgttgcgcttcgtgtgggaggtgccgggcggcgggcgactgattcccgcattaaaagtgcagcgtaatcaggtgattgtaaactatcgttaa

SEQ ID NO: 75413 - DNA, 1584 bp, Citrobacter koseri
atgaaaacacgtaaaattggattggcgaattatttagcctatggttcgggcgattttctgggcgcaggaaccactgcattaaccgccgcatggttactctatttctacacgaccttctgtggccttacgccgattgaggcgacattcattttcgctgccgcgagggttctggatgcggtcgtcagcccgctgatgggctttctgaccgataacttcggttcgacctggttcggcagacgttttggccgtcgtaagttctttattctgcttggtattccatgcgtctttagctactcgctcatgtgggttggcgatatgggattctggtactacctgctgacttatctgctgttcgacattgtctacaccatgattcttgtcccttacgagacgctggtgccggaaatgaccgatgacttcaaacagaagacccggttctccggggcgcgtatctcaatggcgcagatgtctgcgattctggcctcgttcctgccgggtatcctgctgactgcctttggtaaagacaaccccgtttcttttttctatgccagcctggtattctcggtgctgtgcgcgctgatgctgacttttgtgtggttctttacctgggagcgcccgcgcgaagagtggacggaggcggcgctgcgcgcagaagaagagaagaaaagcctgacgttcagccagagtatgagccgtttgtttgttgagctgagctcgacgctgcgcatcaagattttccgccagcatctggggatgtatcttgggggatatatcgcacaggacgtctttaacgccgtctttacctggtatgttgtttttgtcctgatgcaggaagcctcactggcgtcgaatctgctcggtacgatggctatcttccagttcattgcggtgattgccatgatcccactgtgcattcgcttcgggcctgcgccgtcataccggatggtcgtggtgctctttggtctgagttctctctcttatgccgttctttattatgcgggcttaagcgatgtttattcgctgctgctgctgatctcagcgctggcggggcttggtcgcggcgggatcaactatgtgccgtggaatacctacacctatattgccgatgttgatgaggtgattaccggtcaacggcgggaagggatcttcgcgggcatcatgacgctgacccgtaaagcctctcaggccggggccgtcatgctggtcgggattgtgatgcagatgtctggttttgtatcagggcagagcatacagcctgaagcggtcagtcataccattctgctgattctgagctgcggcacgctgtccgtgctggcctttggtttcctggtttctttgcgtttcaaactgaatttgcaaacgcacggcaccctgcgtgaagagaccgccaaaatgcgtgagtcgggccgggtgatgccggaagccatcacgccgcaggcgcgtgcgaccgtcgagatgctctccggtatgccgtatgaatcactgtggggtaacaacaatattggttatctgaaccgtaataaacctgcggcgccttcgcttcaacagggcgctgcgctgaattcgacattgaacagaggttaa

SEQ ID NO: 75414 - DNA, 1140 bp, Citrobacter koseri
atgaaagtttggcccgtcaaacacagcccattattacgtcagccggagcgatttatctcccgggaagcgctgcaagccttgattcagacggtgacgaacaatctggtcaatatcagggatgagagcggacaatttctgctgcgcctggacgatggccgggtgattgataccaaaggctgggcaggatgggagtggacgcatggcgtcggtctgtacggtatgcatcagtattatcagcagaccggtgatgagaaaatgcgcgacattatcgacaactggtttgccgagcgtttcgccgaaggcgcgaccaccaaaaacgttaacacgatggcgccgtttttgacgctggcgtatcgctatgaagagacgcgtaacccggcgtatctgccctggcttgagtcctgggcggagtgggcgatgaatgagatgccgcgcaccgatcatggcggtatgcagcacatgacgctggcggaagaaaaccatcagcagatgtgggatgacacgctgatgatgacggtgatgccgctggcgaagattggcaaactgctcaaccgcccggagtatgtggaagaggcgatttatcagttcctgctgcacgtacagaatctgatggataaagagaccggtctgtggttccacggctggagctatgatggacatcataactttgccagggctcgctgggcgcggggtaacagttggcttaccatcgtgattccagatttcctggaactggtcgatttgccggagaagaacgcggttcgccgctatctgattcaggttctgaacgcgcagatcgccgcgctggcaaattgtcaggatgagagtgggctatggcataccctgctggacgatcctgattcctatctggaggcctcggcaacggcggggttcgcctacggcattctgaaagcggtgcgtaaacgctatgttggggcggaatatgcgcagacggctgaaaacgcgattcgcggtatcgtgaaacacatttcgccggaaggcgagttgctgcaaacgtcctttggcacgggaatggggcacgatctggatttctatcgcgacattccgctgacatcgatgccgtacgggcaggcgatggcgatactgtgtctgacggagtatttgcgtaagtatttttga

SEQ ID NO: 75415 - DNA, 1842 bp, Citrobacter koseri
atgacgtttaaagattttgctgcggaagaaaaactctttctgagacgcgtgatagtggcctttggcctggtggttgtctgctttggcgtcctgattgtcaatctctacgatttacaaatccgtcagcatcagtattacacgacccgttcaaacgaaaatgacatcaaaatgctgcccgtcgccccgacgcgcggcatcatctacgatcgcaacggtattccgctggtgcgtaatatcacctggtatgatatttccgtcaccccatacaaaattgccgacatggacgcgctgttacgtcagcttacccctctcgtggatctcacgcctgatgatattgcggcctttcaccatgcgttgaaatcaggcagccgctatcgcccggtggtattgaaaaacgcgctgtcggacgtcgaaattgcccgcttttccgttaaccagttccatttcaacggcgtgacgatcaacagttatgaagaccgtcagtacccctacggcgcggagctggcgcatgtgctcggttacgtgtcgaagattaacgacagcgacctgaaagcgctggatgaaaaaggtctggctgaaaactatgccgccgatcacaacatcggtaagcagggcattgaacgctattacgaaaatgatctgcacggcaaaacgggctaccgggaggtcgaagtggataaccacggacgcatcgtgcgcctgttaaaaaatgtcccgcccgttgccggcaaagacatccacctgacgctggatttacatctacaggaatatatagaaagcctgcttgccggtcagcgcgcggcagtgctggtcgaagatccccacgacggttcagtgctggcgatggtctccacgcccagctatgatccaaacccgtttgtgaagggcatcagccatcaggattacggcaggttactgcatgataaagatctgccgttgattaaccgcgtcacccaggggctatacccgcccgcctccacggtgaaaccttatatcgcgatgtctgcgctgttaaacggcgttatcacgccgcaaaccaccttcttcggcgcgccgacctggacgctccccggcacgcaacgccattaccgcgactggaaaaaaaccggccacggtatgctggatgtcaccaaagcgattgaagaatccgccgacacctttttctatcaggtcgcctggatgatggggatcgatcgcattaacaccatgctcggtcaatttggttacggtaagcccaccggtatcgatctggatgaagagtataacggcctgctacccagccgcgagtggaaagagagagtacataaaaaagcctggtatcagggggatacgatttcagtcggtatcggccaggggtactggattgccacaccgatccagatggtgaaagcgatggtagcgctgatcaacaacgggaaagtgatcgcccctcacctgcttcagagtaaagtgtccggcaaggccgtcatgccctggcaggcgcctcagacggaaacgcagattgccgatgccgcctcgccttattgggggctggtgcgacaggcgatgtttggtatggcgaatgcgccgaacggcaccggttataaattcttccacaccgcaccctacggtattgcagctaaaagcggcacctcgcaagtgttcagtctgaaagaaaaccagacctataatgcgaaaatgatccccatccgtctgcgcgaccatgtgttttacaccgctttcgcgccgtataaaaatccgaaggtcgcggtggcgttgattctggaaaacggcggcagcgacggcgtgaccgccgcgccggtgatgcggcaaatcatggatcacctttttacgccgcaataa

SEQ ID NO: 75416 - DNA, 1734 bp, Citrobacter koseri
gtgaatattcaggctcttctctcagaaaaagttagtcaggccatgattgcagcaggcgcgcctgcaaattgcgaaccgcaggttcgtcagtcagcaaaagtacagttcggcgactatcaggccaacggcatgatggcagttgctaaaaaactgggtatggcgccgcgacaacttgcagagcaggtgctgactcatctggatctcaacggcatcgccagcaaggttgaaatcgcaggtcctggctttatcaatattttcctcgacccggcatttcttgcagaacatgttcaacaggcgctggcttctgagcgtctgggcgtggctaagcctgcgaaacagaccgtggttatcgactactccgcgcctaacgtcgcgaaagagatgcatgtcggccacctgcgctccaccatcatcggcgatgccgccgtgcgcacgctggagttcctcggccatcacgttatccgcgctaaccacgtcggcgactggggaacacagttcggtatgcttatcgcctggctggaaaaacagcagcaggaaaacgcaggtgaaatggcgctggccgacctcgaaggtttctaccgtgatgcgaaaaaacattacgatgaagacgaagcgttcgccgagcgcgcgcgtaactacgtggtgaaactacagggcggcgacccgtacttcctcgacatgtggcgcaagctggtcgacatcaccatgacgcagaaccagatcacctacaaccgcctgaacgttacgttaacccgtgacgatgtgatgggtgaaagcctgtataacccgatgctgcctggcatcgtcgccgacctgaaagctcagggtctggcggttgaaagcgaaggcgcaaccgttgttttccttgatgaatataaaaacaaggaaggcgaaccgatgggcgtgatcattcagaagaaagatggcggctatctctacaccaccaccgacatcgcctgcgcgaaataccgctatgaaacgctgcatgcggatcgcgtgctgtactacatcgactcccgccagcatcagcacctgatgcaagcatggaccatcgtacgcaaagccggttacgtgccggattccgtgccgctggaacaccatatgttcggcatgatgctcggtaaagacggcaagccgttcaaaacccgcgcgggcggtacggtgaagctggccgatctgctggatgaagcgctggaacgcgcacgccgtctggtggccgggaagaacccggatatgcctgccgacgagctggaaaaactggccaacgcggttggtatcggcgcggtgaaatatgcggatctctccaaaaaccgcactactgactacatcttcgactgggacaacatgctggcgttcgaaggcaacaccgcgccatatatgcaatatgcctatacccgcgtgctgtccgtgttccgtaaagcggagattgacgagagcgccctgtccagcgcgccggtcgttatccgtgaagatcgcgaagcccagctggctgcgcgcctgttgcagttcgaagaaacgctgactgtggtcgcgcgtgaaggtacgccgcatgtgatgtgcgcctacctgtatgacgttgccggtttgttctctggcttctacgagcactgcccgatcctcagcgcggaaaacgaagaggttcgtaacagccgtctgaaactggcgcaactgaccgcgaaaacgctgaaactgggtctggatacgctgggtattgagaccgtagaacggatgtaa

SEQ ID NO: 75417 - DNA, 570 bp, Citrobacter koseri
atggcgaactggcagactattgacgaactgcatgatatttccgcagatttaccgcgattcactctggcgttcagagaactttccactcgcctcggtctggatttcgcatcgcttgaagccgatcacatttctttgcgctgccaccagaatgcgaccgctgagcgctggcgtcgcggatttgaacagtgcggcgcgctgttgtcggaaaatatcatcaacggcaggccgatttgcctgtttaaattacatgagcctgtttgtgtcgaacactggcggttttcgattgttgaattgccgtggccgggtgaaaaacgctacccgcatgaaggctgggagcatatcgaaattgtcctcccgggcgagccggagagcctgaacgcgcgggcgctggcgctgttgtccgacgaggggctgagccagccgggcattgtcgtgaaaaccagttcgccgaaaggggcgcgcgagcgtctgccgaacccgacgctggccgtgaccgacggcaaggtgaccattaaatttcatccctggtcaattgaggccattgtggcaagcgaacagtcagccgactga

SEQ ID NO: 75418 - DNA, 747 bp, Citrobacter koseri
atggcgttactggagatctgttgttacagcatggaatgtgcgctcaccgcgcagcaaaatggcgcggatcgcattgaattgtgcgcggcgccgaaagaggggggactgacgccgtcgttgggcgtgctgcgtacggttcgccagcatgttgcgattgcggtgcatcccattattcgtcctcgcggcggcgacttctgttataccgatggtgaatttgccgcaatgcttgaggatgtgcgtactgtcagagaactgggatttcccggtctggttactggcgtgctggatgtcgatggcaatgtggatctcgcgcgaatggagaaaataatggccgccgccgggccgctggccgtcacttttcatcgcgcgtttgatatgtgtgctaatccattcaatgcactgaagaatctcgcagatttgggtgtcgccagagtgctcacttcagggcaaaaatcagatgcggtgcacggtttgccaataattatggaacttattgcgcagggcgatgctccaatcattatggccggagcaggggtacgttcagagaatctgcaacgtttccttgatgccggggtgcaggaagtgcacagctccgctggagcgtggcaagcctcaccaatgcgttatcgcaatcatggattgtccatgtcaactgacgcacaagcggacgagtattcgcgctatgcggtagacggggcggcggttgctgaaatgaaaggagtcattgtgcgccatcaggccaattga

SEQ ID NO: 75419 - DNA, 969 bp, Citrobacter koseri
atgatcgagttcggtaacttttatcagctgattgccaaaagcccgctttctcactggctggaaaccctgcctgcgcaaatcgcgacctggcagcgcgatcagcatggtctgtttaagcagtggtcgaacgcggtggagttcctgccggaattaacgccgtaccgtctggatttattgcacagcgtcactgccgaaagcgaaacgccgttgagcgaaggccagcttaagcgtatcgacaccctgctgcgaaacctgatgccgtggcgtaaaggcccgttctctctgtatggcgtcaatattgataccgaatggcgttccgactggaaatgggatcgcgttttgccgcacctgtccgatctgaccggccgcaccattctggatgtcggctgcggcagcggatatcacatgtggcgcatgattggcgcgggcgcgcatcttgccgtgggaatcgacccgacgcagttgttcctgtgtcagtttgaagcggtacgaaaattgttgggcaacgaccagcgcgcgcatctgttgccgctgggcatcgagcagcttccggcgctgaatgcgtttgataccgtcttttcaatgggcgtgctttaccaccgtcgttctccgctggaacatctctggcagttgaaagatcaactggtgaaagacggcgaactggtgctggaaaccctggtggtggaaggcgatgaaaacaccgtgctggtgccaggtgaccgctatgcacagatgcgcaacgtctactttatcccttccgcgctggcgctgaaaaactggctggagaaatgtggttttgtcgatgtgcggattgccgatgtctgcgtaacctccaccgaggagcagcgtcgcaccgggtggatggtcaccgagtcgctggctgatttcctcgatccgaatgaccacagtaaaaccgtcgaaggttatcctgccccactgcgcgcggtgctgattgcgcgtaagccgtaa

SEQ ID NO: 75420 - DNA, 744 bp, Citrobacter koseri
atgtctcaccgcgacacgcttttttctgcgcctatcgccagtctgggcgactggacctttgatgaacgggtagctgaagtcttcccggatatgatccagcgctctgttcccggctactccaatatcatctccatgattggcatgctggccgaacgcttcgtacaacccaatacgcaggtctacgatttaggctgttcactgggcgctgcgacgctctcggtgcgtcgtaatattcatcatgccaactgtaaaatcatcgccgtcgacaactccccggcgatgattgaacgctgccgccgtcatatcgacgcttacaaagccccgaccccggttgagattgtggaaggtgatattcgcgacatcagcatcgagaacgcctcaatggtggtgctgaattttaccctgcaattccttgagccgcttgagcgccaggccttgctggataagatttatcagggtctgaatccgggcggcgcgctggtgctgtcggaaaagttcagctttgaagacacaacggttggcgaattgctgttcaatatgcaccatgactttaaacgcgccaacggctacagcgaactggagatcagccagaagcgcagtatgctggaaaacgtcatgctgaccgactcggttgaaacccacaaagcgcgtctgcatcaggccggtttcgagcatagcgaactgtggttccagtgcttcaactttggttcgctggtggcgctgaagtccggggggcccgcatga

SEQ ID NO: 75421 - DNA, 396 bp, Citrobacter koseri
atggtaagcgcgctatataccgtattaggtgcgttgttgttgatgaagttctcttttgatgttgtccgactaaggatgctgtatcgcgttgcctacggtgacggcggttttagcgaactgcaaagcgccatccgcattcacggtaatgcggtggaatatattcctatcgctgtcgcgctgctgctgtttatggaaatgaacggcgccgaaacatggatggtgcatatctgcgggattattttaatcgctggtcggctgatgcattattacggtttccaccaccgtctgtttcgctggcggcgttccgggatgagtgcgacctggtgcgccttgttgctgatggtgctggcgaatctttggtatatgccctgggagttggttttctccttgcattag

SEQ ID NO: 75422 - DNA, 819 bp, Citrobacter koseri
atgatctacatcggattaccgcaatggtcgcatcctaaatgggtgcgtctgggtatcaccagtcttgaagaatatgcccgccactttaactgtgtggagggcaacaccaccctgtatgcgctgccgaaagcagaaattgtcgaacgctggcatgcgcaaacaacggacgattttcgcttctgctttaagttccccgcaacgatttcgcatcaggccgcgctgcgtaactgcgacgatcttgtgcaggaattttttacccgcatatcgccgctggaggcaagaattggtcagtactggctgcaactccccgcgacgttttcaccgcgcgacctccctgcgctctggcgctttcttgacgcgttgccaaaggcattcacctatggcgtcgaagtgcgccatcccgtgtttttcgccaaaggcgaggaagaacaacagctcaatcgcggcctggttgaacgcgaggtgaatcgggtgatcctcgacagccgcccggtacatgccgcgcatcctcataaccaggccattcgcgaagcgcaacgcaaaaaacctaaagtgccggtccatgccatcgtgaccgcgaagcatccgttgatcaggttcatcggcagcgacaatatggtgcaaaatcagacattttttgccgactggctggcgaaactcccgctgtgggaaacgacctctacgccgtatctttttctacacacgccagatatcgcgcaggctcccgagttagtgaatacattatgggaagatttacgcgtggccttgcccggcgttggaaccgcaccgtctattccacagcaatcttctcttttctga

SEQ ID NO: 75423 - DNA, 567 bp, Citrobacter koseri
atgctggaactgaacgccgcaaccactgccctggtcgttattgatttacaggaagggatcttacctttcgctggcggcccccatgcggcaagcgatgttgtcgcccgcgcagcgaaactggccgcaaaatgtcgggcaaacagctcgccggtggtgatggttcgcgtcggctggtccgacgattatgccgacgcgttaaagcaacccgtcgatgcccgggcaccagccaacgcgctgccggaaaactggtggcgttatccggcggcgctcggtaaaggcgacagtgacctggaagtcaccaagcgtcaatggggcgcgttctatggcaccgatcttgagttacaattacgccgccggggagtcgacaccatcgtactgtgcggcatctccaccaatatcggcgtagaatccaccgcgcgtaacgcctgggagctgggttttggtctggtgatcgccgaagatgcctgtagcgccgccagcacggaacagcatcaaggcagcatgacacatatttttccgcgtattgccagagtgcgcagcgtggaggagatccttaacgcgttatga

SEQ ID NO: 75424 - DNA, 1773 bp, Citrobacter koseri
atgcgtacagaatattgcggacagctacgtctgtcccacgtggggcagcaggtgactctgtgtggttgggtcaaccgtcgtcgtgatcttggtagcctgatctttatcgatatgcgcgaccgcgaaggtatcgtacaggtcttctttgatccggatcgtgcggatgcgttaaagctggcttctgaactgcgtaatgagttctgcatccaggtgaccggcaccgtgcgtgcgcgtgacgagaaaaacgtcaacgccgacatggcgacgggcgaaatcgaagtgctggcgtccgatttgacgatcatcaaccgtgcagattctctgccgcttgactctaatcacgtcaataccgaagaagcgcgtctgaaataccgttatctggatctgcgtcgcccggaaatggctcaacgcctgaaaacccgtgccaaaatcaccagcctggtgcgtcgttttatggacgaccacggcttcctcgacatcgaaaccccgatgttgaccaaagcgacgccggaaggcgcgcgtgactacctggtgccttcgcgcgtccataaaggtaaattctacgcgctgccgcagtctccgcagttgttcaaacagctgctgatgatgtccggttttgaccgctactatcagatcgtaaaatgcttccgtgatgaagatttacgtgctgaccgtcagcctgaatttacccagatcgacgtcgagacctccttcatgactgcgccgcaggtgcgtgaagtgatggaagcgctggtacgccatctgtggcaggaagtgaaaggcgtggatctgggcgacttcccgatcatgaccttcgccgaagccgagcgccgttacggttccgataaaccggacctgcgtaacccgatggagctggtggacgttgccgacctgctgaaatctgtagagttcgccgtctttgccggcccggctaacgatccgaaaggtcgcgtagcggctctgcgcgtgccgggtggcgcaagcttaagccgtaagcagatcgacgactacggcaatttcattaagatctacggcgcgaaagggctggcttatattaaagtcaccgaacgcgcgaaaggtctggaaggcatcaacagcccggtagcgaagttccttaacgcggaaatcgtggaagcgattctggatcgtaccgctgcgcaggacggcgatatgattttcttcggcgccgacaacaaaaaagtggttgccgatgcgctgggcgcgctgcgtctgaaagtgggtaaagatctgaacctgaccgacgaagccaaatgggcgccgctgtgggttatcgacttcccgatgtttgaagatgacggcgaaggcggcctgacggcgatgcaccatccgttcacctcaccgaaagacctgaccgccgccgagctgaaagccgcgccggaaaacgcggttgctaacgcctacgatatggtgatcaacggttatgaagtcggtggtggttccgtgcgtatccacagtggcgacatgcagcagaccgtgtttggtattctgggtattaatgaacaggaacagcgcgagaaattcggcttcctgttggatgcgctgaaatacggtacgccgccgcatgcgggtctggcgtttggtctggaccgtctgactatgctgctgaccggcactgacaatatccgtgacgttatcgccttcccgaaaacgactgccgctgcctgtctgatgaccgaagcgccaagtttcgcgaacccggcagcgctggctgagctgggtattgatgtcgttaagaaggccgagaataactga

SEQ ID NO: 75425 - DNA, 444 bp, Citrobacter koseri
atggcatacaaacagcctgtctcggtgttagtcgtgatttatgcaaaggacaccgggagagtgctgatgttacagcgacgcgacgatcctgatttctggcagtcggttaccggcagtctggaagagggcgaaaccgcgtcgcaagccgctatgcgcgaagtaaaggaagaggtcacaatagatgttgcagcagagcaactgaccttaattgactgtcagcgcacggtggaatttgagattttttcacatttacgtcatcgctacgcgccgggaattgagcgtaatactgaatcctggttttgcctggcacttccctctgaacgagagatcgtgttcaccgaacatctgacctatcgttgggttaatgcggatgaagccgcgcagttaaccaagtcgtggagtaaccggcaggcgattgaagagtttgtaattaacgtcgcctga

SEQ ID NO: 75426 - DNA, 741 bp, Citrobacter koseri
atggcaggtcatagtaaatgggccaacaccagacaccgtaaagcagcgcaggatgctaaacgcggtaaaattttcaccaaaatcattcgtgagctggtgacggcggccaaactgggcggcggtgacccggacgctaacccgcgtctgcgtgcggcagtcgataaagcgctgtcgaacaacatgacccgcgatacgctgaatcgtgcgattgcgcgtggcgtcggcggcgatgatgatgcgaacatggaaaccatcatctatgaaggttacggtcctggcggcacggctgtgatggttgagtgcctgtctgacaaccgtaaccgtaccgttgcggaagtgcgtcacgctttcagcaaatgtggcggcaacctgggtactgacggttccgtggcttacctgttcagcaaaaaaggggtgatctccttcgaacagggcgacgaagacaccatcatggaagctgcgctggaagccggtgcggaagacgttgtgacctttgatgacggcgcgattgacgtctacaccgcatgggaagagatgggcaaagtgcgcgacgcgctggaagctgcgggtctgaaagcggacaacgctgaagtgtccatgatcccgtcaaccaaagcggatatggatgcggaaaccgcgccgaaactgatgcgtctgatcgatatgctggaagactgcgacgacgtgcaggaagtttaccataacggtgagatctctgatgaggttgcggctacgttataa

SEQ ID NO: 75427 - DNA, 522 bp, Citrobacter koseri
atgtctattattctcggtatcgacccgggttcacgcgtcacgggttatggcgtgattcgtcaggtgggcaggcaactgacttacctgggcagcgggtgtatccgcacgaaagtggatgatttaccgtctcgcctgaagctgatttatgcgggcgtgacggaaatcatcacccagttccagccggactatttcgcgattgaacaggtgtttatggcgaagaacgcggactccgcgcttaagctgggtcaggcgcgcggcgtggcgattgtcgcggcggtaaatcaggatcttccggtgtttgagtatgccgcccgtcaggtgaagcaaaccgttgtcgggatcggcagcgccgagaaaagccaggtacagcacatggtgcgcacgttgctgaaactcccggcaaatccccaggcggatgcggcggatgcgctggctatcgccatcacccactgccacgttagccagaacgcgatgcaaatgagtgactcgcggctcaatctggcgcgtgggcggctacgataa

SEQ ID NO: 75428 - DNA, 612 bp, Citrobacter koseri
gtgataggcagactcagaggcattattctggaaaaacaacccccgctggtattacttgaggtgggtggcgtaggctatgaagtccatatgccgatgacctgtttttatgagctcccggaatctggaaaagaagcgaccgtattcacccattttgtggtgcgtgaagatgcgcaattgctgtacgggtttaacaataaacaggagcgaaccctgtttaaagaactgatcaaaacgaacggcgtcgggccgaaactcgcgctggcgatcctctccgggatgtcggctcagcagtttgtgaatgccgttgagcgcgaggaacccgccgcgttggtgaaactgccgggtattggtaagaaaaccgcagaacgcctgatcgttgaaatgaaagatcgcttcaaaggcctgcacggtgacctctttacgccggccgccgacctggtgctgacctctccggcaagtccggcaacggatgatgcggagcaagaagcggttgctgcgctggtggcgctgggctataaaccacaggaagccagccgcatggtgagcaaaattgcccgccctgacgccagcagtgaaacattgattcgcgaagcactccgcgccgcgttatga

SEQ ID NO: 75429 - DNA, 1011 bp, Citrobacter koseri
atgatagaagcagatcgcctgatttcagcaggtggaacccaggtggaagaggttgccgatcgcgccattcgcccgaagttgctggaagagtacattggccagcctcaggtgcgttcgcaaatggagatctttatccaggcggcaaagctgcgcggcgacgcgctcgatcacctgctgatctttggcccgccggggctggggaaaacgacgctggctaatattgtcgccaatgaaatgggcgtgaacctgcgcaccacgtctggcccggtgctggaaaaggcgggcgatctggcggcgatgctgaccaaccttgaacctcatgatgtgctgtttatcgatgagatccaccgtttatcaccggtggtggaagaggtgttgtatccggcaatggaagattatcagctggacatcatgattggcgaagggcctgctgcgcgttcgataaaaatcgatctgccgccttttacgctgattggcgccaccacgcgagccgggtcattgacgtcgccgctgcgtgaccgtttcggtattgttcagcgtctggagttttatcaggtgcctgacctgcaacacatcgtcgggcgcagcgcgcggtttatggggctggaaatgagcgatgaaggtgcgctggaggttgcccgccgcgctcgcggtacgccgcgtatcgccaaccgcctgttgcgtcgcgtacgtgattttgccgaagtgaaacataacggcgccatctctgcggatatcgccgctcaggcgctggatatgctgaatgtcgatgcggaagggtttgactatatggaccgcaagctgctgctggccgtaattgataaattctttggcggccccgtcggtctcgataacctggccgcagccattggcgaagagcgtgaaacgattgaggacgtactggaaccgtatttgattcagcagggctttttgcaacgaaccccgcgcgggcgaatggcgacggtgcgggcgtggaatcattttggaataacgccgccggaaatgccttaa

SEQ ID NO: 75430 - DNA, 786 bp, Citrobacter koseri
atgattgaactgttattgcctggctggttagccgggatcatgctggcctgcgccgctggcccgctgggctcgttcgtggtctggcgtcgaatgtcctattttggcgatacgctggcgcacgcctcgctgctgggagtcgcttttgggttgctgctggacatcaacccgttctatgcggtgatcgccgttacgctgatgctggcagccggtctggtgtggctggagaaacgccctcacctcgctatcgacacgcttctcggcattatggcgcacagtgccctgtcgttaggtcttgtggtcgtcagcctgatgtccaacattcgcgtggacttgatggcttatctgtttggcgacctgctggccgtgacgccggaagacctgattttcatcgccatcggcgtggttatcgtgctggcgatcctcttctggcagtggcgtaatctgctgtcgatgaccattagcccggatctggcttttgtcgatggcgtgaagttacagcgcgttaagctcctgctgatgctggtcaccgcattgactatcggcgtggcgatgaagttcgttggcgcgttgatcatcacctcattgctgattattcctgccgccacggcgcgtcgctttgcccgcaccccggagcagatggcgggtgtcgcagtaggaatgggtatgatagcggttacaggcggtctgacattttctgcgttttacgacacgccggcaggcccgtcagtggtgctgtgtgccgcgctgctgtttattttcagcatgatgaagaagcaggcgagctaa

SEQ ID NO: 75431 - DNA, 756 bp, Citrobacter koseri
atgacgactttggtttcactggaaaatgtttcggtctctttcggtcaacgccgcgtcctttctgacgtgtcgcttgaactcagaccaggaaaaattttgacgcttctcggcccaaacggcgccgggaagtctacgctggtacgcgtagtattagggctggtagcgcctgatgaagggctgatcaagcgcaacgggcagctgcgtattggctacgtcccgcaaaaactgtatctcgacaccacgctgccgctgacggtaagccgctttttacgcttacgccccggtacgcaaaaaaccgacattcttcctgccctgaaacgcgttcaggccggacacctcattgacgcccccatgcaaaagctgtccggcggtgaaacccagcgcgttttgttagcccgcgcgctgctgaatcaaccacagctgctggtgctggatgagccgactcagggtgtggatgtcaatggtcaggtcgccctgtacgatctcattgaccagctgcggcgcgagctggattgcgcggtgctgatggtctcgcacgacctgcatctggtgatggcgaaaacggatgaggtgctgtgtctgaatcaccatatctgttgctccggcacccctgaaatcgtttccatgcatcctgaattcatctctatgttcgggccgcgcggcgcagaacagttggggatttaccgtcatcatcataatcatcgccacgatttacaaggtcgtatcgtactgcgccggggaaatggtcactcatga

SEQ ID NO: 75432 - DNA, 960 bp, Citrobacter koseri
atgattagtcgcattatgttacataaaaatacgcttcttttcgcagcattatccgctgcgctatggggtggtgcaacacaggccgcaaatgccgccgttgtagcctctctcaagcctttaggtttcatcgcttccgccattgccgatggcgttacggacacccaggttttattgccggatggggcgtctgagcatgattattcactgcgtccgtctgacgtaaaacgcttacagggcgcggacttagttgtctggatcggccctgagatggaagcgttcatggaaaagtcagtaaagaacattcctgacggaaaacaggtaacgattgcgcagctcgccgacgtgaaaccgttactcatgaaaggcgctgatgacgacgatgacgatcacgatcacgggcatgcgcacggtgaaaaaggtgacgcacatcaccatcatggtgattacaacatgcatctttggctttccccagagatagcgcgggcttcagcggttgcaatccatgaaaaattagtggaacttatgccgcaaagtcgagccaaacttgacgccaacctgaaggattttgaggcacaattagccgcaaccgataagcaggtaggtaacgagctcgcaccgctcaaggggaaagggtacttcgtttttcatgatgcctacggctactacgaaaaacattatgggctaactccgcttggtcactttaccgtgaaccctgagattcaacctggtgcgcagcgtttacatgaaataagaacacagttggttgagcaaaaagcaacctgcgtttttgctgagccacagttcaggccagcggtcgttgaagccgttgcgagagggacatccgttcgaatgggaacgttggatcccctcggaacgaacattaaactgggtaaaacaagctattcagcgtttctgaatcaattagccaaccagtatgcgagctgcctgaaaggagattaa

SEQ ID NO: 75433 - DNA, 1320 bp, Citrobacter koseri
gtgcaacagatagcccgctctgtcgccctggcatttaataatctgccccgaccccaccgcgttatgctggggtcgcttactgttctgacactggccgtcgcggtatggcggccttacgtttaccaccctgactctgcgcccatcgtcaaaaccatcgaactggaaaagagtgaaattcgttcgctgctgcctgaagccagcgaaccgattgatcaggcggcgcaggaagatgaagcgatcccacaggatgagctggacgacaaaacgtctggcgaagtgggcgtgcatgaatatgttgtctccaccggcgatacgctgagcagcattttgaatcagtatggcattgatatgggcgatatcagccgactggccgctgcggataaggaactccgtaatctgaaaatcggccagcagatctcctggacgttgacgccggacggcgatttgcaacgcctgacctgggaagtctcacgccgcgaaacgcgtacctacgatcgtagcggaacgggtttcaaaatgagcagcgaaatgcagcagggcgactgggtcaatagcctgatgaaaggcacggttggcggaagctttgtcgccagtgcgaaagacgccggtttgaccagcgcagaagtcagcgccgtcattaaagcgatgcagtggcagatggacttccgtaagctgaaaaaaggcgatgagttctctgtgttgatgtcgcgtgaaatgctggatggcaagcgtgaacagagccagcttctgggcgtgcgtctgcgttcagatggaaaagattattacgcgattcgcgcggaggacggtaagttctatgaccgaaacggcacagggcttgcgaaaggattcctgcgcttcccgacggcgaagcagttccgcatttcgtcaaactttaatccgcgtcgtctgaacccggtgaccggtcgcgttgcgccgcataaaggcgtcgattttgcgatgccgcaaggtacgcccgtgctgtcggtcggtgacggcgaggtcgtggtagcgaaacgcagcggcgcggcaggttattatgtcgctatccgtcacggccgtacttacaccacgcgttatatgcacctgcgtaagctgctggtgaaacctgggcagaaagtgaaacgtggcgatcgtatcgcgctgtcaggcaataccggacgttctaccgggccgcatctgcactatgaagtctggattaaccagcaggctgttaacccgctgacggcaaaactgccgcgtaccgaagggctgacaggttctgaccgccgtgcttatctggcgcaggtcaaagaagtcctgccgcagttgcgcttcgattaa

SEQ ID NO: 75434 - DNA, 972 bp, Citrobacter koseri
atggaaacgaaaaaaaataacattgagtacatccctgagtttgagaaatcttttcgtcatccacgctattggggtgcctggctgggcgtggccgcaatggcgggtattgcattaacgcccgcgtcgtttcgcgatcctttactggcgaagctgggacgttttgccggacgtttggggaaaagcgcccggcgtcgcgcgctgatcaacttatctctgtgttttcctgagtacagcgaagcagagcgtgaagctatcgtcgacagaatgtttgcgaccgcgccacaggcgatgaccatgatggctgagctggcaattcgtgggcctgaaaaactgcaaaagcgcgttgactggcaggggctggagatcattgatgagctgcggcggaataatgaaaaggtgatctttctggtgccgcacgggtggggcgtggatattcccgcgatgctgatggcgtcccaggggcagaaaatggcggcgatgttccataaccagggcaacccggtatttgactatgtctggaacacggtccgtcgtcgttttggcggtcgtctgcatgcgcgcaatgatggcatcaagccgtttatccagtctgtccgtcagggctactggggatactatctgccggatcaggatcatggcccggaacacagtgagtttgttgatttcttcgcaacctacaaagcgacgctgccagccattggccggttaatgaaggtgtgtcgtgctcgcgtggtgccgcttttcccggtttatgatggtaaaacgcaccgtctgaccatcctggtgcgaccgccgatggacgatcttctgactgcggatgaccacactatcgccagacggatgaatgaagaggtggagatttttgtcagaccgcatcctgagcaatatacctggattctgaaactgctcaagacccgcaaaccgggtgaaattcagccgtataagcgcaaagagtggtatcccatcaaataa

SEQ ID NO: 75435 - DNA, 1443 bp, Citrobacter koseri
atgtccagaaggcttcgcagaaccaaaatcgttaccacgttaggcccggcaactgaccgcgataacaaccttgaaaagattatcgctgctggcgcgaacgtcgtacgtatgaacttctctcacggcacgccggaagatcacaaagtgcgcgcggataaagttcgtgagattgccgccaaactggggcgtcatgtggcgattctgggtgacctccaggggccaaaaattcgtgtatccacctttaaagaaggcaaagttttcctcaatatcggcgataagttccttcttgatgccaacctgggcaaaggcgaaggcgacaaagataaagtcggtattgattataaaggcctgcctgctgacgtcgtgcctggcgacatcctgctgcttgatgatggtcgcgtacagctaaaagtgctggaagttcagggcatgaaagtcttcaccgaagtgaccgtcggcggcccgctctctaacaataaagggatcaacaagctgggcggcggtctctccgccgaagcgctgactgagaaagataaagcggatatcgttaccgcagcgcagatcggcgtggattatctggcggtctccttcccgcgctgcggcgaagatctgaattatgcacgtcgcctggcgcgcgatgcaggttgcgacgccaaaatcgtcgcgaaagtagaacgcgcggaagccgtctgcgaccagaacgcaatggacgacattattcttgcatcagacgtggtgatggttgcgcgtggcgacctcggcgttgagattggcgatcctgaactggtcgggattcaaaaagcgctgattcgccgcgctcgtcagttgaatcgtgcggtgattaccgctacgcagatgatggaatcgatgatcaccaacccaatgccaacccgcgcggaagtgatggacgtggcgaacgccgtgctggacggcaccgacgccgtcatgctgtcggcggaaacggcggcaggacaatacccggcagaaaccgttgcggcgatggcgcgcgtttgcctgggcgcagaaaagatcccgagcatcaatgtctctaaacaccgcctggatgtccagttcgacaacgttgaagaagcgatcgcaatgtccgccatgtatgcggcgaaccacctgaaaggagtaacggcgattatctccatgaccgaatccggtcgtacggcgctgatgacttcgcgtatcagttccggcctgccgattttcgccatgtcccgccatgaacgcacgctgaacctgacttctctttaccgtggcgttacgccggttcactttgacagcgcggctgacggcgttgtcgcggcaagtgaagcggttaacctgctgcgcgataaaggctatctggtttcgggcgatctggttatcgtgacccagggcgacgtgatgagcaccatcggctccaccaataccacgcgtatcctgaccgtcgagtaa

SEQ ID NO: 75436 - DNA, 870 bp, Citrobacter koseri
atgaatatgctagaaaaaatccagtctcaactggaacatttgagcaagtcagaacgtaaagtagccgatgttatcgttgcctcccccgaccgcgcgattcattcaagtattgctacgctggcccaggaagcgaacgtcagtgagcctaccgtgaaccgtttttgccgcagcatggatacgcgcggcttccctgattttaaactgcatctggcacaaagtctggcgaatggtaccccttatgttaatcgcaatgtggatgaagatgacagcgttgagtcctatacggggaaaatcttcgagtctgcgatggccagtctggaccacgttcgccagtcgctggataaatctgcgataaaccgtgccgtcgatttgctcacccaggcgaagaaaatcgccttttttggcctgggttcctctgcggccgtggcgcacgacgccatgaacaagttttttcgcttcaacgtgccggtgatctactccgacgacattgtcctgcaacgtatgagttgtatgaattgtagcgatgatgacgtggtcgtgctcatttcccacaccggccgaaccaaaagtctggtggaactggcgcagctggcgcgcgaaaacgatgcgatggtgattgcgctaacctctgccggaacgccgctggcacgagaagcaacgctggcaattacccttgatgtgccggaagatactgacatttatatgcccatgatctctcgacttgctcaactgaccgtgatagatgtgctggcaacaggatttactttgcgccgtggggcaaaattcagagataacttgaagcgtgtcaaggaagcgctcaaggaatcgcgttttgataaagaattactcatcaagagtaatgacagctaa

SEQ ID NO: 75437 - DNA, 1476 bp, Citrobacter koseri
atggcggtaacgcaaacagcccaggcatgtgacctggtcattttcggcgcgaaaggcgacctggcgcgccgaaaattgctgccttccctgtatcaactggagaaagccggtcagattaacccggatacccgtattatcggggtgggtcgcgcggactgggacaaagatgcctataccaaagtggttcgcgaagcgctcgaaaccttcatgaaagaaaagattgatgaaggcttgtgggataccctgagcggccgtctggatttttgcaatctggacgttaacgacactgaggcgttcggtcgtctgggggccatgctggatcaaaaatcgcgcaccaccattaactattttgcgatgccgccgagcacctttggcgccatctgtaaaggtctgggtgaagcgaagctgaacgctaaaccggctcgcgtggtaatggaaaaaccgctgggtacctcgctggcgacctcgcgtgaaatcaacgatcaggtaggcgagtactttgaagagtgccaggtttaccgtatcgaccactatctgggcaaagagaccgttcttaacctgctggcgctgcgttttgccaactcgctgttcgtgaataactgggacaaccgcacgattgatcatgtggaaattaccgttgcggaagaggtgggcattgaaggtcgctggggttactttgaccaggcgggccagatgcgcgacatgatccagaaccacctgctgcaaattctgtgcatgattgcgatgtcgccgccgtccgatctgacggccgacagcatccgcgatgagaaagtgaaagtgctgaagtcgctgcgccgcatcgatcgctcgaacgtgcgcgagaaaacggttcgcgggcaatacaccaccggttttgctcagggcaaaaaagtgccgggctacctcgaagaagagggagcgaacaagagcagcaacaccgagacctttgtggcgattcgcgtggacatcgacaactggcgctgggcgggcgtaccgttctacctgcgcaccggtaaacgtttgccgaccaaatgctctgaggttgtcgtctacttcaagacgcctgagctgaacctgttcaaagaatcctggcaggatctgccgcagaacaagctgaccatccgtctgcaacctgatgaaggtgtggatatccaggtgcttaacaaagtgccgggtctggatcacaaacacaatttgcagatcaccaagctggatctgagctactccgaaaccttcaatcaaacgcatctggcggatgcttacgagcgtctgttgctggaaaccatgcgcggtattcaggcgctgttcgtgcgtcgtgatgaagttgaagaagcctggaagtgggtggactccatcactgaagcctgggaaatggataatgatgcgccaaaaccgtatcaggcggggacctgggggccggtcgcttcggtggcgatgatcacccgtgatggccgttcctggaatgagtttgagtaa

SEQ ID NO: 75438 - DNA, 1812 bp, Citrobacter koseri
atgaatccagatttgttacgcgtaacaaaacgcattgtcgaacgctcgcgtgagacacgttctgcctacctcgcccgtattgaacaagcgagaacatccactgttcatcgctcgcagctggcatgcggtaacctggcgcacggctttgccgcctgccagcctgacgacaaagcgtcactgaagagcatgttgcgtaacaatatcgggatcatcacctcttacaacgacatgctttccgctcatcagccgtatgagcactatcccgagatcatccgtaaagcgctgcattctgcgaatgcggtaggccaggtcgctggcggcgttcctgcgatgtgtgatggcgtgacgcaggggcaggacggtatggagctttctctgctgagccgcgaagtgatcgcaatgtcggcggcggtggggctgtctcataatatgtttgatggcgcgctgttccttggcgtgtgtgacaaaatcgtccccggtctggcgatggcggcgctgtcatttggccacctgccgtctgttttcgtgccttccggcccgatggcaagcggtctgcctaataaagaaaaagtgcgtatccgccagttatatgcggaagggaaggtcgatcgcatggcgctgctggaatctgaggcggcctcttaccatgcgccaggcacctgtacgttctacggcaccgccaacactaaccagatggtggtggagttcatggggatgcagttgcccggctcatcctttgttcacccggacgcgccgttgcgtgaagcgctgaccgctgccgccgcgcgccaggtgacgcgcctgaccggtaacggcaacgaatggatgccgatcggtaagatgattaatgaaaaagtggtcgtgaacggcattgtggcgctgctggcaaccggcggttcaaccaaccacaccatgcacctcgtcgcgatggcgcgggcggcaggtatcctgattaactgggatgatttctccgatctgtcggaaatcgtaccgttgatggcgcgtctgtatccgaatggcccggcagatattaaccacttccaggcggcaggcggcgtaccggcactgatgcgtgaactgctgaatgcgggactgctgcatgaagatgtgaataccgtggcgggttttggtctgtctcgctataccttcgaaccgtggctgaacaacggcgagctggactggcgcgaaggggtggcgaaatccctggacagcaatgtgattgccacctttgataagccgttctcccaccacggtggaacgaaagtgctgagcggcaaccttggccgcgcggtcatgaaaacgtctgcggtgccggttgaaaatcaaattattgaagcgccagcgattgtttttgaaagtcagcatgatgttttaccggcttttgaagcgggtctgcttgaccgcgattgcgtggtggttgtgcgccatcagggaccaaaagcgaacggaatgccagaattacataaactcatgccgccacttggtgtattattggaccgttgtttcaaaattgcgttagttaccgatggacggctttccggtgcttcaggtaaagtgccttcagcaatccatgtaaccccggaagcctatgatggcgggctgctggcgaaagtacgcgatggcgacattattcgtgtgaatggacagacaggcgaactgacgctgctggttgatgatgcggaacttgccgctcgccagcctcacattcctgacctgagcgcatcgcgcatcggtacaggccgtgagatgttcagcgcgttgcgtgaaaaactgtccggcgccgagcagggcgcaacctgtatgacgttttaa

SEQ ID NO: 75439 - DNA, 642 bp, Citrobacter koseri
atgaaaaactggaaaacaagtgcagaagcaatcctgaccacaggcccggttgtaccggtgatcgtggtgaacaaactggaacacgcggtgccgatggcaaaagcgctggttgcaggcggtgtgcgcgttctggaagtgactttacgtaccgcgtgtgcgatggatgccatccgtgctatcgcgaaagaagtgccggaagcgatcatcggtgcgggtacggttctgaacgcgcaacagctggcggaagtgacggaagcgggcgcgcagtttgctatcagcccgggcctgacggagcctctgctgaaagcggcgaccgaaggcaccattccgctgattccaggtatcagcactgtttccgaactgatgctgggtatggactacggcctgaaagagttcaaattcttcccggcggaagctaacggcggcaccaaagcgttgcaggcgatcgcaggtccgttctctcaggtacgcttctgcccgactggcggtatctctccggcgaactaccgtgactacctggcgctgaaaagcgttctgtgtatcgggggttcctggctggttccggctgacgcgctggaagcgggggactacgatcgcatcacgaaactggctcgcgaagcggtagaaggcgcgaaacagtaa

SEQ ID NO: 75440 - DNA, 1179 bp, Citrobacter koseri
atgacgttattaggcaccgcgctgcgtccggcggctacgcgcgtaatgttattgggttcaggcgaactgggaaaagaagtggcgatcgaatgccaacgcctgggtgtggaagttatcgcggtggatcgttacccggatgcgcctgcgatgcacgtcgcccaccgctcacacgtcatcaatatgctggatggcgaagcgctgcgccgcgtggttgaacgcgaaaagccgcatttcattgtgccggaaattgaagctatcgcgacggacatgctggtagaactggagcaggaaggactgaatgtggtgccttgcgcccgggcgacgcaactgacgatgaaccgtgaaggcatccgtcgtctggcggcagaagagctggcgttgccgacctcttctttccgttttgccgacagcgaagaacgctttcgcgaggcggtggcggagatcggttttccctgcatcgtgaagccggtaatgagttcttctggtaaaggacagagtttcatccgcagcgccgaccaactgtcgcaggcatgggaatatgcccagcagggcggccgcgctggcgcagggcgcgtgattgtcgaaggcgtggttaaattcgattttgaaatcactctgctgaccgtcagtgccatagacggcgtccatttttgcgcccctgtcggccatcgtcaggaagacggcgattatcgtgaatcctggcaaccgcagcagatgagcgatctggcgctggcacgcgcgcaggagatcgcccgcaaggttgttctggcgttaggcggctatgggttatttggcgtcgagctttttgtctgcggcgatgaggtggtctttagcgaagtctccccgcgaccgcatgataccggcatggtgacgttgatttcgcaagatctgtcagagtttgccctgcacgttcgcgctttcctcggcctgcccgtgggcgaaattcgtcagtatggccctgccgcgtccgccgttattttaccgacgctcaccagtcagaatgtaacgtttgataatgtacaatcggccgtcggagcgggtttacaggtgcggttcttcggcaagccggacatcgacggaacccgccggttaggcgtcgcgctggcgacagcggaacgcgtcgaagaagccgttgagcgtgcaaaacacgcggcggcgcaggtgaaagtcgcggggtaa

SEQ ID NO: 75441 - DNA, 291 bp, Citrobacter koseri
atggcggttgaagttaaatacgtggtcattcgggaaggtgaggaaaaaatgtcgtttaccagcaaaaaggacgccgatgcgtatgacaaaatgcttgatacggcagacctgctcgacacatggcttgagcagtctccggtagcgatggaagacgaacagcgcgaagcgctttctctgtggctggctgaacaaaaagacgtattgagcacgatcctgaaaaccggcaaattgccgtcgccgcaggtggttaaaagcgatgcgacgacggaggatgacacgcaagcggcctga

SEQ ID NO: 75442 - DNA, 357 bp, Citrobacter koseri
atgaataaaaaaagaggagcgctgttgagcctgctgttgttgtccgccagcgtatcggtcttcgctgccgatacggccagcaaatcggtgaaattcccgacctgtgaagggctgaacgctgatgggatcgccgccagcgtgaagcgcgattatcagcaaaaccgtatcgtacgttgggctgatgaccaaaaaaaggtcggacaggcgaatccggtggtgtgggtcaacactcaggatattaccggcaaagagggtaactggacggttcctctgactgttcgcgggaaaagtgccgatcttcattatctggtaaaggttgattgcaaagccggaaccgcggaataccagccccgctaa

SEQ ID NO: 75443 - DNA, 660 bp, Citrobacter koseri
atggctaactggctaaaccaattacaatctcttctcgggcaaaacggagcctctgcatcttcttcaggcgaacaagggctgagtaaactgctggttcccggcgcgttaggcggtctggccggtttactggtcgccaataaatcttcccgtaagttactgactaaatatggcaccagcgccctgttggttggcggcggcgcggtggcaggcaccgtcttatggaacaaatacaaagagagggtacgtgctgcgcatcaggatgagccgcaattcggcgcgcagagtacgccgctggaccaacgaaccgaacggttgatcctcgccctggtgtttgcggcgaaaagcgacgggcatatcgatagccaggagcgtacagccatcgaacgccagttgcgtgaagccggggtggaagagcagggacgtgtgcttatcgaacaggcgattgaacagccgctcgatccgcagcgtctggcgcaaggcatccgtaatgaggaagaggcgctggaaatctacttcctgagctgtgccgccattgatatcgaccattttatggagcgcagttatctgaatgcgttgggcgatgcgctgaaaattcctcaggatgtgcgggacggcatcgagcaggatctgcaacagcaaaaacaggctctgccaggctaa
